United States Patent Application Publication US 2014/0057251 A1 - sequence listing, part 23

SEQ ID NO: 24148 - DNA, 3121 bp, Cannabis sativa
  modified_base (2587)..(2589): a, c, t, g, unknown or other
caggaattcccggaacacgcttttatgtcgttataatgtccgtttttagtgctttgttttagttaagtttttaatattatcacggtttttaataattaattaatctattagtattaagttagtttataaaaatcacacatgtgacgtccctatagactagggcatcacaacgagggatatcctagtggacactggaggtccccaaaatcaaggaaacaccaacaatagggaaactcagcctaatgatccaagaacttcacatggtaacatgaatcacgacaatgtacaccctaacaatccaaagtcatcttgtatgaatgcaaataacagacaaacgtgacatggtgactagggattcacccatcatattgcaagggatccaaggcgacatctcgagttagggcgtccaccgatacactcacgagggctaaaccaaaacgaaagagatagaatgtatacttacttgagtaaggactgtgtatcaaatttgatatggaccataaaaactaacaccatattggatgttttccatttgaataagactggttttggtggacattaaatgatctaacaccatagaaaaaaggatgttagaaatgttctttttagcattcattcttcaaaaagtctaggttcgaatggttatggagaagcttttctttaagggtctctggtccaaaattggaaaggaaatcactagtgctatcctcacttttttattggaagggaaaattgtaagtgatcttaatgaaactataatttctcttattcctaaatctaattctcctacttctaccgtggattataggcccattgcgcgttgtaatacgatctacaaatgcatcttgaagatgctttgttatagattaaatgaagttcttctagggctggtgcataacaaccaaggtgctttcattaaaaataggttgatggctcacaacatcctaatttttcaagatttgctcaaagcatataccaagaaaaatatttcatcttgttgcttaatgaaaattgacctcaataaagcgtatgatatgggggattgggactttgttgctaattttttgaaagggttttccattccctcaaaatttattgattggattattatgtgcttatgtggtacctctaattccttgatgctcaatgggtgtgtctatggctctttcaaaggtgagaaaggtcttaagcaagatgatctcttctcgcctttaatctttctattcattatggattatctcacaagattatttctttaagcctcaaagactaaaggattcggtttccataccatgtgtaagtctctaaaccttgttgatctttgcttcacggatgactttgtcattttttgtaaaggaaatctaccttcttcaaacattattcagtctgcatttgaagagttttgtagtaccagagggctggtcgcgaataatgtaaagtcctctatctattttgcggacttggatgctaattgtaagcagtctttactagtggcttctaagatgataaaaggctctttttctttcaaaaattttggggttaatttgaggcctaccaaatgaaaagtgtcagattgtggttggattgttgagaaaatccaaaagaatttacatggttagtcaagtgatcatcacttgtcttttgttggaagggctctcctagtccaattggttttaatggggattcaaaattactagatgaaactttttatcttccagcagaaagttacagataaagttgaaaagttgtgtcgtaatttcctttgggataagtttgataatagaagaaaattgcactttgcttcctagagtcatgtttgcttgcccaagaactgtggtggtattggttttagggaagggaaaaagtagaattttgttgtgatggctaagtacatatgggccatttcaactaaggaggattgtcatttggttcgctggattaatggtgcttatatgaagggtacatgatttctggtctttctctcctagtgtaaatattaattggtactttagaaaactattgagctgagaaataccatcaataaaagagagcttttggttgctaagtacaaggaaattcaaagaaaaacaattttatttatcccttattttttttaagacagtaaattattacaagattgtctggcacaagttaaaagttccaaaataccgttttattttgtggcaagcggtcaatgagcatcttctaactcgagatcttcttgctagattcttgattgtggaatcacctttatgcgtggtatgtggtttatttcccgaatctcacattcacctcttctttacttgttctttttctagattcactccaaaaaatagctacttttagtgacaactatttagtcacaacataaattttttgtgactatatctgactttgatcacaacaaaaagttacttgtgactaaaacatagtatttagatataaattgtcactaatttagctttagtcacaacaaattgtaatttttgtaacttatactttcagccacggatcttttagtcataacataggaatgaaaatttataattagtcacaactatatattttacttttagtcacaagtttnnntgtgactaaaagtaaatttttttataatgattggtaattattgagattacttcttggtttggcttgttggattggccaattgtcttggggattggttgaataattcggtcagatctgggacagatgttgttgcctcattatcttgggtcgtggtagcagttgttatttattgtgcaactggaatcgttgcctgtttgatggagtttgtactcagctaaaatatttagcaattagagtttgcttattctaaaagctagaatttattgctgtaattaattttgcgaaactttcagcaaaagagaaaaatgtaatgactattttaaatagtttttgatttattaagttgcttatagcagtgtgtattgtttaatggttgttggaataaaattttcttcccttctctcaaaaaaaaaaaaaaaaagaaagaaagaaaaaaatcagtgtttagaaacatatgccaactcttgatgaatgaagtatttgtgttacatgcaaaatagaatcattgttaattcttggctggtcaaataaa

SEQ ID NO: 24149 - DNA, 3350 bp, Cannabis sativa
  modified_base (1622)..(1640): a, c, t, g, unknown or other
acctaactacaacgaaggcgtgttcttcaactaatggtatcattttctgaaaattacatttatatcctttgtttcttcttttttgctcatattttctagacttacaagccttctatttatttggatttgaaaaatttgtatgaaaaaaactatttttattagattttcttaaaatatatttatacttagtatatttttacaagaatttgtgatgtttgtcttaataatattttttttttctaacaaaaaaagagatcacgtagtatagatttttttttcatttcttcggtagttttgataatcttgaggaccacgagtcagttataggaaccttatacttcattgtaccttaattgagtcattttgacccccaaaaaaaaaaaatactagtaaagatttccctaatagcacacaacatgtagtgtcataataatatttttattcatgtgtatttaattataattaaatttttttctctaaaattataatttagagttttcttccattgaactatgatatttgtagagttttaccttaaactattttttgttataaaaattagttcctcttagctataaaaattgtagcatgtatccctattgagttacattattatgcccaatttttaaaaatattaattaatgttttatgtgacaaatatggagaaaaaatatttttctaatatttttgaacattttttaaacaactatagctcttttaaattttgtaaattatataattttttatttaaattcaaataatagaaataaaatcctttaatttgagaaaacatatacttttagtgtgaaaaaattaattgaaaataaaatatataagataatgttaaaatcttttggtattgatttgtttgttgaagatgtaatttctcttcttatgaattacaatgatagatctttgcttttctttcaataagttgaagcaaatgatttaacttaataaataattattgtcctttccatacaaaaaattaaataaattattttggctgataaaatgagaaattttaaaattttaaaataatgaagatgaaaaaacgaattaataaaaaatatatttatttttcttagaaaaaatctaagaagacaacatggtgacaacatatatttctttgaaaaaaaaacatggtaacaacctatatttcttgaaaaatgaaaacatggtgacaacctctctttaataaaataaaattaacaaaaaaaaaatagttttattgaaattagcacaaatagttttttttaattctgagttcataaattgtaacaattaattccttatagataaatttgcaattcgtcaattgaattcatcacataaatatatatatgaacttattccatgttataattgtcaaaaagttataaatgaaaaatgaatgaataattaattgaactaagaatttaatactaaaatgactatttattatttaattggtaggtatgaagaatggttatctagtaatttgattgactcatagttttactttgtactagcacatagttttccattttcagctctagtttttactttggcaagtacttttatttatgatttttttttttttgaaaattacataaaatataaaaattatatttttacgtttnnnnnnnnnnnnnnnnnnntatatttttacaattttttataaaatctgaaacaacaaaaaaaactacataaaaataacaggaaaataacattcaaacaacaacaaaaaataacatataaataataaaaaatcaacaataaattaacaaaagtacaatataaaaagactgtattctctataaataaaattataaaaatcgtaaaaatatttaaaatttcgtacaactatatttttgtaatttttttattattttttgtatttgtaaaataatccttttttttacaaaaaaaaaaaataaaataatttatatatatatttatatataacaatgctaattaactcaacaaacaaacaaatgaaaataacaaaatttaagagaagaagaatagagaaattctagtgaactttgttgaaatttgtatgtaaagaatttccaaatatttcatgataaccccaattttaatttcccaaataattagaaaagaaattgaagaatgttgggtcaaaaaaaaattatattactacttttttatgtttatttacaattttatagtctaaagtttttatttaaaaaaatatacttgtaaaattttaaaattacaaaaataaattttgttcaacaaaagtaaaaaaaaaaaatataacgagaaatcaacctcgcgacagttataaatcaactataaacaaccagaaaaataactttatgataattataatacaactataaataaactataaaacaacgaaaaaattaatttattgtttttactagagagatatttttgtaaataaaaatgttcaaagcataaaaataaaaaaaaaatccgtgtcgaaatatttttgtaatttttttttgaaattttagtcaattatgtattttttcaaaaagaatgtcaccatttcagtagaaataaaaatcccgagttacatcgtattacatcagtgatcgaggcctgcaaaatcgtcggggagaaataacattgttctaagtaaccaaaattgactaaaattttagttatgctaatgtaatatataaacgcttaaatcaaaaaaaaaaaagtaaccaaaattttcagctatgaagtatcattcatcatcatcatgatgaagtgatgaagaagcccaagtaagttgaaggtttgtagtgaagtcattttctctaccaaggattatagtgttgtgattggcacctcttatgatgttaatctctgcatttggagccattctcttgatgttgtaagtacattcaacaggggcaattttgtctttatcaccatgaattacacaaatcttgactttggcttcactcaaaactcttaagtacttttccattagcttgtttcctccacacaacacattgtgcattgaatgccaagctgagtggtgtgtatgtctagccaagtccaaaatcatgaaatgtaggctcctacattgaaaaataaagtcataaccaaaccaagaataatttgaaaagtattgatagatttagtcatatataaaaatgtaatagattaggtctcattttatgaaaaaaaaaaaataattagaatttttgtagacatttactaaattatatcttaaggtcattaaaattttttctttaactattgagattgttggactttggaacttttgcttaattttagtaagaaaagtctaatatagatgaaagttcaagaagcataatttggtacatgtcaaagttcgatgaatatgatttggtagatat

SEQ ID NO: 24150 - DNA, 2476 bp, Cannabis sativa
  modified_base (26)..(43): a, c, t, g, unknown or other
cggatatccgcattttgcggattggnnnnnnnnnnnnnnnnnngattggattggatcggatactttgtgaacacccctaggattgatggtgtttttggtaatggataaatgggccttagttcaaacacaagcccaatcgttaaactgagcccaatctgtttcagccgagggagattcatcctctttctcaacccactcgaaaatgctgtgtacctctctctccctttcgattcgaatccatggcgtgctgcattaaattctctctccggtgcccctctgatacgcgtcgtttcgcgtcatcatgtcatctccaaaaccctagtaatcttcgcctatataacctccttcccacaaatccctcgtcacctaatcccaaaaaggtaattctcattaaatttaattaattgttacttttgaattcccttaattaatggaataaactcctttaattataattgggtcatatgcgaattcgcttgagccagaatcctatgcgtgcagatctcttattcctttgctaggcgtcgtagctcttttactgtgaagtctcacatggccaccggggagaaaaaacctatttcggaggaacgaatgcttgttagttcactcttactctaaacccttttcagggtttaactatattatttagaaaacgacccagaatacaatgtaggataataacaacaaagatggaattcttttaagtactttttgttttgtttgttttcgtttggtgttatttgattataatgtttttgggaagatagaagaaatttgtttctaaagaatatgtttgccttgaagaactaacattatcttgtagatagtgtttgttggtttataaaattcgatggataagtcaattcattgtttatttaattgtccaggtgtatgtaccgccgcatccattgattaagcattgggtttcggttttaagaaatgagcagactccttctcccatttttagtaagtaaatttatatatatttaaataagtgtgtaatttgaagtgaattgagctgtaattctaattagaatgctttaaactttaaatgtaggaaatgctatggctgagttggggaggctacttatgtatgaggctgcaagggattggttggttagttgttactggaactcatcatttagttttagtttttgtttaatcctgtttgtcttacacccctaaacttggactgaagcccagacatgttcttttttagtttttatgttacacttttgttaggagttctctacttggttgttaatttttgggaagatttacctgagataccggtctttcttatggatgtcagcctaccgtagtgggagagattcagacaccaatggatgttgcaacggtcgagttcatagacccaagagaacctgttgcggttagtttaatgtttctctctctctctctggttgtttatgtgcttttgtctatgcatatgttatcatgtatttatttcctcttttagttctgcaggtcattccaattttaagggctggtctagctctagcagagcatgcttcatcaattttgcctgcaacaaaaacatatcatctaggtacgaaagctcatactcaccattatcacttcactattaggcatttgattctgaaactttggtattgaattctttgtttttttttgttttttttgtctttttgcatattaagggataatcagagacgaggagacacttcaaccatcaatatatcttaacaagtaggactttcctgtcataattatgttcagtgatttcagtttccctttacttatttttcatgaaatgtggaaataacctttttcattctgcataaacagtttagattctatgaattggcgtaggttcttataaatcttttgcctctttaataggctacctgaaaagtttcccgaagactctcgcgtatttgttgttgaccccatgttagcaacaggtatgaatttaatggctccaaaatgatctctatattttgcaaaatagtttcttgcatattacagtatctgttttgaatcttaatttcttatgtgtataaactgggtttggtttttcaactatttcgtaatctctttgtattgactactaggtggcacaatagtggcagctctcaacttgataaaagaatgtggggttgagaacaatcaaattaaagtggtaacttatatacaacttcactatttctgtcaattttattttcgtagttaataattttggatctttagcttgatggagttggaactgagttgcatatatctatggctatatatttagagtgttatttttttatttatttatttatttattttttaaatataacaattaaaattaaattcaccacatatctctcttatcttttattaatatttttttatatttaatatgattatataatatatttatttctattattgttctttttcaaaataataaaatagaaaaatatatttatgtttcttaaagaattactat

SEQ ID NO: 24151 - DNA, 1270 bp, Cannabis sativa
tatatatatatatatatcagaataatcacaaagctaaggtagaaaacgttcagaatcattcattttttttttttttttgaaagacagaatcattaattaagtgttacattttgttaggttttgtcttctttgtgagcaactttaatatcatgatgagctttactttacatcattaattaagtgttacatgatggattctaaagcttaattataaatatgatcagtcacctaattcaccttttgaactcattattattctaataaacttagcattttattccaatagtattatttgctctaatataacgcgcaaaagatacgggtggagtcggctctggaagctgaacttcagcgataattcttgctctgaacagggcatgtgatgcagggtggaagaaagtgtgtgtcatgtcggattctaaaattgtagttcaggctttgtcaaccaattctcttcctgactggaaagtagctagtgtgttttatttatctttaaacttggctaaaaagtttcggttatgttgtttttcttttattaagcgtagttgtaatgctttggctgatggtgtagttaagaatgttagaatttctagtgatttggcaattttgtatcaaggggaggacaataccccggtaattcccatcaattttcttaattaatgaactcatggttctttcaaaaaaaaaaaaattaattaattaattgggccaagtttcaattggctttttttgcaaaaatattttcaaaattgaatcagtgtgatcatgttattatgttgggtaatgaatggtgttcatatggacctcttctctcaagtgggtcatatattagaatcatcaccagtatgaatggctaacgggacgggtgtctgccccgacccgctactgagacccaccttgacccgacccgaccagcctctcatgtaggctaataaatgacctctttgatttatgtacctgcttattggtatatctaccggatctcatcatgggccatcactgatcactatagctagctagtgttgctaattaagatgaaattatactctattatttattttttattttttattttaattttaacttttattttattactgttaaatttatactcatttttacaagttatattatcatgcattaaaaattttaattttgataagttatgtggagttatatttagtaatttgattataaaaataggtataaatcaattaaaattattttagagttatatttagttaatgtataattgaaaaaaaaaaaaaaa

SEQ ID NO: 24152 - DNA, 2391 bp, Cannabis sativa
  modified_base (2334)..(2334): a, c, t, g, unknown or other
aaaaggaaaaattattttgtcacctaacttgccaaaaaaaaaactttacaatcttaattagctttttaaaaattcagttttggacagaattcctcgtttcttccaaaataaaaaaaaaccaaaaaaattgtcgtcgacaatcgcagtaaataatctttttcttgaaaacatgataaacatcacattaataatcttagtttaaccatgttctttaaactaatcctttttgtttctcaccaacggtttaaagttgcagatatataattagtaaatatgtttattaatactttgtttacattactacttccacaaagcggggatagctcagttgggagagcgtcagactgaagatctgaaggtcgcgtgttcgatccacgctcaccgcactattatcttttttttttccctataaattaacttcacaccttcatattttgcgtgtatatttacatgggcttatgaatttacttgttactatatcatttgtttttgttcacatgtcttgatgtgtttttagagattttatgatattattcttaaaatgacaccaaacatgaaaaatggagagaatttgcagagagagaaagagaatagaaatgtgtagttctacttctactaatcttttccaggtcgtcttcttttttctttacttataataatgtctcatttcacctaccaaaatgaaaaaacaagtcacacctattctatataggaaatttctattgtggattcttatagtattggaacattcttttgactgttgatgaagatggtttttgaatgtatgaaccaattaatttatactgacacaaaataatataaaatattgttgggttccctctttgttgttagacttggactaataaaagctaaagcctatttataattaaaaagaaaaaaaaaaaaaaatgaaaagctaagaggttgtttggcttcataactaaaaaacattttctgttttttaaaattgaaaatagtttttaaaaactaattggggccgtttgacaaaattttttaaaaacagttttacaaaattgagttttaaaaaattaaaaaaacagaaaacatcaaaatattgttttcaattttcaaaaacaattttttttgtttaacatattatattttatatttttgctcgatactcgaatcttagacccaaagccatatccaaacccgaatccggatgggttcatatcatggtatagtgttaagatattaatttttttagtaagaaaaaattttgaaaatagttttaaaaaatttgtacctaacaccattaaatttttaaaatgataaaaactattttctattctcacttttaaaacacaattttaaaaactgaaaactgaaaacgcaaccaaacagattctaattgtgtgttgtgaaaaacaagttcagctagcagaaagagaaggaaagaaaaaagagagtaaaagaagagaaagaaagctagaaagagaaagaggttttaccactttgcattgaagattaagtggttgattctcatatattttagctcaaattttgggtggtgaatccttacaaggtgctcttcaaattttccggtgccaaatttgatgatagtcctctctaaggtacttttctacaatatccacttggtgagacctaaatttttttctctatttgtgtatccatcttttgagatgctgatgatgattgtattggtggtccaagattatttaatcttgatgttgttgtgagcctctagttttactagagaagaactttgtaatcccattattaaactttggtgatagtagatgatttgagcggactactattccgtagtttttttcgcattgggtttccacgtaaaaatcttggtgtctcacttttatgcttgatttgtgtattttatattgcttgtcgtgctttgattgatatttgatattgcctattctaatatttaataagtatcccatttttgacatacaaagagggaaaatattatgattaattgcaataagtttttccaacaagtggtatcagagccaaagttaataggtattgaattcttatgtgttgaaaaatagatgagtcggatggaatgatgaaattgaacttatcaaactattttgcttggaagcaattgatggaagatttgctctattataaagatttgtacaaaccaattaaaggtagtgaggtaatgttagctgatggatggatataaatcttcatgaacatatctctaatgaaaccagaggtaatgttgtttgaaaaaaaactagaaaatctctttcccaaaagaatggttggtaataaaacttctctacttagaagacttataaatttgaagtacaaggatggtgntagtatggttgagcatacaagtcaattttagaatcttgcaaaccagttagttgccat

SEQ ID NO: 24153 - DNA, 1262 bp, Cannabis sativa
tatgattatatgatctatgaaaagacaaatttcagagtaaatgattacattaatctaacattaatcatatatatatgtaaaaaaaatgtttgtttattatttatttatttatatggtatgtaaagagcatctctaatggtagtatttttttgaagatgctctatatctctacatcatccaaaatttaatattttattatatttttcttctacattatttttggcacatttacttttaaaagcactctaatggtataataccttttaaaaatactataattatgataccacatattattaaatatatataagtttttttctttattaaactattatatatatatattgtacttttaattttttattgtataaaaaagacatagcatcaatgccattgtgtgacatcaatgcgaatttcaagaatagcattcttttatcttcaagggtatagcatctctatattttgccacataagctttccacctcatcaagcattcttcaaaatatttccattggagatgctctaaaaatacccacggaggagggaattgtgggagtgtttttctgttcctattattgttaaggattctaatcttatgtattttcacttattttttattggagacgggacggaaaatcccctaatgtaaaaataaaatttattttaaaaattcaaatgtacaaaattattatattacataaaaattaaaaatattatatattatttatagtctattcgtgatttttgtcctcaaattatgacctatacattattgtgtccctttaacttttcagtcccttaaaaatggtcattgaactactcacaatactattataaattggtcattttatcaagttttgtcacacgtgacaaataaaataatgacatgtctgcttacccaattaattatcatgtcagtgccatagtgccatgtcaacagcatatatgtaattaatttgaaaaagtaatttacttttttaaatttaattttacgtaattttttaatcattaaatgatttttttttaaaatgtctaattttatttttttaatgttaaattatacacgtaccgctaatgtagtaattgactaatctaaatatggaatccatgtcttgtttcttaattagacgaaaaatgcccaccctattaaggacagatattcacaaggtcaattctcataagaaaaatatgcatacctaatgtaaatgtgatttattgtagaacttatgtgtactttaagtaaaaatcaatcctaccatatt

SEQ ID NO: 24154 - DNA, 2363 bp, Cannabis sativa
atgttgaaaataatataatttgatgtgtcgcccaaagaaatgccatgttggaatggaatctcatccctattggttattattagtgtatcttatcttaatccatacccaataaataattaatatatacacaaataaatacatataaacataggcaacctatgaaagggcaagaggcaactgaccctcctaattttgtgtgtgtatgcatatttactatacatcatattttataatattctttaaattgatacaatttaaatattttaatttcaaatatttttcataatggggttcagtataaaataatgaacctcatgaacgtttttaaaaaattagaaatagtttataccaatttagattttaaaaattaacaacttcttttactagtgtaaaaaaaatgtgagtataataaattatttaaactttattttcaacattaaaagatatgaaaaaaaaaattaaaatatattaaaatttccttatatcttcatgaaaaacaaaattaaaactagggttaaccctctaagaaaaaaatgaaaaataatatatagatatattttaattagttacaatatatatttgtaataaaaataatatttatagaaataatcttatctttaatgtgatagttaagctaagttgcatatatattagaggttaaaggtttaaatcctaccaataattttttttttctaatttcattcttgtccatactgttaaaaaattacgcctcctcactttaaattttgagttcctattatatataaaaatttagttcaatggtaaacttgattatttttttttaagactgtcaagatttatttttaattttaacttaactaataaccgtacataccaaagtaataaaaatcgcccgcaaatattatttcataacaaataagcatttttaaattaaataaatttactaaaagcaattgtatattttttttgtttgtttgaagtaaatacaaatatttttttataattattaaataattaagttcccatagagcaaaattcttggacccgtcactaccataatttttttttttgggtgtacaacatataaatattataatttgaaaaggagtaggcattgactcatagaagcccaatttcaagttttgtagttaattataaattaaggagaagtgttgctttcactattatttggtataagtgttccatgaatcacaaatataataataattaattaaaagtctctaattttattgaacaagctaataatatagaaggacacatatataaaattcattgtcttaattaattagtgaaaggatgcacattttccctaaaataataatattaatgataataaaaaaaacttctattataaatattagaaaaaaaaaaacttttgaaattgtaaaggaggaagattatgtgagagcacaacatattccacattataaatttaaatgctaatattgaacaaatttttaaaatatgtctttatttaaaaacaatatataggaatatatgaatatatctttcattaaaaatcactttcaacatgcttagttttgtttgtttattaatttcattccttttttcaatcatggttttttatatatagatttaattatacaatcatatttatttaattactaaaattctactataaattaaaacttgtaagtataaatataatataaatctcacaaattactgatacaagaatataaaacaaaacacaatcatgatttttgatatgaaaataaactatgagatctacaatctagaaaacttagggggtgtggtgtttaatatttgtttctaattttaaaaattttattttttagacatgagaatagaattttttttgtaatttttaaaatttacgtatttgattaatgttttcttaaaattatttttaatttcctttttactgaaagaaattacttcaactccacacttcgacacaaattcgaacccatctcgacttgaacctagcctcggccctagaccccgaactaggtgttggccttggccctaaaactctgaactaagactcgaacctgaaccctatacctacactctatacttgaccccagaccctggacctaaccccataccccaaccctagacccgacctcagaccctggacccaaacccagccccaaacccagaccttagactaagacgtaaactctgaaatcgagtcccagacccctgacccgagcccaagcttgcaccccaaagtctagacccaaacccaaacttgcaccctaaacagtggcggacccaaaatttaaagtgaggggggcataaataaatttaaaaagaaaatataaagtgtagttagtgggatttgaacgtttaccctctaacctatttatgta

SEQ ID NO: 24155 - DNA, 3234 bp, Cannabis sativa
  modified_base (3026)..(3026): a, c, t, g, unknown or other
tgataaggacttgtagtacttgtcctattttaattggttgactaggaaaatagccaactgactcaaagttaaataattgctggttaattagcaatgaggaattatgaataaaataaatataaaaaatatttatagagattcagtcccttatatgtgagtaataatctattccccttttagttgtattacttatgagataataccgggcagatcacgaaggaagacaaagtaagttctagctacgactcccaaaatgtttatagagaatatctttcaacaaagtgctcttagatgtagagtacaaatttggctcttcttttaagttcttgcactcattagtgtcgtggtcaaaatctttatagaattggtagaacttggttggatccctcttgctgaagtctttcttcatcggaggggcttcttgcacagaacaaaggcctgtgtggccattaggatggcctcttgggtgttcttcaggatggagaagcatgtgaacttctcctccttttcccgagggtgctgctgtgcagggggattattgaatttcctcttcttgccattgccttggccaaaactattattattctatttcattccattattgttgttagtttggagctaggtgatattgttggccctagctgtggcaggtgtgttgctggtagcagctgttttttgcccgtcaacttgtacctgctggacagcttcttcaagttttataaaattgttagcttagtctaaacactttttcatattgttggctgaccttttccagatgtcctccaaaggtcacttagaggtaagatatttcctattatatttgtataccgcccttctttcatcaggcccttgaccttcgtggtttcgctcatgaacctttggatgcagactttcaaagactcttaaggcctttgttttatttcaagcaagtcttctagttgggatgttatttatttggagaacgaaaattgtgtgtagaactcaacaacgaatgcgtcttaagaatcgaaccttcctcggggtgtagcttgaagtaccattgctgtacagtttcagataacgttgctgaaaaaatcctacaatgggtattgtctatcacattttgcaaatcgtctagatttcaaaatatttgatatgggccagcggatctttttttcttgtgtacattttccaagctggcatcttggacttggttagcaggggaaatgtattaatacgtgtagagaaaggcgatcctcaagtcctgtcaagttccaagttcgacagctttgggtcagacatgccttgtatcatgttcttgagttgatccaactgtgattgcatagtagggtctactccatctaacctttgtctggccagcctttttggcaggttgacaggatgctggttactttggggtagattatttccgtcttgattttctctccttcgatttaagtcatttcaaaggtctccacccactctaggacccactttatcaaacactgaatccctgggcatggggtcagaacgggtttggaagttccggggaggaacttcgttgttgcacccagtataattaggagttttttaatttgtgcgctcacgactggggtgactagtggcgttgtcctcattgagattgagataaaactacccactatgaaacctacttcgaccttgtctcagtgggatatcttccttcctctcttcatctctggtcagagcttgaaattggtcagtccttccatatgccctttcgagcaagatttgatcatcattgggctgatggttagtcggcgttgtttgggatgcagttggccccactggccgtgaggtttgcccgcaatccctagggcgttgagtttcctcttggacataagggtcttttcctctatttcagaggtttagctccgcctgatgggcttgtaggatcgcagcctgtcgatccatctattcttggaattcgtgtctttactgggtgaaagcatcactcacaacagtgcgtgttttttcttgttcatgatgaatgatgtttgtgtgaccctaaacctgccctatgacttctctcagcctagccagttcagaatcatttgccaagtctacatggggttcgttgatgccaagttggtcaacccctggcctagtttctctagcatatacctagtgggtaagccttgtcatgggaacgcccgtagtactttgggcaagctgtccagcattgaccaatatttgtccgacacctgttggatcctgcccaacattgactggaccctcgggtcttgacactgcaggtggagctgcctgaggtggtcaggcagggttggccgggttgtcaccagttggtggaacctggacattaaggtccacaggcatcgaatcttgaggctctgtggtcttgctcctccttgttaagaccatgatgttccaggtgaaaagagattagacgatcttcctaagaaagttgaagatctcaatgaaagcactaaaatgtcaaccgggaaaatagccaactcactcgaagccaaataattgatggttaatcaccaatgaggagttaggattaatatgtaaataaaaagaacacacaaaatttatagaggtccagctcccttatatgtggataatgacttactcctcttttagttgtattacttatgagatataataccaggcagatcactaaggaagataaagtgagttctagctacgactctcaaagtgtttacagagaatatcttttagcaaagtactcttagatgtatgaatacgaattcaaccctgctttccccccttgtgaattcatttactatttataaggagaaagttgttacattttaggggtgttcataaaatatccgatccaatccaatccaatccgcacgatccaatctaatccaatctgcaaagtacggatatccgcactttgcggattggattggaaaatttaaaatccgcacttatgcagattggatgttaattgacatgtaaaagtaaccgatccaatccaatccatgcatatttataaaaaaaattatatatacaantaatattttaatgtaaagaaaatattaatttaaaagtctaatacatataatacaattaagcttaatagatcaaatatatatattctattctcatatataaatatttttctacatataattaaatatttatttatacatacaattttttttcttcttttgaattttttatttcctattttatttattttaatgtgttgttggagacata

SEQ ID NO: 24156 - DNA, 5720 bp, Cannabis sativa
ctttttttttttcttcttctcactcattaatttagatttaggacattttaaatggagacatatctctcactgatttgttgtaatagtttactttacttttgggcctttttttttttcatctttttctatggatagcttatagcatgatagtattaattttcagatttatatcttcattttggttctgaagcttcaaaactcagagttttatagcaaatcctaaagtgtaaatgggtaaattttcttgccttttagagaaatggatattaatacaaactattttgatctgctttttactttatgtaatgtaatgaattacgtatagaaacaaaatgaatcacttctattcttgaagatgggatatgcattttctatttatttgataattaacactattttaaaagttttgtggttttcttttaaaatttctgatatataattatttgggcatccagatattgctctacatattgagatgtttgtttttttatatataattttattattcctacactgtatgttattttatttaggaggtattatttataagatgggtgataaaataaaaaagagaagttggtatagcaacttaactgaagacaaaaaagaggaaattagaaaaagaaaaagggatgtctatgcattaaagaaacatcaaggcaaaaatccaacacaactacaacaccctaaggaagtgtgtgtttctcccaccaatcctaatgtcaaatgattaagagaaggagacataccaattacccaacaacttttgaagttggtgagaatagttttttgttatgttgattttctttaaccataaattaacttaattttgtaaaagttattaatatttaaactttttataggttcaacatcaacaaatacccattcatatgttttgaaaagaaaccatcatgtttctactttacaaaatattgttgataaacctgatatattgaaatctgaatctatttgtaaatattgttttgcaaagaaatttaattatgagccaaaaggtttttgttgtgcagatggaactatttctctattgtctaataatgtctgtgatgaattgtacaatcttcttactttagccactgatgaagcaaaagggtttcaaaaatatgcacgcacttacaataatacttttgcatttacatcatgtggtattaaatatgataaaaacctttgcaaaaataataaaggtgtttatacatttcgcgtacaaggacaaatttaccatttcataaatgagttattaccatttgaaaaacaaccttctcatcttcaactttttttttatgacactgaacaagagttagaatatcgattgcactcttcaaccaaatttaacttctctatcttaactaaacttgttcacatattgaaagttaatccttatactaaattctttagaagcttaagggattttcctaatttagagaattataagattagaataagattagatgttgatctagatcaaagagtgtacaataatctttcagtgtcacaagttgctgctgtatgggtgaatgatgagtcattaggagaacatagatggcgagatattactgttaccactgaggcaggattttcacataaggtagactattattatggctgctatgatccactacaatatcctttattgttcccatatggagaaagtggatggtgtcgaggaataaaaaagattaatcatagctcgaaatcccaacctcaaacaaagtatgatgaatcagttgctttatcggttatagggtcacccactgatttattacaaaaagaatttgttagaaagcaaaaaaaagatgaagtttgttgtagaaaatattattgttacaaattacaaattagagatggagaaaaaataatgatcttacgagcaggccgacttttgcaacaatatttattgttgatatgtatgttaagcttgaaacatttaggctagactattttcgtttaaagcaagatgatataagagctgacctatatcagggaatcattgatagcttagagatgggtgagaatcaaggatctaaagttagacatagaactgttttgccatcatcatttattggaggtcctagagacatgagaaaaagatatatggatgcaatggcattagtacaacgatttggaaaaccagatatatccttgactatgacatgcaatccgagctggttagaaataaaaaaagaattacaagaaaatgatgaagctcaaaatcgtccagatttggttgcaagaatatttagagcaaaattagaagaattaaaatcaaagttattgaaaaaacaaatatttggacctatagctgcttctgtgtatgtaatagagttttaaaaaataggactttcgcatgttcatttttttactaattttgaaacccagtgcaaaaatatatccacttgaaagttatgacaaaattgtttctgctgaaattccaaataagcttgaaaatcctcatttatatagaatggttctccaacatatgatacacggtccatgtggtcgtttaaatccaaaaaatatttgtatgactacgaaaggaaattgtagaaaccattatcccaaatcgttctactcaatgattagccttggccaaaactcttatgctaattataaacgtcgtgataatggagatacaattagtataagaaaagttattttagataatcgatgggttgttccatataattcttatttgcttgcgaaatttgattgtcatttaaatgtcaaaatatgctcaactataaaagcaatcaaatatttgtacaaatatatttacaagggccatgatcgtgttgcttttaatgtaactttacaagatgacacaagtacaattaatgaaattgataatttccaatgtgcaagatgggtttctcctcctaaagcagcttggagaatttatcgattttatttaaatgaaatgcatcctgttgtttattcgctacaattttatcttgagaataaacaattagttagtttcaaaaactttgataaactctctaacatagcaaaatatgatttatattctaaatctatgttagcagaatattttagaatgaataaaactaatgaaattgctcgtacattgctttataaagattttccacaattttttgtttggatccaacaatataggttatgggtaactaggaaaaaaggaaatgtcattggtaaagttatatctgcttatccaactgaaggtgaaaggtattatctaagattattgttgaaccatattaaaggcccaacttcatttcttgatcttaaaactgtgcatggtgttgtgtggtgacaacttatagggagtctgcttttttgcatgggttattgcaatctgacagcacactacaagaatgtttagaagaagctagcatgtatcaaatgccttatatttttcgtcgactatttgctactattttgatattttgtaaaccatctaatcctaggttgttgtttcagaagtttgaaaatgttacgtcagaagattacacaaataaaaaactttttgtcgctgatgttagagtaaaagtattaaaacatatacgattagttctagaatcgatgggtagtgatattaacgaataccaattagtcgatcatcaaattgttgttaatgaaaatgaaagcattatgaaagaaattaatgattaattgcatatagtagtttcagatgcagacttgttgtctatatcattacttaccttagaacaaaagcatgcatatgatataatcatcaataaaatttatgctaaagaagcaggaatattttttgtagatggacctggaggaataggaaaaacacatttatataaatgtattctagctactgttaggtcaaaaggtttgatagggctggcaacagcatcatctggtgtagctgcatctgtattaaccggtgggcggacaacacattcaaggtttaaaattcctcttaatatagataaagatgtcacatgcaatgttagtaaacaatcaagcttaggaaagttgcttcaacatacgaatttgataatttcggatgaagcacctatgtctcatcgacgagcaattgaagctttagatcgaatgttacaagatataaatgagaaaaaagaaccatttggaggaatagttgtagttttgggaggagattttagacaagtcttaccagttattcaaaggggagaaaaagaggaaattatagatgcaagtcatgctatgtcttatctatagccctcatttcataagattatattaactaacaatataagagctaaatttgatccagagttttgtaaatttttgatacacattggagaaggattagaaccaactgataagaatgataaaatacaaatttcatcttctatgattattccatatgaagaagacaaggcattagagaacttgatagatattgtgtttccaagcttatcccaatattatcaaaatattagtgaaatgattggtcgtgtcatattaatacctaaaaatgattatgttgatgaaataaataatatgcttataaataaattccatggtgatgttgctacatattatagttttgatgaaaaagttgatataaatgatcatgtatttgaagaagatttctataatagcttagtactaagtggatttcttccacaccaattggtattaaagattaattgtcctattatacttcttcgtaacattaatctatctgaaggtctatgtaatggtacacgattaatttgttgtaggtttactccaaacttaattgatgctgaaattattagtggaagcaacaaagggaagagtgtgtttttgcccagaatcccgtttactcctatcgaaggtgaatgcaatggatttccattcaaaagaactcaatttccaattcgtttatgttttccaataacaattgataaatctcaaggagaaacattagattttgtcgaaatatatttgcccgagcctatcttttctcatggtcaactttatgttgctttatcaagaactacatcagctaagtttgtaaaaattcttgtaagacctgattttaatgacaattctgactatgaacacactaaaaatattgtttatcgcgatttattaagcttaaccaagtagcaacaaaatgaataggaaaaaatagatgttcttcttcaggtaagctttttatagaatgctatgatttttttattcatcaaatgctaaaataaggtagaacattttataaaccactattcttactgcatgtcataccccaatattattattaaatattattaataggctgtgtcataaatttattggaaaatgcagaatgaattggaaatggtgtataccttgtctcaccattcaacatcaattctcaatgacattatcaggcatgcttaagtcctcaatttgcaggtattttctattagagactgaagtattttataaacaaaattttccagttgtatacataatcataaccaaaataagaaaatttgtggttgctttaacttttttttgtacaatttcaattcaaacatggtatcattaaggcctcgtgggattgaaaggctaatatattttttgattgacaactaaattatttctatttagttttcaccatgttcatctctatccctcctttttttttttttgattttagaatcatttatgcaattattattgttgcaacttagtttaactttattagctaaagcacaaatcattttatgctttaaagctgaatt

SEQ ID NO: 24157 - DNA, 1930 bp, Cannabis sativa
ggcataaaacccaacacaaagtcctccaccccagcacacaggttttgctccactacctcttgggctctgacttccgtaacttcccggttgagcctttcttgttcgtatagagcatagtcagacaaacaatctttcctacgagagcccaaccgcatccatgggccgtacatcggaaccgtgttattaaaatcatcagtgatcatccgtctttggcgccggcaaaaggactcatcatgacccacaattccacatttatagcagacataagggagatgctcatatttgaaataacaccagagactaaccccttcttccattggaagaaataacccaacaaggagaggttttaaaagagaaatactaacccttagtcgaatgtattcgtttgtagggaatccatttcgccacatacgatcaatggagataaccgaaccaatcttgttagctatagccgtcgcattcttctgagtctagaaacgaggaggaatttcataaacccttatccatattggagaggagtccatatccaccgcactccatcttccatcttcaggcattggtttgaccaccaagaaaccgtcacacaccgcccaggggccattctttactatgagttcagcctccgctttttttgttaaacggataataaacgttttgttcccaacatcctgaagcttccatccaggggacaacttccattttttacccagcaccgatcagagcaggccattgaaaatagggcgcttcgaaatgatttttgccaccaccgatttccatgccgcctcacttcccaaatcaagattagcttccaacgagatcgagagctcctccaccccactcaccgttgtgttctcggtgttcttttccccatcagtagaaaacgtcactagttcttccatcttacagcactcacaaacaggaactcagaaaaaactgagaaaaccaggcaagactccaaccagaaaatctcacaaggaattttacagaaagctacgtaacgaagatacagaaagaagggataaaccctaggcccaaaggaaaaggcagagacccactacaggggctgaacgtacggatcagtacggaccaaaagtagtacggagagcatttttttaccgtttgcatatatgatagagatgaaattacaatattgtttattaaaaacgtaaatagcaagagcaataatatctcgactatagcgaaacacctcattgttttataatcaacaagaaagaagctcttgttcaaaaaaatattatataatgaaaataagataaaggattaattttttttttcacccaacaaatttataaagatactctaatagtatgatttttattttatataaaatatatatctatcatttataatagtgttttttttcttttttttcatattattttaaaataatatacatattatataaaaataaattatattttaaatattataaaaaattatattttaaatattataaaaaattaatgttattagaaaaaaaaatacatgatgttaggaaaaaaaaattatgaatataaaattaaaataagtattgaaattaatacaaaataataattttaagagtgattttttaaaattaatttttttatatatatatatatggctgcacttaaaatttaatacttataatttaataggatgtaaataaaacttcccaagtacacattaataattaataggttaccattattaaatttcataaaactaataataatatatatgcagaaatattccaaagattactagtaccactagtaccaagaaaatctgtgagaagacaaccaagtaccaactacgcataggcggctcttatggggtgcaagatgtgctattgcacagggtcccaaaaaataaagggcccaaaaaataaagggcttaatatatattttttttaatgcccttcaatttt

SEQ ID NO: 24158 - DNA, 2378 bp, Cannabis sativa
agagagagagagagagagtaaatttaatgtttgaatgtgaaaatagaataaacaatgaatatatacttgaattttagaattaatagggttggttaaatagtatggtcaaaagggtagctataggaaaggtactagtttcatcatattcatcacatgcatattcaacattatggtaagcaaaaaaatgaaaaccctagcctagctacctcttcatggtttttcaatagctaattaaacattagcattttatgtgagcaaaaatgtagttattacaagctatagctacaccaagaacttaaagcatttggtgtgatagtacaagttataatttgatgctatatatataagctaacaatagtttaatatagtcataagagaattaaagctacctaagtgcatagtatagctaccctaattataacctagcctatcatgatgagaaatatacgaggagtggtaattacgatttcttatttaatttctacactcgaaattatattttcagaatatttttttttaatttttttcatagcgcgatattcgttatagatatatatatcatttttgtaaaattttcaaaaatttcaaatagtttatagatatgaaaatagagttcatgatattttagtttgtcacgagtgttcaaaaaatttcaaacatattttcaacaccgtaaattatttgtatttttcaaaaatttatagaaatgttttaactataataaacaactattgcatgaaaaaaatttgaaaaaatatctgatatgtattttctaacctaaaaattaattaaaaaattataataaataattgacgacatcattcctttaaatatatatgagtttcttaattcctttaaatatatatgagtttcttaattcctaggctcatataattgttatatatacttatatattcttaaataatatatcaagaaatatcacttttaccagcacatttcgcaaactgtgctgacaaaaaggttaaaattttaccagcgtatatttacagtggttaaaatttaacttttaccaatgcatttacgtgttgggaaaagtcatttttgtactaacttttaccaacacaaaaatgtgctgacaaaagtgatatttattgtatacattgatatgtatcatatgtgttgcggctcaatgattataccaaatctgcatctcacatataaccatgtcctcatgggctacatatataatcaatattctttgtgtaaaaagtatgcatgtgcatgataataataataatatattttaaacattgaatttagactgcaaaatatcaaactagctttggtataacttagaaaagaatgaaaaatataagaccatatactaaattaaatatgggtgcttgcatcccctaaaacacgtatactgatgtatttattatttgtttcgatatttaggaaaaaaaaattagtttaaattttttcataattgtgtacgttatagttatttaaaatattttgtaaaattttgaaaaatttaaataatttacaatataaaaagcagtattcaaacaatctatttcacacgcgtataaaataaaaaaaattacacgtgcaacagtctgtttgaactctatttttagcgcgttaaattttttaaattttttaaaattttataagatgttttaaataattaaactaataataattcttgagaatgctaacataaataagaatatacacccgttttagggagtggattgtaaaattttccgataagtatttagttaattggtttacttttgtacatatataattcataattttttgatattaattatcattgatcaagttaaagcaaactggtttctttgttcagttatttttcattttacagttaactggtttcatttacatgctttttcctttttgtgttatgtttgtgcctttgtttatttatggttttttttttctttttttcttttaaaaaaaaaaaggatctaagttgaatgatataggttttcataactagttatcccagtcacttgataggtaggatacctttcacgttttcaaatctgatttttttactaagttgaatgagttataatgatgagtaatttgttaccaggaaccaattatcctaggtagggtaaccaaattccaaaagaggtaacctgttacctatattactagaaatataagtaattagttatcatgtaatgagaaattcattaaaaaaaaaatgacaactgatattgtgggaccactatcaactttttgagtaactagaaattataacatccatttcaaaataaaaaaaggcacaaaaagggagagaagttggcatagtcttgcaaagtattgaaaaaaaaaatctaaacaagtaatcatgcaaaatagatagctaaatgata

SEQ ID NO: 24159 - DNA, 4478 bp, Cannabis sativa
ttgctccagacatctccaggtaagttttttcttttttggttaccaaaaatcctggtcttctatgtgttatggtaattcttttttcaatacttccttactgaagatacagagagagagagagaggagaagatatatataactatatgactataaaatcttagatacaagcactgtactctataaatcagaggtttactgttacactcagtgttgtgataatctacagaaaggttagaagcttgttcagaaaatgtcacgtctttgttttattacacatatttgcagtattaaagaaggcttggatcttgtaaaggaggctatcaacagaacagggtataatgagaaaataaagatagcaattgatgttgctgctactgatttttgcataggtgaagtattcttcactgaaattattttactcagtcatgaattggtatacaaactgttgttcaataggttgtctttccatgcattaaagtccttttttcttgtttcctaaatgctaaagttttgtttcatatttccttatataggaacaaaatatgacctggacttcaaatctccaaataagtcgggacaaaattttaagtcgggggaacatatgattgacatgtacaaagaactctgtattggtacatgatttatttcttaatttcattgttttctcttttaccaagacatctttctagcttaattccttctttgggatcttattagagtacccaattgtctcaattgaggatccgtttgacaaggaggattgggaaaacatcaagcaattttcaagccttcaactttgtcaggtatctttggtttccttgctggtgaatatcacatatgtggtctttgtttacagtctcttttcacatcaacttgtaatgcgtagcatggtttagactataatacaaaatgtgatacagaaatttgcaacacaattgaattttttaaaaaaaaaagaattgtttcatgcatgtgtgattgtatcacttattggtgcttatgtggagcataacatttaacatttcctttggatactttgttgtggctaagcaattaaaagaggtctgtcagtacaactttatgtgttggcatgttgaaatacttgatgtgtttttggttctaacccaatacggagctcgatttcattgagggtgtgatggttttgcaggttgtaggggatgacttgttgatgtcaaattcaaaacgtattgagcgggcagtaaatgaatccacttgcaacgctcttcttctcaaggtatctaatctagctattatggaagtgtgagaaaagtgtactttttcttctcaaggtatctaatctagctaattatggaagtgtgagaaaagtgtacttttactactttttttttctttttcttttttcactgaatcagtgtacttttactactaattctgatattatgccgcttacctctttgcatagttctatgaaattacttgtacaagtgaaaacattttatacagacccaaacatgatttgaattacaaccttatctatctaatgtcagtagtgaaccttgttctgttggatagttcttttacatctaagttttatagttggtataaacgtgtattatttttaattctgagaatcttttgttcaatcagataaatcagattgggactgttacagaaactattgaagtggtaaagctcgcaaaggatgcccaatggggagttgttacgtctcatagatgtggtgaaactgaagactctttcattgctgatttatctgtcggccttgccactggtcagatcaaatcaggtgctccttgcagaggagagcagctagcaaagtacaatcaggtcctcatccatcttcattcatcatgttatctagccttctgtattaattttcagcaactctatctttcactttataaaggaaaaacaattattttcatccactaccaacttttatgctttacattttggtctcaacattgaaaaaatggttttgtcaaaaaaaaaaaaaacaatgaaaaaatttcagctacgtatgcaattttaaaacatgataagttggtttgtcaccatactttctatgacaacagttacttgtttacatttattatgctcgtgcattactcaaaaaatcatttagcagtctctttttgcaaacagaataatgtgtccgttgaatctcttttggttttgaaacaatgtttgctagtttccttaatagttgtggctgtttttgagttctattttgtatacaccaatttagaggttttctgtttatggacttctagctctcctttagccaagttactacttgattgttcatttgttctgttgattctattaatagcaaactaactatatttcgtaggcagctagtttgagaaaccatgtacttgtttatctatccatagtcatgtgtctgtcattagccttgagaaaccatggatccgcttgtatattaaacaaaatgattgaccaagccaaaacttcttgcagttgcttcgtattgaagaagagcttggagatcatgcaatttatgctggtgaagattggaggcaatgatcccaattggtatcatcaggttccatcgccacaagtctttagaagtacatgatattgacaaaatcataaatcttcacagttttgcatttctgctgctgggtgttttcattttggttgattaaagcatttgcggagagtaatcaatattggaatttgtaaaacgtgttctttaaaatatgaaataatattgaactttttgttctaatagttccagactaatttgtcttaaagacattgaaaaggtgtttttgtttcattattacatgtaattataatgcaatgaaatctccaaaccaagccaggacgcacgcttattatcatacctttgagcctaaaaagcttgtaacaagagaacattagctcaatatatatatatatatataatgcgaaattaggttgctttttttagcatctctacgtatcttactctttagagtttgtgaaatccgctttataaattgtaaagcaaatatgatacatctatcgtttaaaagttaaaaaacatttcctgttttccggaggcccgattgtgtttgagactaaattttcctacaagcgaaaatatgcacgcctaggcccaacaaggtttgttggttttaaatcctttttagtcatcagggtgtcaatttatagaggcacataaacaaacaacaaacattaaagtaacattgtttgcttaacacaacaaaagaaaaaaccgatatatttgagaaatcatctaaactacatatttagctagttaaaaaagcaataaccaccctggacgaattgtgcaagaaaaacttctaattaactttaaacagtgcaaccagggttaatatagcaaaacttgccctaaactcaaggattcgtctcttcttcgtcctcttctatcttaggagccaagtagaacctaacataacccatctctgcgatcttgtactcaaccacaacaggcaattcagaggacaagctgattgttaccgtgttagacaatggagttgccttagtaaaggaattcatatacctcagagcaaacgttaaagaaactggttcattcatctctataactgttgcttcctctggctgcaatttcatcaaatcacataaattaacatgagttgctggaagcataatttaagaccatcatattaaaaataaaatgccacaaaaccattcaactgcatcatctataccttatcaactgttgaattttgcctgcaaactatgttagcagtcccaatatctcctcttgttgagaacttgacaccctccttggtcacagagataacaactgtgagggcaaaaaaaaaacaatgaagtttaagaaaaacccacaaatgaaatatccagcaaaacaaaacccagaaatgaaataaccagaaaaacttgggtaaagaatgcattttattgtttcaaaaaaatttagaccataccagtatcaccaatgctgctgagatctttacaaattctagcaaactcagatgaaggcatcctaacaatagcatggtattcagcttctggaattccaagatgttcactatcaatgtccattaacttcatctcaaagtccgcaattttgtcttgagctgcaatccagtatccacacaataagaaacacgacaataaacaaataagcaaaataaaagcaacatgcataactctgcggcaatttcctctacagcagattaactatcaaaaattataaaattgaaaaacattttcttcaaccaaaaagctaaatacaataaagtaaatgaacataatccttgtgttttcagtagaacagaatacatatttctccaataacaagtgttttcagtgatttaatgttttaattacaataaagaatcttaaactaacgaaatcaaaaactgtaagccgaccaaaaaaacatcatcaagaactaaacaagatgtagaattagtggaagagttaacatactgggactt

SEQ ID NO: 24160 - DNA, 2463 bp, Cannabis sativa
atttaattatttaaacattataaatactaattataaattatttataaataaaataacaaaataacttattttttttttttataatttaacaatttttttgtaaatattttcttgtctcttattattattattattattattattattattatcttatgtatgaagatctcaatgacgttccaatcatcatcaagactgaagactagctaataggacataaaataaacgaaaaagaaaactaatcctgataattaattgtgtatatataggcgaaaataagataatattaatgtagaattagacaattctactttaaaaaatgattcattagtcaatttcaatttggcacccaaatatgttagaaaattatatagtttataaatatattcttatcaaaagaaaatgttttttaattatgtaattatttaagatatactgctaaattttaaatttttttaaaaaatttaacataaaaaattctttttgaatgcgttgtagaagcttattcctatactatttttcgataacaattataatttctacacaaaaataatttatacggtaatttttctttcaatatatatatcttaatctaattagtgttaatttgggttaaattatcattcaataacaattataaatttgaatagtatagtatagctaaaacaccatcaaatgagtcttatatatatatcaagattaggttagtttgtaattaagtatacataattacttaccgtaaaccatacaagggcaccattattacgatcaagagcccaagcaaatccacttttttgaacagcaacaacaacatctcgcttggtttgattaacatcattaatagtcaacatcattggggcctcagaaaagtcagcgtctggattaggcccaggtggacaattgggtgtggagaggttattacaagcaaagaaccaaacgtcataccccccaagctggcggtaccatttgatctttccagaatccaaatcaagggccatgattgagttagagtggttctcaggctcaatacacttgtcaataatactactactattattacccaatgtttcattgttttgttgctcttggcattgttgtattcttaagggagctgagtataaatttcctgtggctatgtaaacatggcttctgattttgtcaatacaaggactgcttccccatatggctgccccggcgtatccacccgtcttcccaccgttttcgggtagcatgaaggtctcccataaaacggcaccgtttgtcgcgtttagcttgaagaaactgccccggaatgtgcaacactgttggacactgaggccttcttctagggatgatgtccctacgtagaataggctctgtatttatatacaaataaacacattaagctcatttaagaaaattaattctctattcctttacatcatctaatattatatatatctttaatatttttattattaattaaagtataagaaaaatagaaaaaaaaaactaatgaaacagtaattgataggagataaatagaggaaaggacaaaaactatattattaagaaaatatttaaagaagctttaaaggattttgatggtgataataggttgtaaatgggatatttttggtgcaatattaagttcattaattataaagcactaataaaacaaaaattttataaaaaatgtatgttcaaaataaaactttttcatttcaaaatgtaaagagcgatgaatatatcaagttttttgtttttattatgaaacttttaaaagcttattctcataggctagccttcaaaactataagttaattattgaaaaaaaaactatatgttagtctatgagtcacccttttgacaatatattaatatctctaattcgatcaatttctacactcttcatctaagtcaacatatacatttttttaaaaggatacataaatacttttttattaagtgaatatatctttaagttgtttacattatcattgatttaaatttaataaatatcccttgtttttcgaaaaaacatgacgtaattagattggcaaacacaagtaattacgttgacaaagaatatattttagttatatatacactcttcaataatgcattatataaccttatgtcaagtctacgtacctagatagattaatcaatatagaaaattatctttaattagtctaacacgacgtacaaacttaattttcagctggtttaactaactgatctatgtccatcacaaataaatctagagacatttgctatatttcaatttccatcatatatatgattataaagaaggacataattaatttgattaatataattattattaccactactaaaaggccaatgtatagagacatgagtgattattagttaaaagggttatttggggtaaaacccttttattttttaattttttacacttactttttttttttcttttgcaaaactctcttatattta

SEQ ID NO: 24161 - DNA, 1372 bp, Cannabis sativa
gagagagagagagagaaatagatacttctttgatatgtgtgctttgcacagggatagggtcagggttagggccagttttgggacagggagcataagaaaatcttattgaagtaacgtagctacctcttgtcagtgttttattcatatcattgttactattcacaaaccaaaccacttaccatgcatgcaacaacatggtgaaaagttcaattcaattataaaaatgaaaaagaaaccaaagtaaatccaaaatactacttattaattaaatgaacaaacatatatgaggaaaagaaaagggttccaccaaaccacgaggaatggggacacctattactctgaagacactgaaacactgcagtccataatggaaccaaaagaaagagagagaaagaaagaaagaaagaaagcaaggaataaagggaagagccaagaaaagatgggaagtaaaggatactgaagtatgagtttgtgacttccccttttgtctcttcattttatgaataatttcatttgcttttttctcttttgtatatattattgtatttgttttttttttattattttaccagcacagcagtgttgaattattgtttagtattagctcactcgccatagccttctactctatgtgtcagagacgcctttgagtactgcacggccaccatgactcgacagaaagactggaaaccaaacgtgcgttttggcagaagggtagtggaggctaactagtgtttagtaggactaccagtaccactttgctaacctctcttcctcatccaacctaactatactgtttcatcatttttacttcctataacagtagtgtttacttatgcagaagattaattaagtcattttctaaaccacactcacactactatatgaacggggtggtgtgcatggtttacatatatcatcgtataatttaataattataaattaaacatcactataattttttttcttaaaataaattcttccttactaatattaatcaaacatctcaataacttaatgttcataaccaaagtttcaacaaaataacaataaactattaaatttttaacaaactttaaaaatttgtagtacatccactaaaagggtgtttatgtagatttcattatctgttttgatgttataagagttttgatattttttttaatttttttaataatggtatatgttgtagttatttaagattttatttttttcaaaaaaaaaattagataatttacaatctatatctaaatataaaggaatgcacaaagcattctaggtggcatcttatatgaagtttctttctaattctttgctatctccatttatcacttttatttagtttttcaattactttttcattcaattacat

SEQ ID NO: 24162 - DNA, 2988 bp, Cannabis sativa
  modified_base (93)..(96): a, c, t, g, unknown or other
atctaagagtatatactcagagatatcattgtaagagctctaagaggggaatcacagcattctttgttcttaagtcaatacaaatcaaggggnnnnggctattaccgaactgctcgggacaaaacctctataaaaactctgtgtctttattcattttattatattacatctatattatatcacttgtcgcttacaattaagactcattgtcgttggccaaaagcgaggtcaacaattactttttttgtttgttaaaactgaaaaaaaagtctttacatttatagaatactattcattgttctaaacatattttgttaattgttagcatttcaattttattttttatatgaagatatgtgtaaatattaatagtataggtttgaaatcaataaattatattaattttgtttttaaaaaaattgtgatatattttaaagaaattaatgtatgatatattttaaaggatagagtagagaactatacctgtagttgccaaaatgcacagatagtcttaaaaatattatttctatattttctctcttattcacataatttttgtcatcttcttttaaaaaaaaatatgacaacagttaacaactctaaaaggtgtttactatgatcctacatcatatatgaattaatgattttttaggtaaaaactaattttttctaataaaataattaaaaaaagaaaaacaaatttatgactattatctatatttttttttgaaacaaagattgtaattttattaatgcaaatcagctattaaaatagcttcgaaaccaatagggacaaactccctactgggaagacggtcaggacatgaaccagaagaacgagctaatcaattagccacttggttcccagaccgtttaacaaactgaactaaaatatgaaacatcgaaagaaatcgtataagactaatacaatatgaaataattaaaccaagaggagaaagaattcgcctactattattaatggcgttcaccaacactagacagttagtctccatacacaccacaacagggacctagccttcaaccgaaccaccatcaccccaagttcgtttgatctaacttaatgcttccttcattgacattgcttcaaccaccacagggtcgacatcaccatttattttcacggcagcagcagtaagaagtacaccagcagagtctcgagcaatccaccccaggccgtggctcttttccctagaaaaaatggctgcatcgcaattaacctttaactcacccaaagacagtttactccataactcagatttagccgagacttggctaggagatgccgagacacctccatttttcaactgagcaactttccatagttcaaggtatgtaattgcagcagagacaactctttcaacagaagcaatcttcttattccaaagcaagtcatttctagctccccaaacaccccataaaatcatagccaatttatcaatatcatctcctgggtgagtattgcaaaagctctcgaaccaggatccaaattcagtatctccaatcctgaaagaaaaacccaaaccccgatccaaacatgccgtagtgaaaggacaagcaaccataatgtgaaagatagtctcaccttctccattacaaagaggacaattactactcacattaacacgtttggtttgaagcgaaactagagtgggaaggcaattagagagagccctccaaagaaaattcttaacttttgggggaagttttaagtaccaaaacttctttcaaaagccagagttatcttgtgaattccatctcccatgaagcacttgcaacgcacgataggcactcttaacataataacttccatacgctttaaacacccaataccatgtgtccatattcggagttaaaggcaaaggtattttacgaatgagatccacatctctcggctcaaacaaatcctccaataactgttcatcccaactcaagttaccaacttgtaaaagattaaaaacagtacaatgatgaagagcgtcatgagaagaagatacatacggattatcctttgatggaagccacgactaattaaaaactggaatagaaatgcccgaccctatcctccatctagctcccattttaacaacttcttgagcttcaaaaacacttctccaagcatagctcgaatttgaacccaactcggcatcaaaaaacgtcccttgaggataatatctagcttgaaaaacacgagcgacaagagacgttggattagttagcaaacgccaaccttgtttgccaagcatagccaaattgaaatcccgcaagtttcgaaaacccaagccacctttatgactattatctatattgagtaacactttacataaaattttgagtaaatactatttttaactttctattttgtaaaaattactaattaaactttttcatttgttaaataactaaataaaaattaaaatataaaatctattttaccacaacacatgtggcaagaccatggacaagctcttaatatatatatgccctaataaaatcgtatggtactggtacatgtttctttagaagcaagaatgtcagttgtaggcttatttcagtgtaagtattaggctgcaaaaggtttgattgatgagacggttgctgatatagattttaaacttacatactttttataagcatataattctaaagtaaatatgatctttttttttcaatatttgaaagaaataaagaaaaaatgtttactttattatgtttgattttgtcttttaattttgtaatccattacgatataatagttaataaatgagtattgtaatgataattacatattaaaacttgtaatttccattataaaagaaaaataatattttaacaaaaatataataaaaaaatcaaaggtctatattattttgctttttaaaatattttataattatagaacaagaataataggattattttggttaatacaaattttattctattgtattctcaaaccacccaactaaa

SEQ ID NO: 24163 - DNA, 1219 bp, Cannabis sativa
aaataaaaagtgactcgtgaatttctcctaaattattttatttttaataataaactattttatttttaatataaataaaaagttaccattaattttttataattctgttatatagacacactttatatagaatagatattattatattaacaaattttatatattttactttaagaaataataatataaaaaataagacttaaattatttacacatgtgtcctataagaatatgtagtttaacaaacacccaccatatatgatctcttaacaattaagtttaatgaaataataattattttaaaacttggaggatatgatattgtttaactgggcaccaataacagttaatttagcatttctttttcatttacaatttgattctatatatattatgtgtacatacaggggcaaatgctactaccatcaccattaaaaacaactgccaaagaaccatctggccagcaaccttaggcggctcatctcaactatcaatcaccggttttgagttagcaccccaaggaaacaagtcggtggacatccccgacggcacttggatcggccgcttctgggccagagacatatgctccaccgacgcatccggcagcttcacctgcgccgctggcaactgtggctccggtaagatcgaatgcaacggtttaagtggagccacaccggcaactctggtagaatttaccatcagaggagacggcgggaaagatttctacgacgtgagcaacgtggacgggttcaacattccagtttcggttgtgccacagggtggtagcggcgattgccaggagtcaatatgcggtgtgaacatcaatggagattgcctaccggaactccagtttaaatccggaaacgacgtcgttggatgcctgagtggttgtgccaagtttaatgaggataggttttgctgtacaggagcttttgataaaccagattgtcctcccactgactattctagattctttgaggagaaatgccctaaggcttacagctacgctaaagatgataaggacagtacttttacttgcaccaatcctaactatctcatcactttctgcccatgatcatcatcacagattatatctataagaaacagtactattttttataaatatatatgtacgtattattacagaaatgttacgcagaaaaataaataacaatgatgctgattatgctagttaattggtatgtaatatcgacacaca

SEQ ID NO: 24164 - DNA, 1902 bp, Cannabis sativa
tgaatgggagtagaagtaaacttcatgtgacttgttgggaaaaagtgtgccttaaatggaattaaatagaaacaagccattctttgctaaatatatttgggttatttcatctaaaagagatattctttaagtgaaatgggtcaataatatttatctcaagaacaagtctttttagaattatgatcttaataataatactatagttggtattggaggaaactttgtcatctaagggacaagttcactcgggcagacattgtgaaggcaggggctggtgtgaatcggtttaaaataaatctgttatacaacagctgcattccccaaactcagttcgattttagcaagtatgtatggagctccataaacatgccgaagcatagattcattttcaggcaattaagcaatcaattctcagcttttaacttgagataagtttgctcaatttcaaattacccttgacatcatcaactgtccggtgtgtgatgcagcagttgagagtaactctcatatttttttcgactgctatctctcgcaacaggttatggatcaagttagtaattggttgggaattaagagatggtaaactagttttcatagctggcagagtggtagctacataatagcaaggataagaagcaccagattcatgtttcgattctggtagccatgatttacagctagccttatttggagcaataagaacaattgcatcttcagtaattactcgagtacagcaacaaagattacacaagaaattaaaaatatagtgtattacagattacaaatagttaaaaaaagaaacttaaaagctcatgagaagagatacatagagagataatttttatgtaatagctggtttatagccgagctatttgttgtagttgttgtgtaatagtttgtgattaacgaagtttgttttggtgttcaaatttaataatcatttgttgttagtatcttttttaggatttgttttgaaggattttattttgtctttaaataattttagtgtggctatatataatcactcgtactttggttaagtatactttatttggtactgttagtaaaatattagtaaaatattagtaaaatatatattacacgaagcaagtagtataaattttgtgtgttcttcttgctcatagagattttctctttgatggtgggctgggaccgtttttttttaaaaaaaaaaaagtaaaaaagtagtatatatatatatattttaataaaataaaaataaataaaaaataaacttgtcgtggactatatataaagttgtcaataattaattaaattaaaagagtgtggttatatatatatgtgacgtaaaaatgctgagcatatatatcatgatgcaattaatttatatataatgattgacttaatttaaaattaaagtccctatattaattatatattgtaaaaatttataaattgtcatattcaaattaattgtatcaacaccatatgtaaaattattattatgttatttcttttcgtgagattttcaatacatgtgttgttaaaaatatatctataattattacatatttttgttttaatcttgattttagaagggaattaattataattaataaatcgggtctttgtataataaaacttataattataacgttacgttagtagttagcagtacaacatcattaatatttttcatgttacaatatatattattgcatggctttttggtattgttatatattatgatttttttggtaaacatatataattatacactatgacttatatatatatatatacaaatacttatcttgttatataactttgacttcatgactcgatctaatctatagttggtaggtgattaattactaatgaatcttataaataaaaaaaatgagtactcttttgacaaga

SEQ ID NO: 24165 - DNA, 7593 bp, Cannabis sativa
tctctctctctctctctctaagtactttgacttggtcttcttttgttttgttaggtataaaaaagtacagtacaattatgtttattcttcttattctttatctggagtttttttttttttggcatatgtaatatataaatacatcatcatattcgtacggctgcttatttcattttcagttgagttttcagaataccctttcttcttttttctccttagcctaaacaaattcactttaactagctaacattttaactgataagagatgtttttcttcttcatgtttttttacaaacacaaatatatagccttattggattaacaaaagttacaagaagatctgaattgaaaagaaaagcaaaataatgcattacttcaagtataatttaaatctgataaatggtgttgatttacatgtttttgggaaaatctatattaggtagactctttgtcattcagaagagtttggaagtttaatattttgttggcctgtgactgtttttcttatacgcatgatgaacaattgtttagattttattttcagtattggattcaaaatttttaaaaaaattacatgtgtttttaaatgattataatgtacataattataaaaataaaattgaactaaaaaactctctaaatgccgaaaaagattgggtgtctaccaagagggattgtattgcaaatttttcttatattagagggattgtattgcaaatttttcttatatttttgcataaaacagaagttacattttgtactttctcaagctagtattgcgtctttttggcttgtcatgtgcctttctaggctagtcttatgctttcttggctttgtttggtaggagagatggagatagcataattactctcctttgtgatgcttagtgttaggggtaaagttgaaataatagagaataaaataaattataaaattactattttattattttgaatataattattatatattattttttaaagggcagaaaaaaatattttatgtaatttttttgtctttttcatggaatcctacatttttattgggattgaaatttgtgtttggagggaattcatcactacttttgtccctcttcctccatccaaacctagtgttaggccagttgctgcttatgaaaataaaggttgtgtataaaaagagagctttcagaccttcaatttcagaaaagtatagataagttcttttattttataattttaagttcttttgtgtagattttcatttccatctccaatatactcgacaaatgaaatgactctatttttcaattattctactacattattaatacaagttaccttaaaaatgttcttttaattatgagtaatttacaacatacttaaatttacggtaataatacataaattatattttttaaactttcatagttatctgatcgttaaatcaatggccacatgacatctcctaattgatcctaatcattaaatttttatttttttaaaaaataaataatttaaatataccaataagaaattatcacatagtgacttgactttttaaataactacaaaaattttgaaaatataacttaatattattatagtaaaaaattaaactaaaatatttatttataatcaaaaattaaatttatttacgctacaaattactctttaatcatttcataacatgtaaacaacaaaccctaatatgggtaaaataaatagataaattttcagatgaactatgattccttaaaaaaaaaaaaaggtcaatcaaataacaacataccagaaaacactaattatggccctcttcattcataatctggacaatttaagctgatatatcatgaaaattatacaacaggaaaaccaacttaggacccggcaacggcaacagaaaaaatctcgaaatcatagccttgaaatgccggggcaactttcactaataactttaccctaacaaccaccacaaaaaattcttaagcagcttggaaaaaaacaagttataagctaagttagtcggaaatttaggcacccgttattcttccaagatgcctctcaagcgattgggtgtgcgagaaggggttcaaatccccgttgttttgctattcctctaagatagcgcgaccaagatttgttgcaagagctagcctaaccgaactcaaggcttgttgcggtaactccacttctgtgaaatctggacgcaaccttgccatggataactcttggagtttattcagtaagaggtttgtttgtggtacggttaacaaaggacgttcttgccaatttagtaacttcaactgcaaaaagtaaatcaacccgaaaaatggcacattagatcgaaagaaaaatatttagagaatggtgaattgtatagcaaatgctcaccgaatcatacaatagtggcagccaaaaccgtggcggtgtagaagtgtttttcataagctgcaacaacattgggaaacaaaaactaatcagttaatacgaagttggcctatttcgattaagggtgattatgaatagtttgagttctcaagcatttgcgtaccgatatgagagattctacagcttgcttggcagaatcggtagtttttccaaggtgaacctgcttgagggacttcttaaaatctctatacctgaaacaattataatgttagaaccaaggagataactgtaatattgattcagaaaatcattgcctgggaaatttgctgggaagataatatttcttacttgtgcaaaaattcaaggccaccggcagctttagtctcagaacccaataattcaattaagccttcccattgctgtagatagaaggatggacaatacccactggttatttttgggggaaagacttggttcctttggtaaaagggaagaaagaaaaactatttaccttgaaactttcgtcagatattgactttccaacagaatcaaacaaatgctgagcaatcctgttaaggcgaacttcatctcgagcttgctgaagccagaacactccagcaccttttctaccatgcttccaatggtacactccagcaatctaaaacattgaagagtgcactcatcttttaggcttaagtaaattatatgattcaaaactggaatcgattccaattagataggacctaggtttacaataccttcataatattagaactaacactatcaagatcatatagacggcatatctctatattctgcaggcattgaaacgaaatttgttaatcggccacagaacataacaaagaaaggtcgcaaaaaccacaaaattaaagtgtataaaaaaaatctcggcaaaagaaaagtgaataagaaaatatataacactggcacaaagactagaagcaagcaccttgagaagcagttcattattttgaactgattgcttatacaacaaaagctctaacaaccccattccttgcttcatgcatgaaatcagataaattggagcaatctgtagacaagaaagcatccaatgacatgagtgtaagcaattaatgtggtttttgtaataaaagtttaaatgtcaacggaaaaccagaatgcatgaaagctgaaactacaaatattgtagtcatcaactttacatgcttagagttttgtttagcaattagcatatcatacaaggttagaatactatttgcacgcttaacttgataagcagtaggatagataagaaaacttaatacacagctcagacggtagccaaggataagaaaaggggaagcaaaaggtttagcaagttatttcatgcaacttgagtttccatgtatatatacagaagatgcatcaaggtaatgtaataatgaaagtttagttgtcacttatcactagaaagtcacagttagttaaagttgactagaaacgaaatcagattgtgactgtaattatcgtcaaataaaagatttatctactgaactcattcatacaaaaacatgatttttttattaatgggaacattcaactagcaattgaaccacaggtacaccataataactttactcacttgccaggtcaatacatgagaagataacacttgggcatacacaagcctgtgtagttctgctatgcttatttctcccaagttatgacgctcctcatgtagaataacttctgcttcatcactcccagcagtcaacaactctatagcatgagcaaccatcctattgttaaccaataaattttttattaataatcattaaaaaaaacacttaaaaagtaagaaaagcaagtgtacaattttatgttgatttgagagctaataagctatgccagtaagtaaattaaacataaaaacgaaacaaaatcactcaccaagggccaaatgctcttgaacattctgccaagacaacctatatcatttcagataacaaattgagattaatgaagggaagagctaataaggtaaaccagaatgtatactgtttctcccttttataatacctcggtattttctcccagaattccaatcataagttctaccagtctatgggcattggatgaaggtttcaactgcatgcatttctgggccaagctatacatgctctctagaccctggtttaggagaactggcagcgggttaaatcctccgttgaaaatatataattaatttaataatctgacaaaacaagcaattaccgttgtgaatggtctgacatatagaaggttggcaatatacaattctaaccaatgacatgctgcagcacaaagactgttactgtttccaagcatgatttgtagcatatttttcaagccctcccgagtcaattgatgattgcactgaacccagaatgcactagagtctagcttagtaatttgtgccctccatttttcccatgcctacatataattaagaagctaaatataaaagataggtcaagtagtatcaacaaatgctacacttttaaccgacataccttcatataatcaggcttcactttatagcattcacctaattttccttctgatagttcaacacgcatgcgtggcatttttgatatgagaacagctactgcctccaccagcccgttctcagtctgttcagtttcacataaagcagacatcatgtatgcagaataaacatttcattcttgcaacatccttaacaattgcgaaaacgaaactgaacttcatccacaaacctcacgatttccaagctgatcaatttgataagatccatgtaagcgcagcattttaacctgcaagagggtacccgacacttattaagtgtaattttttttcactgtaacaaaaattccaaaagaaagacagcacatgcaccgtcctgataatattaataaatgcacatgcaccagcctaataatattaataaacgcacatgcacatatagtacatgtttaaatattaatttatttgcatagaataatgcacaggataaacaaaaactacaaaccacaagttccagccagccaattgctagtgctgatgatatcacctcccaatatctagagtcatcttcaataacctgtattaaacagcccattaaattcaaaccatttaagagggaaggaaacccaaattgaaaacagttgatagatcactgcattgatagaacatctcaattaacaaaaacccaaatcaaactaataagatatttgttggtcctcgctgtattaagaaagacatgcccaaataaagttaataacacttttgttggctcaatctattatgttaagagaaacattattcaactgtcatgaaaggtaccatactagaagtaccatatacacgagatagactgacattgtggccattctatccagctacaaaaacccagagagaaggagaaagtcaaacctgcaaattgacaagttctttctggaaacccacaagttttgaatgggttgtgatctgtgtactggagaggaggcaattgtaatcctgccaagagttgtaaatttgtttaatggaagcaactcaagacactttgaaataactaaattgtataaacatcatttcgttccacagaagcaacacacaaccatgataaaaacaaatattctaaaacaccattaaatcattacagttaaccaatcaacaagccgctccggtagccatggttgacactgtttgtctgcataaaatatttccatcaactcccatgcagctttcaagcaggtcggctcctcaactgtctacataaatgtcatacaattagaaacaataagaatgaattaaaaaccaaagaattttaccacaattcaaaggcttttcataaattttctttttttttattcagttaaattgttaaatcagatggtttgacatccatactcaacaatattactaagggcgcgtttggaatactatggttagcatatttggactatataatcacacattacctttgtaattggaagtaattgagaggttccgattatactctcatggtcagaattgagcgtaattacattgtaattattttaaaataattccattttaaatattaactactaaaaaatattattttcttatttaattaggaactattttgccaaataaaatactattaacaattcatatgtaattaccatctcatattcaaacagacccttgtataattagtgtaattaaacagttacctgtaacgcatcctaagtatgaaataagactcgtatgaacaaagtagattcaccttcaaaactatgctagagtcttcaatgatactatcagcagctgattttgaattaccaagaagtgaaccgatctccttgctatacgccatcacatactcccacctaaatttatcgtaacgagtcaaaatcaaatcgtataaacagtaattgtccagagataccgaaaggctagctcaatcaaaacgcttaccactcgtattgataagacagtggactcatcgacattttcgacaagctcgacatggagctcctacgactctgtagaagagcaaacggcgagaccgaaccgtacgagatcctccgccactctgcatcgctaatctcagaatctccattactaagcctaacctccaaaactctcccgccggcttctccttcctcagaattctgatcagaagttggacggagaactgaaacgcggagtctgtttcctcgtgaccaggatattgagagacgagtgattggaggcttaacgccatgacggaggggatagaccaccggttgtcggacctcagatgataacgggactatagaaccgttagatgcatcggaaacgcctcgagcatcgccgccggagatggatgcgatggccggcatttcgccggagaagaagtagagcgcgcgtaagggtttagcttttagggcttttggaaggtttggagaagagaaaaagagggaaaagacaaaaggttctgtgttgtgtttggcaacggtatctgaagtatgctgagaagaaaacgacatgtcgtcttatagtgtacagattaaaagaaaaactacatgtcgtttatttaacaaaacgacaactgtttggggacccatatattattttaggattagaaaaatatatatatttttttactgaaaataatactaaaagttgattaaacatcatcatataagttgaaaattattttttttattacatattaactaaatataattttaaa

SEQ ID NO: 24166 - DNA, 2355 bp, Cannabis sativa
  modified_base (2122)..(2122): a, c, t, g, unknown or other
aaaatttactatatatgttttacatttctaaattatttattgctttaaatatattttattaattattttaggtttgaataatttttttataggaggatatgtatatattaatattatatattcaaaatgaataacatgtattaatttttttttttttaaaaaaaaaagtggaatttcggtgattattttaaaatttgttatatatagtgttaaaattttgatgtaaaataaaaaatctaaaattttagagatatattttaagtagagaaagtgaggagagtgctctaatttggtgtgtgcattgtagatctcttaaagctgcccaatccgcccacccccacttttgttcttcttcttcttcttcttctggtcctcagtgcgaaaccatttcctcgcttttgggaaaacctatgtgaaaaaccagttcagtaatgttcctctcttggtaatattataaatttattactgatatttttgtttattggataattgcatcttaaattttgttggtatggtttgcacaagatttactccttatttaaaattcttgaggtttattattataagctgattcaaatattttttacatctgagttttgttttagaagtgaaattttctgctcttaatttatggttgaccttatttctcatttaaattatctgatagtttttaaaaaccaggagaacgaactgggatagtttactttgtggcatgaatttgtaaaatattgcgggctctgcagttggatgggtgttagataatagtcctcttcaagactaaacaaatctctgaaatgcattcttcgtgacagtgtcaatctcctaattgaaccaaagttctattttctcaatccatatctaacaatagcttcacaattacatattgatagtctttcaccctctttatatattactaataagcccctacactatttcatagtgtaacacttttccatagtcccactcttaaaaatcaccttgtcctcaaggtggtaaaattaaaaatcaaatacaaaaaataagcataaatataagagataaaaaactaatttcagcccaaaatgtttttagcccaaatgataatagctctcttaatccatttgtgtgctaggcccaaatccatagtaaagcctacgccctagggtacctgatctgttgtcttcaaccttccagccacctgtttttttttttgttgaagccatgaacaaccagtgagatctccctcaattgaagcttcattcgtactcaccatttgaaccacatatttatttgcaaaaaataaacagtaaaagatgcatatatgtatacatatattttattttttttctacaaactagtgaatacacagccaggatcgtcgtcgcctctatttgccattgcactctctgagatctggggcgaccaagcttctcgtcgtccgccagtgacctttccgcttcgttcatcttcgtcaaagttcgttcgtcgtcttcgatcaaagatccattgacgttcccgatcaaagatccttctccgatctttcaacgatgtgtgaatcgattcccatggtgaaccaccattaacaccagacacaatctctcgtagcaccattttacgatccacaaacactccactagcatcaccttcttctatgtacacgcaagatgatcggattgcccgatcaaggggtggcaagattctcatatccccaatctctgttcgagcagagagcttttcctctacctccggcgaattgcgattcaaccttgggagtgcttcacagccatctcggatgataccgataggatcaactgaagaatcatccattgaatccaccgctgatggtaccacatggcctttagtgagttcttcgacatccacgaattcctccacatctgcaggagttgatctcagagtaggttgtgtcgccatatataattgatcaaatttatcaataatagttgcgaagtgttgctcaagcgtagaagtaatcttctcaaattgagaatccaaagtttgcttgaaaaatgactccatagatttgatgagttgaacaatctcttcatcttccattgttgagagttcttactgtgaatgtctgtaatttctctcaatgaaagcaccaattgttagataatagtcnctcttcgagacaggacaaatctctgaaatgcactcttcaagacagtgctaatctcccaattgaaccaaagttctattttctcaattcatatctaacaatagcttcacaattacatatttatagtctttcaccctctttacaaattactactaagttcctacactatttcatagtgtaacaatgggtatagtgtttctgtgaaattccgtattttaatattcccagtttaatta

SEQ ID NO: 24167 - DNA, 2344 bp, Cannabis sativa
gcaaaggaatcagattggattatctagcgactgcatgttgcccagagatcattacaaacaaaataaaactatacccaattgtcaaaaatcattaaaaatatcagtttagccataatttgttacctgggtcgaaagattagaaggaaaagaaaaaccagcccagatattttgagaggaaataattattttttcctgtaaccaaacacataaaaatctagaaaaggacaaatatatatatctacctatatacgtaaaacttaatgccgcaaccgttgaatataacaaagaaaaaaaaaacttgatcagaaatgacaaacacaaatattgggtggatttcgaaattggcaaaaacccatttgaaagattaatcagtaagacatttcaaaatctaaattggaagatgttgacaaagtaagaaagcataataataattaaaaaaaaaatgaaagtgataagaaaataaatgaaagggaagatctgaggatgaaagatagttatttgaaaagcatttaccaaatgggaaattggacgtgagagagaattagattgagaatgagaatgaggatgagaatgacccctgaaagccaaggaggagatggtgtctcatatattctgactctctcttctttcgtaccaaataataaataaataaaagaatgatctttctcagttttaaaatattattaattattgtttattacaaattacaatgtgatttattttttaatattttggaaaatgagaagaagaagaaaaaaaaaagtgtaagagttggaattgtccccttcctcgtgtcatcatcatcatggttgacataaacgctcgattggatacacgtggcacacatgctttatcttagaacatctccaaccaaaatttaggaatatttaggtttggtttgatctgaattttaattttttttttttaactaaactagtaatcaattaaatgtttaaattatactaaaccaatccagttaagaataaattagtttagttctaattgtggtttgtaattcgtaaatattttgatatttttttgttaaattatttttactttaaagcttataatacgttgttgactgaagttttcgacaactaataattaaagctgtatgaagtatttaatgaaagttagaagaaatttttttacgtagttagacattaatgattcttagtctacgagtcattatatttatgagagtttttattacaaagctctcttagttgatccctatttattattggggtatttataggctcataatggtggtaaaagaccgctattgtcgtgttcaatttacaccatacttggctatttcccaaatctgatttaaggcataattgctcatcttataatgggttttaggttatctataagtgtttggtgggatgtgatttattccttatctatgacttgacagctcatttatgcaatcgctgattgatgcctgggggctcatgaagtttgggagtgatgggtttgaacccttaaacacgctagtcagcgtaaggtgtttgatgatcttctccatgctgcactaaatgtgtatacagtgtcttggtccttgagtgacatcatctttcactactcctctcctatcatcctccagatatgccttactcacggaaaaggtcaggcaagggatgttcgcgatctagctggatacttccggaaatgactaatatgtcattactttactttggaagtaattagggtgatgtgtcttgcacccgtgggtcctactgccacatggccactcttgaatgccatgtgttttgagagaaattctaggcaacatttacccctaagtctttttttttgcaattttgtaaaatagaacttgcgatgtgcctcctgaagcaatgatgccatgctactcatgaccatttcaaatgctactcattatcttccctcatttttggcaaaacaatttgatttcttattcgactctgatgccattaattgcaggatctcatacaaacattcgagtgatgtaactgtccttttggttttgtccacatgccaactgcccctagtcgttggatcacaagatttttaatttttgagtgaggaccgttggatgactaacaattcacgttgcctcggctagtttataaaactcctcattcttcttctttatagcttttactctcacatttctcaaaatgtcaaaaccagtcgaaattccaggcagcccagacttccttctactctttctctgatgttgccaagctcagttttactggtgtttcgtatcaatatttgctactgctcgattttcttctatttgtaagttactaacttcaagagctttttctttcccttgctttatttctgtaac

SEQ ID NO: 24168 - DNA, 2537 bp, Cannabis sativa
  modified_base (1928)..(1942): a, c, t, g, unknown or other
tatataagcacttggattgtcaaaaatttatatattagatattttagtacttaaattaattgcaacaacaaacttaagtgttaaagtgtagttaaattataacaatcttagacgacaatatgtctctatatatttgattttatataaaaaatattgcgatctaaatgatgtgttgtacatatatctacatctataaattaattcgatctattcaactcaactcaaggtctttctccaacctttttcatgtgtacttattttttccttccccactttttctttcactatattttgacagtgtacttgtataatatttataacgaactatttttgtaatttcttgcactattcaagcccaacaaatttagcacatcaaattgtaactttttcatatacatttgatatttgacacatgggaagcatcatgccctagctatattagtttttcatgaaaaaaaacttaaattattgatttggtattgaacttgtaaccaaaatgcagtaaaagtgatcatagaggcgtaagaacatttctttctcattttaccgaaagatgagagcttccatagtacatacatatgtgtgatttctttctttctttctttttttttttttttttaataagatttctttctttctttctttcataataaaactagcattttcagtgttttctattcttcaatcactaggagatatataatataggaaagtgttgtaatagcttataggattcttctgttaattttttatctatttcacattaattagaagagtcttttagtctattcttttgttatgatcacatacgttgtaactattaattaagatcacttgtaaatttttaaaagattctgaataaattgtagtgccgataataatatttaaacaaccacttaccacatgtataagaaaaaataatcatgcgtgccataaaatatgtaaatcttatttttagtattgtaaagtgattctaaataactataacatacacgatcataaaaaaattaaactaaaaaattcttacatatgccgaaataaatggggaaaccaaaacattcatttagagggtgtcactactaggggtgcatatgggttgggtggacgttagaagtattttaataggcaaatccaataattgcggcttggataagctataaaccattcaatttttttttttattgtacaacccaaccctatttatagtacaataggggtggcttggattgggttcattgggttgaaatgaatattttaaactttaatatttatatatgttacaaacaagataaaattattcaagctagtgcatacaaaaaaaaaaacataatgtgtgtatgtgtgtgtgtaatatagtgctttcaaaaaaaaactaagatagtagtggtatcattgtgtgagtagcaaagttaataatagtgattgattctcacattaggcttgttcgtagaagtagcagggtaaatatagactacatgttagtgatgtgttttggttaattcacgttctaaggttatcacaatatatgaaaacgtaaaatatatatttgtatatattttgtgaatataaaatatattttatgtatgaaagttgtctcaaatttggaacatctttcaaaaaataggttggtttgatttatatagagttaaaatgtgtccaacccataattatatggcctatcacttttcaacccaatgagccatggcctactcttaacataaccctttactacaaaaatgggttgggtttgctggattaaatggtttgacccatattttgtgcacacctagtcactacaagaaatgttacttttaccagcacagttccctactgcgctggtaaaagtaatttttaccagcgcatttcgcaaactgcgctggcaaaaaagttaaagttttaccagtgcacatttgcagtggctaaaatcnnnnnnnnnnnnnnncatttacgcgctaggaaaagtcatttttttttcattttgtgctggcaaaagttttaataccaacgttaatttgccaattccttttgccaacacatcagaagtaaattctattttatcagcgcaatactaaatttttaccaacataaaaatatgctgataaaagtgacatttccatatactatagtcttatacaagtatgcaagtataaagtgttagaatatttatatttgataattaatcaattaatttaatatatcaaagtcaaaaatttcattgactaaaatattctaatttatggtgatcaacatttaattttgttcaatattttcttttctatttaattgtcataatattttaataattaattgtagcagaaattttgatgaaatatatcacctatataaatataagtattggtccccaagcttactactcattttagtttctatcaaataaccatcaaagagagctagagagagcttgaaagaaacatataccccactaatttattcactctcttattttgcagttttgaagatttgattaacatattagtgagatttacatttatcaatagttggagatacacatattc

SEQ ID NO: 24169 - DNA, 9830 bp, Cannabis sativa
  modified_base (31)..(40): a, c, t, g, unknown or other
ggataaagtaaaaaagaaaaaaaataaaaannnnnnnnnnataataataataataataatctgccaaacaaaaataataacaaaatcataagaaagtatttttcacttgaatcaaatttaaaaatttcatagctaggtcccactggactaatatgtcattgagaaaagctcctcatttattaagcaaattatatgtatatatattaatacttatactgttaacggtactgttaatggaaagatagatgttaaaatggtgatattaattcattaatgatttggactattttaattgggtggacaacaaaatggacagaaatcctagacagaggatccgctttaaaaaaaatgcattctaacaaagagagaaaataaaagtaggtagtggagtaagttatgtgtaggtggtgtagaatgtggtgggatgatatcttcaaaatatttatagtcaaagtgagtgaattaaaatagtcaataaattaattattttaatattttctagaaatttctaacataaacgaggtaggtgggatatgagaagggtagaaaagtaaactagataatgttcaatttattggctaagaaaaaagtgtgagatgggaaaatgagtcaaataaatgcaagagaatggaaaattatagtgtatttttgaaattggcattttgagctcattttttatgcatttagaacacttggcagcatcaaagatcttggaaaaggcggttggaaggagatgatgacaagtgccagcttgtggagctcctagaatgacaactgtggagaaaaagcaaacacgtggcatgatgtggtggatagcgtggggggaagaggtgctgctagcaggtcccaggcaagtaaaggaagctacaggcggctagcagagtattgaaggtgccatgcacctttttctggtggtgaggggcacgcacatctctaggacacaagatcaacaaatggacggcactgatgaggagcttggtagacgtgcgagtgggcttcaataggtctaaataaagctttttgactccaattcttaatattttctccaatgactcaaacaggcttagttcacctcatcaagtcaacctcacacaagtgtaaagttgacttgggtagctaatgcttacaccaaaagtagctgcggtgatgtggaaatcaatgtttgacacgtggcaagaaggaaaacattctcggagtgaaggaactcaagtcatagtacgaaagggtctctagccctgagctaagattaactttgagctctggaataggtatttagatcaatttttttttttcaattcacaatcttttagtattctgagtaacgaagacatgaagaatccaattccaagatctgtgagctaaaaatacctgaaacagcacatcaaaagtcaacccgggcgcctagggtttcacctagtgtcgaagttggcaacctaactagtgttttagtttctaggatcgtcttagtgacaatagaaaaaactttgtactaaaaaataaattagatatgtcatgaacatatttcaggcattataattaaattcaaagtatttctgttttttagcacccaaatcatcaggtggcctaaaacccagtgcccaggttgacattttatcaacatgaagaacttctaagcattaaattgaagaactatccaaagtattttaattttcttcatcaaaaacgaggaaataagtactttcagggaagaaacaaaccaacctataggaggccagaagggggatccaacacccaagttgacattttgtcaacatgggccacttccattagtaatttagaggaagtcttttaagcatattttctgtttttgtcaaaaattatgatacaggtgtgttaggaaatcaaactaaaccttttggtggcatgaaaatggacccatcacctagtttcacaccttgtgcttggcccaacacccatttgatattttgtgaacctgagcagtttctaaacaattgtccaaaaaagtgttttaggaattttttgtgtcataaaaaaaaatatacatgtaaactcagggacaaaataagaatcccaaagggcagaaatttgagcccagcgccaggttgacttggttttgggcccaacgctcaggttgacaatcaacctagtgcactagattcgatcactcaaacacaaattatgctccgagaattcttttcagcatggtcaaaaatgagatgggagtcctcaatttttacgaaccttgaaagtatcaaaacgacatctaggaagctctaagatagcacccagcgcccaggtttatgtatgacctgatgcgctgagttttcttatccgattctaattccatcttgagtgtttgtcaagtttttcatagtaaacgatagttatgaactcatacaagtaaaattcacaccttcatattttcacttttctacaaaggtgactaatttgcaaattgggtagtttcgagtttcttgatttcgcaaaatatcaacatctccgagtactagtgaacgacttcaccaaaataaagaaattaactaagtaagttcaaaatatcacttacgcataaaaaaaatacacatccccatcacgttttctcactcacttagcatccaggttgacgtcatatgtcaacctggaccctggatgtcaacttgggtgctaggttgtcaacctgggcgttggtatcagagcaaccttcagtaaaatcgtcataactcactcaatattaattttattgatgtgattcaacttgcattttgaatatatttcaatgctctattaagtcgtgttttacactccaatcacaattctaaagatatgaagtccaaactttttcgtgaatactgttacaaacttaaactacaacttacccgaaaaatgtcatgcggacacgattcaagattcgaaaattaacaaccaacatctagagtaaatttcactgttagatcatcatcaaaggccaaaaatagcataaatgtattcttttcacattttttgcatattttattattattttaataggacccgcttccctataaaaagagagctcttctagcttacttttgacattcataaaagtacccataaggttagagcatctctgtctagtttttctctctagaaattaaaacttcaacacttacttaattctcttatagttctcgtgagaaataaaaaatcaaagtagatgtagctccattaccatcgggacatggggactgatttactataatttttgtgtgtctctccatttactctactcatctcttacttcatcttgccaatctaagaaagtaccctttgtcggtaacttttgctaacaaatttcactaaatgtgtcggcaaaagtgggaattctcgtagtcgtagatattaactaaataaatgacaagtacttatgtttgataaatcatctcatgacacaaaaaatattacatttggggctcatttgataaattagctctagctcatttttacatttagaaaaatacccataagggcaaagtatctccctctagtttctctctctagaaattaaaagtttcacacttagtcaattttcttgtaattctcgtcagaaataaaaattcaaagcagacatagctccattaccatcgcgacatgttgagtgaagtactgtaaattttgtgtgtcttcctatttactctactcacctcttattttatcttgccaatctaacgagcgagtgttggccaattattagcgtcaacaagtaccatttgctgacaacttttatcgactaatttcattaaatgtgctagcaaaagtgataactcttgtagtgatttagttaaataaatgacaagaaattatgtttgataactcagctcatgacacgaaaaacattgcatttggggtttgtgtgatatgtcgtattacacaatattgtatagtactatattgaattatattttatatattttaatataaaataacacgtggcaattttgatggccatataaataattaaatatatcatattttttttgaatcaaaatataaaagtatattttagtgtaaattgaaatttaacacactataatataaaagtataacatataactcaatttaatataatataatatgcgacttaatatagcctaccaaattacgagcccttgatctgttactgaatacatttagaaggtttggattatgagtaatgacaggtataaaagcacaatttgctctcccaatcaattacgcacatgtaattttttggtaaaaagtcaacaaattaacatcgcaatgtgagcatattgtttgttgattaattgatagaataatcatctagcatgtaggattgatattgtgacataatttgttagaaataattcagaatgaccatttatgggcagatctgtctccatgaaatagcctggttttttaggttgtggcaacacactgtcactacccaacatcataacaacagatggcatgcttggtctatccattggattttgttgtacacataagagaccaacatggatgcaacgcaaaacttcacttgaattttgtgaatcccttaaacactcatcaagcaactcaacttctctgccttccatcatcaacttccatgcctatagatccaatattattcaaaccatatctcaatattatgtatatatctaacatcaatagattttcatgattgaaatgcttaatcattaaataaaaaattgatttggctgattcaatacttacatgtccagtaagtgtaaggctatccttctgaggacgaaatattctacttctttgtccacttatagtctccaaaactataataccaaagctaaaaatatcggacttagtagagaataagccattaaaggcatactcaggtgccatataaccactgcatttataatagtaaaatattcaatgtcagtgcttacaaaaacacgattacgtatcaccaagatttgttaattagcaaaagttgtatttatgtatgtaaaaattttatttaatacttactatgttcccacaactctatttgtatttccttctacttgttcccctccaaaagttctagccatgccaaaatctgaaattttaggattcatctcatgatcaagtaaaatattacttgctttgagatctctgtgtattattctcaacctcgaatcttgatggagatataatagtccacgagcaataccacatataatttggaagcgcttaggccatttcaattttttagcttccatttcacctgaatcaaaaaaaaaaaaaaaaacaagaggccgtgttagtataaaatatgtaacaataccatttttttgacatatttatcaaatagaatttatttagtctaaccaaagatgaaagagtcaaggctattgttggacaagtattcataaaccagcagcttctcttctccttgaatgcagaaaccaagaagtttaacaagatttctatgttgaagtttagcaatcagtattacttcatttttaaactctttgactccttgccccgaactcgttgaaagtctcttcactgcaatttcttgtttgtcttttagttttccctgccaacacaatgaacactattagaaattactaaatcactcttgaatgtatttttctatgaacataatgaaaagcttactttgtatactgagccaaaaccaccttctcctagcttattattctctgaaaaattatctgtggccgtaattatggtcaacaaatcgaactgaggaagctccatgtcttcttcttgatcatcttttcctttacttagtcttttacttttggctgatattatgtgtgtgtgagtatacatgtaaatctatctatgtatatctatccaacagaaaaatgaatatgacaagttaaactaggttttctttttcttcattattaaagtttgttatgttagttattcggttagttagttagttagttagtttaggtttcttggttcaagtcctttgttatggtcttttattgcctatacatagttgcttcccctattgtaagttcaattcaattcaatacagaaataaaacattttccattttctctgttctaatatggtatcagacgaaattgactaaatcttcaagctttccaagcttttgacaagtgaggacacaagcaaccatctctgctacaaccactgatcccgtggttgatgccactactccattcgatcctcctccatctcagacttctgctgacaacaacaacaatcgaactccttctgcagctccacaatgccagcaaccacaggtcgatcgacctgcctatgaagacatttgtagtccatattacccgagcaatgctgatcaccctggttttgttcttgcaattcaaattctcactggtcaaaatttccaaccttagtgccgtgagttcaagacttcaattggagcccgtaacaagacaccattgcttgaagatactattcttcaacctcctcctaatgaacttctttatttttcttggattagatgtatcaaaatggttatgtcttgaattttacattctatttcccctgagattaaaagcagcataatgtatttggacactgctgctgagatgtggactgtcctccacaactaattcaatcaaggaaatgggccatggattttcgaactcaatgaaaccttgacctatcttcatcaaggtgatgattctgtgagatcctactttactaaactcacaccaatttgggataaaatcaaccaactgagaccaagatttccctgcacatgtgctacaaccatccaaaaccatggtcatctcaatcatgatcaggttctccgatttctcaaaggtctcaatgaaagttaccttgctattcgtgacaaaatccttctccttcatccttgtccacctctcaacaaagtcttttccatggccatacaccaagaaagacaaagaaccattgtccatcgcactatcccaactttctctactgcaaccacatctacaccagcaccatccaatactgatgttgctcctgcagcaaatcaaacatcaagaagcaaaaagccatgaccaatgtgttaacatttccaaaaacttggacactacaaagataaatgttatttcctacatggctttcccctagatatggaaattgaaaacatgttgagtcaagaaacacaagaaaaccagacattatttcatcttatcaaaaccaccaaaacatgcaaatttcaacatccaatactgacatttctcagtcacagttaatagcatctcaatgtcaacaactcatctcaatgttgactcaacaactacaactaacaacagatgcttccacctccatcgatgcaccaggtgtaaacaacttcactggtattaaccctctttctttcaattcttagataattgactttggtgcaactcaccatgttagctctaacttagcatgttttcaatctttgactactaatgcacatgctaaaaatgttaatttaccgaatgggacatctgttaagatcgaaaaggttggcactgtcataataaactctaattacatgttgtttactgctgatgaaagttatattcaagccccttctcagaccttgaagattgggatagctaaaagataaggcaaattatattacctacagcaggaaaccagtttggcttctcaattttcaatttcttgcaatgtacaaagagacaaacaccaatggcataattgccttggtcatccttctatactgatttcaaataaaatcaataaacaaatacattttcctcatgatatttccactccatttcactgcccaacatgtcacttggcaaaataaaagaaactaccatttcaatcaaataataatttctctaaggctatttttgaccttattcacctcgacataattagaccatatccaacatcctctattgaaggatacaaatactttctcaaaatagtggatgatcactcaagatatacttagatttacctactaagggccaaatatgaagacctcaacaaacatcaagtctatccaaaatgacaatgcaaaagaactcacctgaaccaacttttacaatagtaaaggtgttattcactacaactcttgtgtaggaagacctcaacaaaatgtattagtagaacgcaaacactaacatatcctcaatgttggtcgagcattagccttctaatctaatctccccatcatatattggagttacatgatcaagacatgtttacctgcttaacagaaccccttcaatcactctaaatgacaaaacatcttatgaaatattgcgtactaccttacaaaattactcccatttaagaagctttggtttccttgcttatggatcacatgtcactcacatcaataaattctctccacgagcaagaccctgcacctttattggctatctagaaaatatgaaatcttacactcttcttgacatccaaaccaatcacatatttcattctagagatgttatattctattagtcaatattttaataccaacattgacaatttttcccctcaaattctactcctactactcaaacagacacacaacaacctaacatcccaggtttaaacccctctgctacataccagcccccaaaaacctctaaatcttgcaaactcatcacaaaacatgctcatctacaagattacacctgtgctcctaccacttcgagcacagtctatcccattacaaattttatttcctataacaggttgagtccacaatttcaaaaagctgtctttgccacagcttaaatccctgaaccaacctcatatgctgaagccaaacttcacgaaatttggaacacaataatggataatgagattgatgctccagagcaaaataacacatggatagtagtcacgttagttgatggtcaacatgccattagcaacaaatgggtctacagaaagaaatacaaccttgatggctccttacaaagatgcaaggctcgataagtagccaaagggtacacacaagaacttggtatcgactactttgagacctatgcccctgtggcaaaatttaacacgctcaaaatacttcttgcctttactgccataaaatatttgcacctacacacatggacatcaataatactttctccagtgtgaattacatggggatgtttacatgaaactacctcaatgctatactccaaaaggagcgatcccaaaaaatgatgtatgcaaattaaagaaaagcctatatggcttgaaacaagcctctagacaatggtttacaaagttaaacaataccctactgcaacaaggtttcacacagacccacaatgaccattccttgttcattagacaacaatccaaaaatttccttgatattctcatttatgttgatgatataatagttgctacctacaacactacaacattaaacaatttcatctcaacttttgatgcacagttcaaactcaaagatcttggcagcctccatttcttccttgggcttccaattgctcgatgccccaaaggcatatcagtcactcaatgaccattcactctcaaactattaaaagaatcaggctgtctcgaatctaaacctgcatcaacagctatggaacctaacataaaattcagcaataataatggccagcttttggtaaacttctctatcacaccatcacaagacctgacatcagctttgcagtcaacaaactcacccaattccttcaatctccaagagaacctcacatgaatgctgcaacacgaatcttacactatctcaaaagcaccctgaggaggacatcaaggaccaagtatcaagtccaattccagtgggtccagtgactagggcacgagctaagagattcaaggaagagcttaacagcctagtacacaaagtc

SEQ ID NO: 24170 - DNA, 4184 bp, Cannabis sativa
taaatataggtcttggtaaaatatattcttactgctgatccttgtgtatggtggaagatctagaagatttgaaagatcaagatatgagtttttgaatcaccattcttggatacaacttgcaaaagaaacaagaataccctaatagggttaaataggtaaatatttctatttatctatttatttcagttttaatgtatatgcttatagagactctggggagatggttgaaaactttgaatattaagggataccaaatattctacaaagcattttctcattattcatttacgacaatttcacttaagtttatcattttcattcgttaacacaaggttttcggcaactaatgtagttaatgaactctcactgtcaacaactaattttaatgatgtgaaaaaaaaatattttaataaaaattgagtaattttattttgaaaaagtaatcaatccaaaataacagttgactttgaactattatgcaaattgaatttaatctaaaatatgaaattcgagatttaatgcattgtaaacaaaatattacaaattaaattgaattaacattcttgtttatttttatttataagctagtgctctaagaggtgaaattgtgtacagtacacttgtgacattcaattttggtccaaaatttaaaataaaatgttgtgaagaggataaaattttcaaatcaaataaagtataattttagttttcaaatctaataattaggatttttgatcccgaattttaacatgtaccaattcatactcatccaactttttaggctaaaacaaattcctatgaactattaaaactgttgaatttaaagatttttatctaattttactaaaaaaaacttgacgtggatgaaagttcataaaatatgattttgtacatattaaagtttgaaagtatgaatttgtaaatgtcaaagtttgagagtataatttgatacatagacaatcattatattagtaaaattaagcaaaattaaacagcaattattgcatctaacaatcttaatgttaaaaaaaaaatgagttgaaaagttagggacattggtaaaaattcctaattacctccttaaaatgagagaggagagactcactcagccaattgcaaaagtctttttttcttttttatttttttggaatgaaaaaaacacaacgcgcacatttccggcttgcctttgcttggttcattctttccttttctctgaaatttgtggaccttactttcttcctctacttcttcctcacagcagtagcagtcgtccaaaaatgatggtggacgacattttcccagaaccaaacgacaccgaaaacatcaatctctggaatttccacaaaacccatttcacagaatcgtccatggtggtgatccgagactctctccccaaaaacgaattctccgttttccctccaacaaaccatgaaaatctacgctttactgaagtacaagaagattcattttcaccaacacctccatcgtctaccttgtcgttttcttcatcttcgtcttcgtcgttctcgccttccgactcagatgcatctgacccggaatcaccgctggcgtccgattccagggtcaaaatatcaggagactccaccagctggatgggactaggatttgatgttttgctttcgaagcttcgtcgttttgcttcttctgcgtttgggggcaatggcgccatgaaatggtgtctttggtcgtttgtctccggtgccggaattgcagctgttgtggtgatgtggtggtcgttttttatccgggctcggctccggcggcgtcaggaaaatttgatgttgattatcaagaagaaagacgaggttagcatttttcaattttcttttaaattgtttgttatgttaacaagggctcatgtttagtatggcttctaggtgtttgtggaaatgccaataagagaacaaggagagaatttagggcaatcactgttgaaacaattctctttctgggttttcctttttttgttttttaaaattataaacctcattcttagactgcatttatattggttatcggtcttgacaattgcaaatgttgttgtttaagccctcttgtttttgtgtcctaaacgcaactcaagtattttgttttgttacaatttagtcattaaggtactttattcatttgctatggtacccttaatactaattattgcattgggtcaactgcagaaaataattaaactgttgcatcaaattgctcagttgaatgagctactaataactcgccacaaacttctggcttcaaaagtggccaagtgattgttattgccttgctgaaaagttagccaagtagtcaaggagcacagttttggacttggtgttatgcatgacttttacaactaggagtatagaaggcattacgtttacgaggcataatgataagcattgacaataacctttgttgctattatgacaaaacgcacatggtcaaattaccatgcgacggccaatttgtgctccgcaaatactctgcactggaaagctatgccttagcaagggattagtacagcaccctatgttttaggacacactaaagttaaaagttctataaaatattcttttattttttaggctcctgtagaattatttgatgcactatttaggttcatggtttgggttttgtaagtttgtgttttaccctttgtaatgactcatgcaccaagctttgtttgttgtacgcgaatttcgttgttcatttcattaatggtgaacctaattaactttgttagtaagaatttcaacagtgaaagaaacatgagaatctgaaaaagatagtcatggttcatgagggagacttttttttcccctttatcttggatcaaacattgaagctccaatgtgcatcatttagttcattggcggaaaaatacgattaacgatgagcacaaaataaaacttagaaagtaaaaacagaacagatgataaaagcttaagttaactaaaactgttagtaatggtgttatgtttgagaaaattgttcgatgctggtaaaggttggctctttgttcatttcgaagaagcacactaaaagaaacatttgctatttgactttggacagagtcgacacccctataagattacgtgggaagccattctaaaaaagaaaaagtacattttcttgctttcatgctttaagaaaattatatatttactttaggttgcaaaattcaagaaacaagaacgcacgatggtgttgacttagctataatctatattataaaggattccatccaactcatatttttggtaagggagtgaaaagttacactctggattatttgtagttgtatcgtccatagaggcaggagaaacaacggaaccttgggaaaacaagtctgtcttttcttctttttcttatttttgtagtcaactatatctcctattgctagaatcagaaatgtatggcatgatggataagataatgagcaaaaccgataacaatgtacagtaaacctttcttttttattatccaagtttatctagtgtcatccatacgatctgataattactttttttaaatatccttttacccttaataacaagtcagtttctaaattgtaaagaagagcctaagaaaattacagtttatggcattttcccttccgggaattaaaaaatcaatgttctgtaaaataatgtgatctgactagaaactacactatacattttctcaacctaaccaaaaaaataaaataaaatgggataaaggacaaaaaagaaaaagaaatcaaatacaaccctttgcactttatcaagaggacgcacagtgaagaacaggttgtatggtgtagttttctatatgaaattaaagagaatgtacgccacggttagctcttatggtcatgggaacccacagttgatgccaaaagggattaaaatcagatcaagcgtacattaacatgacccaagttggtcctttcacaacatctacacatattacaaagatgaaatcaatgagacaatttcaattccttataaattaactacaaaagcactgataatacaaagatggatatcaaacttatgaaagaattttcttctatggatctcagaaagcaatggcaaaagacaacaggtcgagcaaaacttacgtaagatgtgaactgttatcaatattagatctgtttctgtagttgatgacttaaaacattgcctaca

SEQ ID NO: 24171 - DNA, 5423 bp, Cannabis sativa
ttcaattttaaaaacaaaaaactgcttaaaaaaaaatttaccaaacgtcaccttaaatttttaaaataaactttattttttatattaggagatttcttgtcccgtcctcgtcgcgtccccgatgaagaataagcaagaattgggcggagatggggattacaatttttaacagggatggacactgtggagcattctctgccaatttcgcgctccgtgtgcatctctaatacacttaagtattagatctcatttaatttaatataataatttttataaaaaaatattaatcaaataattaccaaatatagttactggtataattttcaaactttaaaactttgtggtgttgtggtgtgggatttttttttttttttttggaaattttgtggatgatgagatgaagaagttgtatacactatacaccacttaaatcattgtatttattaatttttatatatacatcactagagagtagagagtaatagtctgagagtgtcatgtttgtccttattaacaaattccattgactagtctggctatggaataataaccacataattgagtcttattgtatcttattatataactaaaagttccttgaaagttatagtgggacaaattactctaacatacttcacttcattatttatagatatttttttgtgaagttacctccaatttctggcattgaatctgatatgtttttttgtgaagttacctcaaattactctaacatacttcacttcacataattgagtcttattgtatctgatatgtattcgaaaaaccacttttaaaagaaaacactttcattgaatattacatttcgagagatatatagtatccttgtggtgcttatgcatttgtatcctttatgagcattattataatcaagattgatacacttggtagaataaaattgaaacttgtaggttttgtaaggtcgaagacaaggataacatgttgtcccgaaaattttgaggactttataatcaagttgtttagagtaaataagttggaaagaaaactgatcattcagaataggtgttggcagcctatttgtaaggtggacagttgtttgaaaggcatctccctcaatattttagtggcatatgggcttgagttaaaagtgttaaactcatttcaataatatgcatatgttttctctgagctcttctattttgaactgatgtatgtggacaaggatgattaaaactgattccattttcaatgacaatttgtgaaaaagcatgaatcttaaggttttgattttcctttcaaatttatttttaactaaagcctaaggctaaaacaacttctaatttgtgcttgagtggataaattcaagtgaatctactatgatcatctacaaaatatatgtagaattgatagtttgagttagacatgacatgtgcaagaccctaaaggtctatgtgaataaggtctaaaggagctttcgctcgttcattgttaagtgtaaaagaaagagcatgagacttgccaaactggcatgcttcacaggaactatgtttttcattgatggtagacttgacattaacatgactcaaaacaccactcaagactcgattggatgggtggccaagtctcttgtgccacttatccttgatacaagcagatttaacaatagaaactaaagctaaattggtgttctgagagattttcttttctatagagactttgatggatgattgtttttgactcctttgcagcttttcaaactgatacggaccttctttaagattcccttgaagaagcaccttctttgttcccatatccttcacaacaaaaaagtctggaaagaattccacaaagacattattatcaaaggttaatttggatatactaatcaaatttttggttatttctaggacatgaaggattcctttcagtattaagggatttggggtgtatgaaggtaaaagtaaagaaccaacatgactgatatgcagcttagaaccattacctatagtgagagtttccttaccgttatactcattcttttgaaccatctagtttgcatctgctatgatgtggttattagccctactgtcaacatacaaagaagtgtcctccactatctcagggatggcaatgaacgtagcagctccattttgacctcatttgttgttgttgctactgttgttgttgatattaggatatgtccccatatatgattcataatagcggttgtaacagtaggttgcaatatgaccatagcgtccacaaacttggcatgttggttttgagttatttttgttatgtcttccaccacctcagcctcgaaatatgccaccagaacctttagttcctcttcctccatattgtcatgtattgcctccacgatttccaccattatactgattgtttgagccacctctgcaaccagagaagccttcaaaccttgttgttgtaatattggcacttgagtttacagagaaacatttttgttagtaccagacaatgtactaagcctttcaactttactgtcataacttagcaagatatccagtaattcttgccaagttattgagaatcttgcctctatttgcataatgattggcaaatactcaatgtcaagacttgatagaacattagacacgagttttttttctgggtatgggtcacctgcaagagctaaaatattggtccactgtcatttttgtagaaggtagtctgtcgttgacactgctacttttctattcgttcgaatgttcgtgcgatactcatccattttccctcaagagtgagcaccaaacatggtgtccaggacttgccaaagacttgaagatgattcacaccccataacttctatggcaatgctcttggtcatagagtcatataaccaacaaagaagaagttggtcatgaactatctaggttttgaattcaggattcatagggacagtgtttccatctgatgtttcattaagtgaaagaaactcgatcggcttaacctttgttttgttcagatacccatccaaacggtgacctcgaactatcgcaaaaactatagttttccaaagggtatagttgttttaatctaactttagtgcaaaaggctgagttagtgtactggaaacttgtgatacatgagttgtcatggaatgagctaaagattgagcaatgacattagaggcagtctttactgctgattcgtctaaagcaccatgaggggtttgatcaggcatggcgctagtactacaccatcggtgaagctaggctctgataccaagtttaaaaactaagaaaagaaaaaaggctcaatgattgaaaaacttagctcttactttttaggcttgttttactttcatttatacaaagaaatacataatacaataatattctagaatggtatagctcatacaatcattgcaatcattacaagaaaggatcccaagaattattctaacggtaatgtcaaagaattttgttacagtaaggaccacacaaaatcattggaaaatctcatgcaatcatcaaatagttgagtgagggcagagcatagtaaaactatgaggaccaactcattttattttctaacactacttacctacgtaatctattgtatataactctatccataatgagaacataaaatgtgtacatcacgggaaaaataaatgcaaaataagcaaatgtgtgcaacagtgtgacttttgtagacatcaagtaagcccatattgacgaagcaatggaggcgatatttaggcaaaggacaacgacaaataaatacaaggaggtcgattttggaaatctttttttaagagtggtattgtagagcactgatacaaatgtgagaaatactgaggctgatgagaaaccgaaagccaatgagttaaaggtcatgaaacgtcgaaacgatgagttttcttgtaagatgggattgccgtcgttgttgtatccaccgggaatatggataccagctgcaaatgtgatgcttactatgattgttgccacaattaagttgacattcataatatctctattattgcgttgttgtttaggttgaaatgaaacaagcatctctttctcttttggtatatcactcgagagtactagtttgttatcatcatcaccattaagatcacgtacactttccaaactccttttaccacaaaaatagtttgtatcaactgccatcattagccaagtaaacaactgcaaagtgtgttcaaagtagactttgtcattaactatattcaaatgaagaatcaatgtatagacataaaattatattatgattctcctatagattttagcacatgaattaaatgtaaaaaatattaatccataggttatttcactaaaaatactaaagggtgccagtagtgtctataacacatttttatgtgttaatatcgttattggttcaactaactatcggatcctctataatttaatataatagcttttagggagtattgctaaccaatcgcaacgcgacatgttgagaaggtgttaggcaccactgttgtctaatagcaatgctcgttattccactcataataacttacttttgaaatagaatctcatagttaaagctttgatcaattataaaaagatattaatgctttgatcaattaattattataattaataaggatatttatatatttttattatattaatgtggtaatgtaattgaaagtgttcttctattttttaaatattgtgattcaaatttaaatcacttacatacctaaaaatctaatataggtacatatctaaaaatatattattattatttaaatttatctctattatattatatatatatacatatatatatcttatattaaatgtggatttccaacaaaaattgttagtttaacattttttttttcaatttttatgaaccatatttaatgatcaattaattatcttttttttttaaaaaaaaaaatagttttaaaaatctaaatttaattatttatcaaaatataatttacttaattatttaaaagtatcaacaaaattaatattcatctcaataataataataattaattttattcaaaaataataataataattaattgattaattaaacgttataaattataaccgtttataactttaacgaaaaaaaaatattagataaccacatttaatataagagaaatgtaaaacttacgtgaaaatggacatgacgaaaatagacatcaataatcgccatgctctcgttgttaactgcggttatatctagtactattctactattgtcataattgatgaatgctgataccattatagaacttttagcagcaagatgaaagcaagtatttccatctttgtctttccaattaataatgtaattacattcttcaaaagaaagcattttctttaccaaaaatcttctctttatcgaaaatgtgtttttactctccacagcaacatgtagag

SEQ ID NO: 24172 - DNA, 1994 bp, Cannabis sativa
attttgtatctagtgtttggtttgacataaaaattttatgttgtgagttttggtttagagagtttaagattaacactatgtttggtagaggggagagaaggagggagggggaggggtggagggagagggatggagcgattggaaaatttcttgtttggcaagagggggagaagaagggagaggagagatagaaggagaatatctccctccaaacacattatttttaatccctcttaatattggggaattcaaaaaaaagacaaaaattatataaatttttttttctacccttgaaaaaaataatatataattatattaaaaatgataaaatagtaattttaatatttattttactctaaacaacacaaagaagaacaaatatcctctccatccctcctgctctccatcctttctatactctccatccattctactctctccttcctaccaaacatagtctaagagaatctcaaaataagtatttaaagaacttgaaattacctaaaacaaagttgtacgcatttcaccaaacgaaacaaacataataagcaattcactcaaaataagtagtaaaaaaaatttaaacttactccaaaaaatcataagcatttcgtttgattttacattaccattcccaaaattctaaacgtccttaccaaacacccctatacatttccaaagttgttcagaaatgaagaaaataaggattatctcattctccattacaataatagctcctggaaaaatcatttattcaaaggaaaaaggcctcttcactttgcggaaaaaagaagccgctcactcatctcatccggaccaatccagagccgccaggtggctaggaactgctagttccacaaagatgtacattatgattttttttccttcaaaagtgccaataatcctgatttggttgaatttacaaaaaaaaatgttaagaggggttgcttatcagcttcctatgtatcaatatcgagtattgctagcgaatcgatatgttaaaaaggtgcttaagtgtctaacagccatgttcatttacgaaatgtgtatataacttttcatttcataaagtgttgatataaaaacataaataaaatttgacacattaccaacccaaagcttttactatatatttttcttccaattttactactcttcttttcttgattttgttagctatataattatttatatatatataataaatagtcctaaatctaatcaaagctaaggtcgatgtagaggcgaagctacaggagtgttctggtttgaagctcgagactccaacaatgggtgagactggctcagcctcaacctctcttcatgttgctcctcctgaaacaccgccgtatctctgccttcgaaaactccaccatcaccaccagagaatccaccgtacatgtcataaagcgccatcggaatattgtcgttgccgccggaggagaaattacaaagcgctccggatgatgaatctccgacgtggaaaccgccgcttcgagaatccgtcgccgaacattctccaccggttccgccgacaatgacgacgctgctggtcggcgtcggcgttccgctcgttttcgcagctccgcataccggacagccattgattccgaccttccgattataaaaaaaaaaaacaaacaagaaagaatttaggagtgtttggttgccgagaaaatgtggagggaaaaagaaaatagagagtgaaattactagattagcggcgcggtaagtagttccgtctggctcgacgatccaaccggattccctggcgagctgacggagaacctcgttaatatcggcgcgtggagagagtggataaccaccgtgttttctcaaaccatggaagatcttaccggtgatagctcttctgtgtctttctctcatcttagtcttctctttctcagtctcgctccttcctcctccactggccgccattacagctcttttcattggtattgttttctctgtcttggtataattgaagtgcagtg

SEQ ID NO: 24173 - DNA, 2186 bp, Cannabis sativa
ggagtatcgttagccaatcgtaacattacatgtcgagaaagtgttagacacgcctaatagtaatgctctaattaattaggtaggtgtttttatatatctatatataaaatgtatgaacaaacacaaaagttaaagacagctttttgtttgatttgtcatcttcctctaccatttttttttttccattttcaattctttgagataggaaaattaggtttgactctgtaaaaactaatatataaactacaataatcacatttgttttataaaaatataaagaaaaaaagaaatgggatatcatggtacaatacctactttttgattccttatttctaaaagaaagtgcctagaatttggaagagaataatcgagcccagtaacactctgtcttctcttcttttctatcataaaaaaaatattaattcattaaataatggctgtctaaatgcaaaatgattaaaattttatttaataataaatcattttttgaaaaataaaattgaattgaatgctttctctcaaaacaaaattgaattgaatggaagaataaataaatttgtaaataatgaatgtgattgaagaaatattaattaatggtccaaatatatatgaaagtgacacaacaaattaaattttgaacatcaaaaggaaaagaaaaaaaacaatatctcaaggtttaaaaattaaaataatcacgcagtcaatttattttgatttgtatggaatcgtaacattcataaatatcattaattttttattattattttattttattttattgtgatgatacaaatgatagataaacttgaatagttgttaaacatataagaaaacagccgtacaaatattaaaaactattaaagtcaaaacgaaaaaagaaatgtttggcaaaataaacataatatatataatatatggtaagtcataatcatataatgccagcaaaataacatgattaattaagtccaattttgatatgaaattttgaattgttgttcaactaaaaagtatatagtacaattgcataacaacaaaagatattgtaaaacaaagattaaattcaacactttctttgtcattacaaatcaaataactttgtctcttaattttaaaattacagtaaaaaaaaaaaattatgttgctatctaaacttaaaatatatacatttgaaacaaatcaaaacaagcaagtagcacacctattttcttcatatattattttaactttatgataggatcgaatatgcttatatatgagtaaaaaatattcaataaaatagagatgatcttgtaatttattatatgtgggatttgagtttggaaataatgccaccaccagtgtggaatatactgaaaaataaataaatatatataggagaaaatacatgtgatacagaattattagaagtcaaattaaaaatgaaaaattgtacaatatattatataaaaattgatttttgtttgtaactatttgacaagttgcagtactatcgtgatcgagtccccacaaatacagctatggcatttatatgtaccatatttattctttatttacacaatcaattttagtacatcacgtctctcatgatttttttttttatgtaaaaaaacagtaagatagattattaaaacaaaaaactagtaaaatgcatcttatttcaatatcttacccaaatttatgataaaaaaatataatataataattaagacacacttaaattatatatatattattattttaataatctcaactaatcaattaagagtaaaaaaaatgatatatcatccctattgaaaaatattaatgactaatatttaatataattactcaaaatatatataccttagcttgcactaatttataatagaaagcttgctgtaatatagtatttataattttattttttttataaaagacataaaaagaaaatactatatttagcaccgcatttaaatataatataaatataaattataatgaaaaataatattgtagaatttctatttttataaatacatgtatacatatggtatttcttctattattatcgatccaataatatgcatgcaggctagtttctgggaatgttctcatctctttttaatctaaaccataattgtctcacaaattctatttctttaaatttaagcctttgacaataatagttctgagcatataatttcatg

SEQ ID NO: 24174 - DNA, 2579 bp, Cannabis sativa
ctcaacaaaaattgtgaacaaattggctctgccaatagtttcaacagtttcaacagaatcttacggggtacagaagggaaccaagaaagctgggtatggaaccgaaaattgtaaggcaattcaattaacagtccaagagctcgttattattgatgtttttctccctcttcccttagacaatacgaatattattcttggggtacaatggctggagactctcggtcacccaatggaaggaatatagaatgaagttaaatgttggtggcaaatcaatcacattaaaaggagacccatccttgcaacgatcttgagtctcgattaaatttgtgattcaagcacttcaacacaaaggagagggcgtttaggtcgagttaacaatacctttgtttttccagaacgaatggtgaaaagtctctcaatctcaagcctgttacagaagtattcaatggtgtttgagacacccgcaactcttccaccaacaagaaatcacgaccatgctattatccttcaaccagggacctcacttgaaagtgtgccatcttataaatacgcccacgtacagaaagatgagattgaaaaattaatgggtcagatgttagcggcaggaatcattcaatctagtacaaccctgcccaatttttcacgtaaaaaagtaagatggtagctggagattttggcactaaggtgattccaaagattgatttgaaatcttcttatcatcaaattcgggttaaggcagaggatcttcacaagatagcttttaggactcgtgagggacacggagtttttagtgtccctgccacttttcaaactgccatgaacaagattttccaaccacatctccatgactttgtgttggtactctttgatgacatattagtgtatagtccaaatgtcgaaactcgtgtagaacacctctccatagtgccccaaatcctttttcagaatcaattctatgccaacctcaagaagtgtcgttttgggccgtcgaagatttagtactagggccatattatttcggggtagggagaataggtggacccaccaaagatcctggcgatgcttgattggactcaattgactactatttgtgcttttcgtggattcttaggtctcacgaggtactatcataagtttatggttggatatggtagtattgctcatccaattacgaatcaattgaagaagaatcaattttgttggtccaatgaggccacaacaacctttcatcgtttgcaggaagcgatgactactgttcctgtctttgctcttctcgacttgctgagatgcaaatttgtggtcaagacggaccaaaaaactctaaagtaccttcttgaacagtgagtcttaacttcagacacgcaaaaataggtgatcaagctattcgggtatgattttaagattcaatattgacccgacaaaggtaatcgggttgcaaatgctctaactcggatgccttcggtggagtgtactatacttactacaaaatctttttttttttttgaatcgggtaattattataataaattttgtagaatctaagaatatgttagcattgttcatattccaatggcttaaaattgatctaataataagaaaataaaagatttttcttaaaattcactacaaaatctttgcaggatttagatgttgtgaccaaagaaaatcagtcaagacagttttttagctcgtaatctcactaatttggagagaggacttctcttttgagcatgggaagttgttatataaaggcagattagttttatttgcacccttaaacttgattccttagtttctaaaggaatatcattggtcttctattggggatcactcaagcgagacttgcacttatcaagccagaaatgtttagttgattggaatgaagaagtattctgccatgtctctagttggtcttctacaactgcccaaccaagtttgaaatgatttgactattgacttcattaaagggtgtaatgtcccaggaattatagttataattaaataggcatattttatgaaatataaaattatgtgtgttagaagattaatggataagattacgatcttactacgataattaatgagttagatttattaatcaaaatataaaaaataagtgtaatttattaactacaaagatattctagaatatatatacatgacatacacatgctataagtgaattaaaatatatttagatccaacaactgtcaaaactcaatggattggccagagatatcacaacaatattttatgagtggtaatagtaatgagaagttttattacggggtattttaactaattcagtgttaaattggatggagcattaaggtaacctaactccttcgtctttttaaagtttctgtatgaatagttttgttttgaatttgaattttggattagattctgtggagtttatttgagtattagaatttctattgtttgtttaggaggggtttgggtttttgaactcaaagctcacccaacaatggtaaatttgacttttggtgattttggatgccttcaaagtgtggaatatgtttagattatcgcatactattgttttagtaagtttgata

SEQ ID NO: 24175 - DNA, 2590 bp, Cannabis sativa
  modified_base (45)..(52): a, c, t, g, unknown or other
tagttcagggggaatttttaacagccaaaaaagttcagggggcannnnnnnntacatgtcaaaattcggggggaaaaattactaattagcctttttgtaaataacaaagttcaagagtaaaaatgaatttttttccatgttgatttatttttataattttttaaaatttttagtctatgtaaatttttaataatttaattattagcgtttagagttgttattatatatttaagttatagttaatttttaaatttcaaaaaaaaaaagttatagttcatttttcatattaatataatttgtaaagtccctacattattacgactacacacatagagatttacgtacataattaaacccaacaaaagaaagaatttttcacaaatttttatttatggtgactgatattgttagacaaataactaggatacactgatgctatatctatgtatgtcgtattaatgtgttcataatttattaggttccatcgaaaccgacaatatatcattataggaaagatcatattatttattatatggacccatatatatactaaattaatcacattataaatatatatatatagaaccaattgcatagacagacaatcattcacatgccaatgcttttctttaatttgtaactatctaacgagcgagctctgcattttttaagaaaggacataccaacagaaacagagaaagaaaaaatattataccgacaagactatatgtagtacgtccaaattaataaaagacttttgcttcaatgataaaactaaaattaatatataactaaggtgaaaaactgatattaatattgttcatatatgtaattagtacagtcattagttgttagcctaatcagtttcaggaaaagtaaaaaaattcaaattaattcattagttaaaatctacttatagaacataaaatgaaatctgggagggaatcaaagtattcaattgcaaaatatatgtatagatatataaatctgttactctgtatgtacatggaagtttgtgtgtttgatcagaagtaggccataattaggactaaataaacgaaagaaaggaaagaattgataatggaaggaatacatgtatagatgtacccctttttaagcttcataaccctgatgattgctgaaatgggaatatttcagaatgatattattcatcatgggaatcagtgagatcagtatatagtgtctctctctctcaagctagttattggatcgaatcctagttttaacatgattcaaatatatactcagttcattcattcattctttttgaattttttatatgcatgttaattactcaccggcgcctatatctatatatttaggacaaataaagtactgtcttatatataaacatgcaacaatattggtgttttcaaattcaagaaataaggatctttatgttaattaggttggcaaaagaagtaattccatatgcttttataaagggaaaattaagtttttattctttatataggtctccataatgataaaaaaaaaacaagttccggatataatggcataatctcaaaatatgctaatgattcctatcctttaatttccaaccccaaaattataaaaaaaaattcttcattaattctcttttttcaccctcactctttttgtctactctctcttacttcacacccacaaataacaattcacaaccactttttttttaataaaaaaaacataataataaaacgttcaaaaacttgacattcctatagataacaaccgaatttcaaaatcaacatccattttagggtttctcttttagggttgatattgaaggttgttaggtagtcagctaagaaagttagttaggtgtttatattgcctgttaattcttaactatttttctaactggctctgtacaaatctcttgtaacctcttttgtatcatatataaaaagctaaacatgcacattgagctaagtgaactcattttttttctatatttttccaacttggtatcggagccatgacttcctcttccaccaccaaccaatgacggtcgtcttcctcaagctctcccaatagcataggctgctccacctgctgcgttcaattttctgttcaacaacaacctttttccaattgcattctgccttgattgatcgaattatttgtactggttatcctccattcttcttgatgttcgtgctcacaatctcgaggacatactcctctaacaacaacaacaacctcctcgattcatccctggcaccacatatccaaatcctgaattcgagttctggcagtgtgatgtgtttctcatgagctggctcatgaattccatctcagaatcgatgcttggccatgttgtaaatgtcaaatcctttactcaaatttggaacattttctcgagtctattcgccacctaatctcgcacacgcctactttagatttgctttcaacttcagaccacgaggaaaggttctatgtcaattgacgagtacatcctcaaaatgaaaaatcttttagataccttagcagctgctggccaaattctttcagatcaagaactctgtctttatattctttgtggtcttggaactgaatatgaatc

SEQ ID NO: 24176 - DNA, 3017 bp, Cannabis sativa
  modified_base (1234)..(1236): a, c, t, g, unknown or other
  modified_base (2977)..(2991): a, c, t, g, unknown or other
attagcaacgagctgcacagtaagtttaaaatcacgttaacacgcctatgctagttagggtgttacatcgtaagtatcttgggtagcatgcctaattctttaggtcgttacatgtgcattattttctaggtgttgatattcgtagagattcaaatggtatgtacttatctcaaatgaaatacttcactaatttgctagtaaaattacaattagagggtgcaaaacaatgttcctatcctacaagcattgctcacaaactttctctatctgaaagggctccctttgaagataaaacccttcacagaacattagatgcactgcagtatttgactctcccaaggctcgatgttgccttcattataaataagctatctcagttcattcatgcttctactagtgtacattagaaagcttgtaagcggctattgagatatctaaaaggcacactatctgaaggatttttactttgaccagtttctaggctatctcttgaagcttattcaaaacatgattgggccattttccttgatgacaagaattcaacatgtggctatgatgtatgttttggacttaatctcacctcttggtcagctaaaaagcaacaagtagttgctcgatcatcaacagaattagaatttcaggctctggttaatattgcaggagaaatcgatggcttctctcccttctaactaaacttcaggtttcactttcagatattctcattatatggtttgataaccaaggtacaactgccttagctgctaatctagtttaccatgccagatgcaaagatattgagattgatctccactttgtgtgtgatcaaattctacaacataacattttagctcaaattgtgccccctattgatcgaattgcaaatgttctcactaagcctctacctaaggatagatttcaataccttaagacttgttgactcagaaattaagactatacttctaagccacatccgcttgctagattgacgagaataaaatagttgttgagtaattatgagaaatacacaacaaatttatagtagttcactccctgtatcacaacagtaatggagctacgtctacttcgagtttttatttctcacgagatggaattatataaaaaggctaagttccaaagctcaaattttaagagagagaaactagagagagaagctttgaccttgtgggtagttttttaatgtgaaaaataagctaagggagctctccttttatannngaaggaggcccacaaaaataggaataaaataataaaaaaaatacaaattggataattctgactgtagatgattatctaacggtgaaaattaacttctaaaggtgatggtcattttttggagcctgacaggacccactgcgggtaactcgaagcttatttttgtaactctcttggggtaaaatttgaggccaatatcttcagaattgaaattgaagtgtgagacatgacttgatagagaatttaaataacttttaaaatcaagttgaattgcatcgatctgatcaatgttgagtgagttatgactatttcattaaaggcaattcataacccagcgcccaagttaacatccaacgcccaggttgacatatgacgtcaacttagacattgagtaagtgcaaaaacgtccaaggggtgtactttaagattcctaagtgatatttggacatcacttagtccgtttttgtgttctggtgaaactggtcaccagttctcaaacatgttgctgttctgcagaaatgagactcaaaactcttcatttctgagtgagtttcccatgtcgacaaaaagaaatgcgaagttgtgaatttgacttctctgacttcatggatcttagttattgtgaaaaagtagacagaaggtttaaacaaaatcaaaatcagataagcagaacccagtgcatcagtccatttgtcaacctgagtgttgggtacttatttttgagctcccgagatgtcgttttgatacttcttaggctctagaatttgaggacaagttctcctaccctgtttttcacattccaaatccaatggtcaaatcagatttgacatttgagtgatcaaaaccagtgcaccaggttgattgtcaacctaggcgctgggcccaacaccaagtcaacatgggcgctggaccctgtttctagggtctcgagattatggttttctccctgagtttgcttgaatcttcattattttttatgacaaaaaaaattcccataacacttttgagaacttggttgaaaatagccaagtttgacaatatgtcaacctgggcgttgggcctagtgccaggtgtcaacctggacgttgggtcccccttttagctcttcgaaagttttgtttggtcccaaaaaaaaattgaatcttaatctttgcttaaaatggagaagatgctcgaaagagttctcagaaaacatcatcagaattggcccagttaacaaaatgtcaacctgggtggtgggcaagccccaagtgtcaacttgggcgctgggtcttgcttttggcacccaagaagtgttgcttcttccacgaaagtacctatttccccattttttatgaagacaaagaagatgcaaaggtcggatcgtagatctgatacttggaaggcacccagattgacaaataattaacttgggcgggggtgcccaggcaccaggtgctaaaaaatgaacttgctatgaatttgattctgatgcctcaaatatgtttgtggtatgtctagttgatatcctaatgcaagttttgaccaatttgcactaagacggtcccagaaactgaaaccctagttggaaatgtcattccgggcaccgggtgaaaccctaggttcccaagttggcttccggggagcaggttcgtgtaattttagttcctaaggcttggatttgattgtttcatgtctccatggtacagaatactaaaagatagtgggttgcattcaagttgttgatgttggaaatattttaccnnnnnnnnnnnnnnntaccatgtatgtttcattaacatcct

SEQ ID NO: 24177 - DNA, 2889 bp, Cannabis sativa
ccgctgccgcggccggaaccaacaaatccaattcctcctcaaccacaacaaccgtcacagcgacgaattcatcggctgcgaccacttccaaatccctaactgatgagcgaaacatcgataaccttgtgttaccaaagcaagaagtcattcgccgactccggatcctcaagcagcctataactctcttcggtgaggacgacgattctcggctcgatcggctgaagtacgtgttgaaagccgggttgttcgaggtggatagcgacatgactgaagggcagaccaatgatttcttgagggatatcgcggagctgaggaagcgtcagaaggttgggatgatgagcgagagaaagcggaagaaaagagatgtggatggggtggtggaggatggggaaggaggtgggggggaggaggagttgaccgatggcgagtccagtggggtcgatgtagagaaagatatgaagcgaatgaaagcaaatttcgaagagttgtgtgaggaagacaagattttggtgttcttcaagaagctgttgaatgagtggaagcaggagttgaatgagatgcaagacgccgagaagcgtaccgctaaagggaagtccatggttgccacgtttaagcagtgcgcgcggtatttgcatcccctcttcaagttttgtaggaaaaaggtaaatgtttgaatttaaattcttatcacttgctctttttttatgacccatgtggagtacatgaatattcactccctccgaaaaatttaatgtctgttttcccattttgatggtaataagaaggtttagaatctgttgggaacgacagtatgccttagaaataggtttgctgattgctagattaagcttggattggaataggttctgaatacgataagtgtgtaatactttgttatccgtttacgatcaccaacaagtaaggtaatcaaaatcaactctggtcgatttatgtctacttacactcatatgagtagcaagattcatactttttttatattactccctgtccttttacaaactttttccattttctatttctatgcttacaattttgtactcaaacgagcactaagtttctggctcgtaatagaaactgcaatccatgtgtgtttttcttatcatgagtgattgaatcaaataggcaccataaagatcacgtggtatgggtattgcttaatgactatcattagttttgatggcatcttgatccgcttataaaacacaattaactcatccttgttttttcttctttactcacaatgagtgtgtgtaatgagctattgcatttacacagttgcaactttatctggctaagataatgaaacaactacaaatcattcattatacacctttatgtacttttaggtgtcattccaaaatgataccgctagaaaaacttgttgtcaaggtgtttaaatcagttcctggttagtaaagtagtactactatggtcttcaatcttagatattcttgttttcaatttttcttgactttgtgcaaccctctctatggttggagaaaaagcaataggtgctgttgttgcattagcactaagaaataggaactatgccattctattttgttctgcttcagggcatgcggtcacccttttcaactatttcaactacttatattcatcttgtgatatattctttatgcaggttctcccagatgatatccgtcaagcactgatgctattcgtcaattgctgcatgaggcgagactatctagccgcaatggatcactacattaagctggccatcggaaacgcaccttggcctattggtgttactatggttggtattcatgagcgttcagctcgtgagaagatctacaccaatagtgtggcccacattatgaatgatgaaacaactcgaaagtacttacagtctgtcaagaggttaatgactttctgccagcgccgctacccaacaatgccctcaaaagcagttgaattcaacagcctcgccaatggtagtgacttgcagtctctgctagctgaagagggtatttcatggggtagtagtagtagtcaagccggagaagaaagacttcgactaatgcctgctcagaaagagagctaggcctttgtatattatcatctatagaaatgtttgaattttttaaatggtgtcagcttgtatgttaccgtttacttatttggtgcggaagaaaagaaaaactcacgataatttatagtagtttttttcattttgtttcatttttctaatgaagatggaaacttgcttggagaaaacaaaaattaacactaattctattttttctaaaaaaaaattaatggaaaatttggtttagcatgcttaaattaaagcatggtctttttatatatatcacctatcccattcgatctaattaatttcaatcatccaatcgatttaacatttattgaatattggattggatcttttttatctattgaatgtatttcaaatatatttatttgttaaatttaggtttatctaatattttagacttgatattttgttttggatcggattggatccatccaatattttagattcaatatgtattagagatccaatccaagaaaaaaatagtaaaattttaatattaattttcatatatacatatatatattttgcgtataacaacataaaatctaatgactcattcaaactaaatgaaaatactaattagttcgattgaatgttggatgtattggatttttggattccttatccaatatccaatctgatctaattggatatttaaaaataacatccaattcgatcataattgaatatcgaatatttgacggccgattgtatttagattagtcgtttgtcattggattggatcaatttatgcacatcgctacttatacttttaatatcttttccactca

SEQ ID NO: 24178 - DNA, 2020 bp, Cannabis sativa
aataccgcccattgtctggtctggctcgcggtgcttgttattggtcagattgtatttttgttagtagcaatgttcctagtgctattaacattgttgtaagtgccgatttggcatttctattttaatgaagtttctacttttcattcaaaaaaataaaaaaaaattgattattaaaatcacaacactttttgacttatcatttacttttaaatatctcaaaatttaattctaatagtgctcgaaatgaatgtaggcaaggtttgcctacatattggcttgtaattctctttccattgattacatattatactatctttctttctaattactaaactttaaagccaagtaagtaatcagatcaagattggtaagaaagaaagataccacttagtcttacctcatttcattaagtttgctttaaagtcaagaaacgtataatatccttttattattatacacacaactacagtttaatgttagagattatatcaatagaataaataaaataaataaacccaattataaaacaatacaacaacaacatatgacaacaacgacatatgagattgattaaataaatattatatttatatacattatatagattgttaaaatttagtaagttgtgattaaggtgcataaagtttcatctcaaaatcaattagcaatgagaaaagcaactcatttatctgatatatatatgatattttatttccacacattagtaatgtgggactaacaataatacgtacttctcacgtttgagcttagaaaatatggatataacgaacgacttttaagacaccacgagggctgaacgtgacatttgaaagaactttacaaggccaaattggaaaatttaatttataggtgtacatgtcgggaaatttgtggattttcgaaactggcacacattagccaaaagaccccaaatagaaaaaataggagaatattttttgtttgactctgataccatgttaaaatttgataaggtgagattaaggtgcataagattttatctcaaaataaattgataatgagaggagtagcctatttattttatatatgacattttatttttacatattagcaatatgaaactaaatatatataatagatagatattatgtgtaactgcatatgcttagttttattttaagttttagtttactattattattttttaaatatcataaataaatttaaaataaataatactcagtataaagtaataattgtagaaaatataacagtattttgacaaaataaaaattgagtaatattttgtgtaaagttctaaaaaaataaaaattaaagtaaaaaattagtaaaatatagtaaaagtaataatagtgaatatttgaaattgaaaggtaaataattgtttttttttttttttttttgagaaaaaagtaaataattggttaagtgttgatatttttgaaaagaaaaaaaaaatgtcttttttttttctaaattagatgagttataatcattcaaccaactaacttttaattacaacctaacaatgttagtatcaaacttacaagtgatcactccaaacactatcatatatagatattttctttgatatttgaaattgtattctacttctaatttcaaacatgatttgtttaacaataacatgaggacattggaggctatgaagccaaaatacttgataacgatttttccaaatatggtatacggcagtagccattattgtagaaaaaaccttcttcctccacttagatagcttgttccttcgaatcaatttcaagagatcttgaatggtagtagctgaagtgacccgttcaaccaactttttagagtctccaagattttaatgctatttgtgcagctaaagaagagatgttgggtagtctcttaatggctgccacaaactatacaaatattattcgttacaatattcattttgagcaacctgtctttcgtttacaatctattcaacatagtcagccaaagaataaacttatgcttcggaagactaagtctatcc

SEQ ID NO: 24179 - DNA, 3224 bp, Cannabis sativa
tgatatggtggttcagaatgttggtaattacatcggtacgtatgtcaaatcggatcctaaaaattttaatggcatttggagggattacttgcgggttagaaccacgatcaatgtggagaaacctttgaaaaggagaatgaaattaaagagaacagatggacagtggctgtggacaaattttaagtatgaatttcttcccacgttctgtttcatatgtggcattattggccattcagagaggctttgttctaggctctatgataccccgctggaattgatagaaaaaccttatggtttgtggatgaaggcccaaccaccacggaaaaacaagttgataggagcacggtggcttcgaacagggacagctgcggatgcccagttctccgatgaaggtgcaacagccagagatgaatcattgaatgatgatgctgatccgatcactaaaaatcagggattgacatttgagagcaacggtgatagagggattgacactttaattgtgaaaggagttgatcgtggaaagagaattgattctcaagatggagaaaatcatggaggaatggattgtgttaatgagggcattagtcatcaaggtgttaatgctatgagagagaagaatgcagtggacaaagtcaaccttcagaaaaaagctttattgattattgatacaaagcgtagaagaactgaggtggcaggcaaggaagtaatggaagaagatgaggtggaaaattataatacaattgactctgattcaaaaaatgggtttatggtgggtcttggttctcaggcccaccaaggattatgagtgtcctttgttggaattgctgtggacttgggaacccacgggccttacaattccttaaggaccttgtagtccaaaagaagcccaactttgtatttctttgtgaaactttgagccgaaaagacaacattgagaaagttcgagttcagttacagtttgaaggtgcgttctcttgtgatgtccaaggaaggagtggtgggattgctatgctttggaagaataaggatgaggttactctacttgggtatgatcatgattatattgatgtcaaaattactaattctgatggagtcatttggaggctaactgggtgctatggggaaccaaataggagcatgaggatacgtacttggaatcttttgaggactctatctgcggataataatctcccttggtgtgtaataggggatctaaataatgtattatcacaagaagacaagaaaggaggtgtgccatatccggaatggttgttggagggatttaatcaagccttggtggatagtaaattatgtgattttaatctctcgggttatcctttcacttgggagaaaggaagaagatcgttaaattggattgaagtacgtcttgatcgagcccttgtgtctcaaagttggttatctgttttccattcggctagactcattaatcttgagcttagtagttcggatcactgcccaattttgttggagcctactgtcaataatttcattcctgtcaaaaaacaattcaggtttgaaaactcttggttaagggaacctttatgtatccaagttgttgaagatagttggagagctagtggtcatatggatgttatgggtaaagtggcctcctgtgcaactaatcttgaagaatggggcaaggaattcactgggaacttcaaaaaaagaattaatttttggaagaaaaaggctgctcatttcaagaggggcagggatgatgcttctttatctggtttcaaagaagccaaaaaacaattatttgaagtctatgctcaacgagaagtcttttggcgacaaagatcaaagcaactctggctttgtgatggcgaccaaaatagtcgttacttccatgctgcagctactactcggaggaggaacaactccattactaaactccaaaatgcaactggaatatggtgcgactgggatacaggtttgagtgatattattaaggattattttgctgaataatattgcgcctcacctgggaattttgctactgttattgctcatattggttcctcggttttgactcaacaaaaccacgatttattgtcgattgtcacggaggaggaagtgaagaaggcactctttcaaatgtagcccgagaagtcacttggactcgatggcatgacaccgagattctttcaaaaatgttggcatattgtgaagaatgatatagttgccttagttcgtcaatttttcactgatgggtctacacctcacgggctgaatagaactaatatcgttctagttccaaagaagaaaaatcctagtaacatgggagacttaagaccgatatccttatgcaacgttctctataaggttatctcgaaggtcttggcgaatcgtttgaaagttgttttaccacaattgatctccgaaacacaaagtgcttttgtcccgggacgttttatgacggataatgtcatgatttcgtatgaggtaatgcattatcttaaacgaaaaagattgggaaaagaaggatatatggccttgaaacttgactttagcaaggcatatgatagagttgagtggcactttcttgaagttgtccttcagagaatgggatttgatgcaaagtggatttttcttgtgatgtcttgtatttcgtccgtggaatatactgttactcatagtggtaggtatattggtccaattgtcccaactagaggaatacgtcaaggcgatccgctctcttcatatttgtttttaatttgtgcagaggctttttcttcactaattaagcattatgaagtctcgcatcagataagaggcattcgagtggctaatggggctccagtcatttctcacatgctttttgcagatgatagttatgtattttgtcgtgctaatgatgatgactctgacaagatattgactcttcttcatgactttgagattgcctctggacagaagataaacttttcgaaatcctctgtcttcttcagctgtaatacacagcctggtatgcgtactttaatttgtcaaaagatgggtattcaggaagcaggggagaacagcctgtacttgggtcttccttgcaccattggaaggaataagaatgcggtatttggtttcgtgaaggacaaagtgtgtaagcgtattcttagctgggaaggacggttcttatcaaaggcaggtaaagaacttcttcttaaaacagtggctcaagctattccgaatcatgcaatgtctgtttt

SEQ ID NO: 24180 - DNA, 7528 bp, Cannabis sativa
  modified_base (324)..(325): a, c, t, g, unknown or other
  modified_base (1900)..(1904): a, c, t, g, unknown or other
tttttttttttttttgtagtgtaaattaagatcttggtaaaataatatcgaacactaataacatgaacatgtattcatgattacttaagatttagaccaatctactattgatcatcgttatgatataaaataggtctttatagtaaatgacatgttaataaacaaagctttatttatatcggtccttaacatatataatctttattatatatagcaccttcactttgatgtcatactacattaataatccaaaccgagattacttacaccatatagcgggcatcaatgaactatattagcaaccattgattaaagattctatanntttaatatgttgctgactgttttattcacagctatgcggtcttagttctttgtacagctacaagccattacatcatatatgaataaggaattttccgatgtttaatataatttattcaataacaaatattaataatttaacattcaagcatatatcaaaatgttcaactcttttctaaaaatctataatgtctctacatgttttttaggggataaaccctaacaatctcccagttgtcctaaaagaaattgggcatttcccttattcccatattatttatatgaccgataaaagattttgttggtagcgtcttcgtgaatggattcaccaggttatgttcagaggcgatcttgaggatcgttcacatcacctctctcttctatatctcttagtagacgttacttcctctcaatggctccttggttccttgtggatggccactgctccactattctcatggtagagcaccagtggcttttctacttctggaactacttccagagtagtgtagaatttcttcaaccgaaatcttccttagctacttagcaatatgctatatatttagcttccatggttgaatctacaatactggttcgcttaatacttcgctggactacaactcctcaaccaagagtaaatactgacccaaatgtcaactttggactatctttatcttattgaaaatcaaaatcaatatatctagtaggatttaactctccataagaatatacaagcatgagatctctcattctccgaagatacttgagaatgtgcattacaaatatcaagtgatcaaaatctaaataagattgataacaactaaaaatccccataatgtagcccatctgaggccttgtacacaacattgcatacatcaaaatcacaattgctgaatcataagggtactttaacatgtccacattgatcatatctgaacggcaactatcctttattagaatactccattgacaatctttgtaacaccttatcgatataagtttcttaataaagtactaatgttctctattttctatctctatagattttgatcccgcaaatatagcatgcttctccaaaatttttcatttggaatttataggctgaccacttttgtacatttgataacctttctatattatttccaataagtagaatgtcattaacataaggaactagggatagcactagattagctttaatgtatttatatacaaaggctttgtctttgttttgtgcaaagccatactctttattagtcttattaaatgtgatattctaagatttagaagcttgcttcaatccataaatagatttaagcaactggcatacctttcgatctttctctggtaacacatacccttctagttgttccatataaataactttatcaagattttcatttaggaaaatggtcttgatgtccatttgccatatctcataatgatatatggcagctatcgaaagaaaaatgcaaatggatttaaccattgccacaagagagaaggtttcgtcatagtcaacgccttctcgctgtgtatagcttttggctacaagcctagctttaaaggtctctannnnnccttcaacatttttcttcttcttgaaaatccacttacaccctatacctagattttgttggtacacatggaatccatttctgaatccatggcagtgttccacttgtttgagccagggccatctctataagtcaatcgatcgtcattatctggaacagagataagaacatgtactttattttcacagtggacaggttgtcttgcaatcctcccacaatgacgatgtaccggggtttccttttcaagaactgtggtaaccactattgattgttcaacaaatggtgctaaaatcattggattagaaatctgattattttttatttcctcgataaccacttggctattggattgtgacttttcatatagtcatgttcaagaatagtagcatttatcgatacaattactttattgtcatgatgactatagaaataggcacaccaagtttcatttgaatatcctacaaacatacacactgtagtcttaggagcaagtttcccagccatgggtttaagaacatgagcaggacaaccctaaatatggaaacgtttgaaattgggttttatcccgttccataattccattggagtattgcctatgctcttcgagggtactacattcaaaatgtaggtagccgcaagaagtgcatatcccaaaaagtttagtggtagtcttgagtaacaaatcatcgatctaaccatgtctaacagtgtcaaatttcttctctctggaacaccgttttgttgaggtattctaggtgttgtaagttagaacaagatcccttcttcaaacaaatagtctttgaatttagaatccaaatacttggcaccacggtctaatcgaagtgtctttaatgatttacctgatttcttttcagccatagccttaaagtctttgaacttcagaaaagtttcagacttcttggccattagataagtattaccgtatcttgaataatcgttaataaaagtgacaaagtatttatcaccacctcgagcttaaatattaatgggttcacacacattagtgtgaactagctcaagttgttctttggctcttttgccttttgcagaaaatggtctttttgccatcatgccttctagagaagattcgcatactgaaagagtttaaactttttgttctctcaaagggccatcttttgttaaccagtttattctatctaggccaatatggcctaaacatggatgccatagatacgtttcatcatcatcaaaaactttttgcctcttgattgaggcaatgccactctaaacaattcattatttaaaattgattgctcactagccttgagcaaataaagtctgttactctattttgcataacaaataggcgtaccattcttgcaaataataacctcattattaataaaaccaatattaaaaaaaattaatgcaaagagccaaagaaataatattcctggtacattcaggaataaaataaccattgtttcataaagaaaatttattattaaatttcagatggactctgcccacacccttgttagacacttgtgctccatttcccacacacatactcaccttcctatcagcgagctcccttgacgattcaattatctgcatagaagaacaaatataatttgtggcttcagaatcaacaatccataaagatttatcatccttcactaagttagcttcaagaataaataaattgcatttacctttcttaagctcaaagagatgcttactagagtttctcttccagtatcacattacgccacaacacttgcctttcgccattttttccttggacttggggctagctttgttcttcttggccttgggtgacttcttgccttttggcttaccaccactattgtccttactgttccacttccttttcttattagaaaaacaaggagttctacatttttcttcaacaatgtttaactcaccttccttacacttatccttgtttacgttttcaaacacgttcaactcattcaacaattaagtcatgttgaactctagcctattcatcacatagtttatggtgaaacccttgaagtaaggagatagcaactcaaggatcatagtcacttcagtcctgtcatcaatgataggcatgtgtatcttcgccttatgcattagctcaatcatacacaatacatgagttcgaacagggacacccttcttcatcttaaaattcatgtacctacgagtagcatcatgtcttgtttgattaggtagctacccaaatatggcttgtagagaattcattattttagatgcattctccatattttcatgcgtcttttgcaaaacatcgtccatgattacaagatgaaacatttggccttgttgctggattaaatccaagcataatatctgtcccaaaatttttttggggtattggcagggggctcctcaggtcgctcctcagttaggacaaatttgtgattctcacaaactagcattaaatttagacttgatttccattcataagacttatcaccattcaattttttaagtgttcataaagtagtaaggggatttttgatagtagacatgactgaaataaataaagtgacatgatgaatatacatgaataataaatatcattccagaattagtgtaaacgtgatgcatgagagcatacaagtaaatcacataaaattttgtttaagttattccacaataaaactttttgacaattgatcactaccttagggtcactatcgagttaattttattgagcctatgaaaaaattctcatctttattattttgaaacgtaaatatctcatattttcttttcaaaatataaagtactgcttttgatcaagtaaacaattaaccactatgaagcttagttgtactttgtgagtgtaacccattatttcaaatttcatgacttaacttagtgtgtcaccttaagggtcgctatcacactaaaatacatcacttcctcctatcttagtcaagagatcaaccttgagcaagagtatagacacataccttccttagggggacaaaatctaagccgtcttggtgccagtctatactccctcggtgttgaccaataatggaggtcgtaggttgcatttacatgtactccttctcccactcactatttcaggttaatatgtttgttttattaattcccaaaattaatacatattaactattttaataattatgattaatttattataataaaagtctcaaattataaataaatttcttctcgtaatcattaaatctgaattaactctttaattcataatttaaaactattttaaattaataggttaatttaaaaaactaagttaattctaaattaatcttagtcagtttacatgttatcgatttataaaaaaatggtacacaaaaacacatcagacaatcctaatatatcatgtttctactatgtgatgcatgataatacaactatatgagatttctatgtagggcatgttatttactaatgcatgggcacgttattaatcaactattaataaacattatttaaaaaattaataaataaataatgatgatgaatcgggtaataattgcgtatttctaattttttttatcatgaagaaggaatacttcattaatcacaaaactatacaaacaccaaagaatacaacacccaaaaaggatgcaacactcctagcaacaggaaaaaaaagacctgaactagttacataataaatgttgtatatatatcctttcttccctagtcaactttctattttttacagcttgaattctatacatcacaatacacttaacccaaagaatgtcttttttctctgtgattgcccaaataaactttgccaaaatcgcttgattccactttattccttccttaaaaccaattcctccataagacttcgataagcaaatcttatcccaagaggtaatatcaattttgctactattcccggtggttccccataaaacacctctacacaatctttctatttcctttgtgacactgagaggaaggatgaagatactcatcaaataattgcaaaacccaaacaacacataatgaatcaattgaattttccccgcatatgaaagatgcatgcttgtccaggagtgaagaagttgttgaacttttttgataatgataccagaatctttagtgttccacttagtaggcctaagaggaactcccagataatgaagacgatatgagccttctgttaacttcaagtctccatgtattgctatcttctcattactttgaacccccctaaaataaatttcggattttccttcattgatatgaagccctgatgtgttgccaaactcatccaatatttccttaaggacaagcattgattgccttgtacctttgctaaacagaattaaatcatttgtaaagtcaaggttaattagacaaagatgtttgcataaagtatggaacaagtaactagtacctgagactaccatttgatgtcttcttgtgagatattccatgactaagacaaagagaagaggtgataacggatcatcttatctcaagcctttttcacctttgaagtaaccttgcaccatcccattaaagcatatgaaataattagtagatctaacacattccattatcctttgaacaaatcgactaggtaggttgtaggcacaaagcaggtcttcgataggtcttgcaaaatgatcacattatgagctatcaatcttcctttgatgaacactccttggttttgactaaccaatgaggtcagaacaccagaaagtcttgaacacataagcttggagatgcacttgtacatagcggtgcggtacgcaatcgacctgtaatctacttctctacaagggctctcatgtttaggaattaagcagatcgtagcaacgtgcaattcactaggcatattacaaattttaaagaagtcagagatagctccaaaaatctgtttatcaatattcttccacagtgctgtaaagaaaccaaatcagtagccatttgggccaagggatttagtttcagcgatgctgaagaaggctttcttgatttctttcttagagaaaggttttaagagatcaagttgctgctctagattaagcggattacccctttcaacacactccttattcaatctctgattggtactactcttgctaccaatgtacccacgagaaatgctccaggatgatctaccactagtggaaagttgtttgtaatagctccattctcattgacaaacgatgctacatgattttcaaccttccttttctttaagttagcatgaaagaaagaagtgttctcatcacctttttgaagccattcaatcttactaagctacttttaaaaaactgagatacattttctccttgacataaaaaacttatgcagccaacttttcaacggcttgaatctctatatctcttgggttctcttgggcttggattttggtattcaacgggtgagtcctaggttcctcataagatcgtcccacatctccaattaactccctattaaagaacttaagcttatgtttaagccacattatcttaagataaatcccctattgggttttgtgccctaaataaaacccatttcaatataatacgatttacttattaataaagatcagaaataacattttatgagatcggaagagc

SEQ ID NO: 24181 - DNA, 4969 bp, Cannabis sativa
attttttattttttcaaaatattatttattttatcctactaaaaaaactaaagtgggagtttttttaaaaaataaatatcagatatttattaaaagtaaaagttaaaaaaaaaaccttaaatctaagactcactacactcacgactcactcgtctgtctcattctcatcctctctcgcttcgccgtcaccatctcaggcggtctgagattctccctcgtcacgacatcttcatgcagcaactctagcaagtcaaaacaatataacttgaaaataaaaataacttaaccttaaaatgaaaatagtttttataaaaataaaatatatatatatatataaaataaaaatacaatattcatagcaattcttttttttttaaaatgaatatatattatatggggaattttttaagcaatgaaatgaattaatattttttttaattaaggagtcaactgttatttttagattggaaatatataatttttactaatttgttaaatcagtcaaataataagattgtgccttaacaaaaatatcactcattctgaaaaaaataagatgctctaacaagactatgagaatctatgttagcagatctttaattaaaaacaaggaaacattatttaaagatgcaagaagtttacgacaatcttctataataaccccaaaagaagaaagtatatgtaacaaatttcgaatagcttggactactaccaagcacactgactcaagctccacttttcgacatggttgagttttgatccaacttagtgtttcctttatgccaattgcttcggccaaatccagagcgcctatactagcaaaactgcccgatcttgagccctcttacgaattctatccttcaagaagcttagaatcacagacttaaactgatcgaaggtattagttaaaccaagataagtactgtgttcagaagttccttgtatttgtagaacattacaaagatccaatggacttggcctcgtcacattagcactaaaaaagacattagattttgccaaattaacatgctgacctgatgcctcctcaaacttatgaagcaactccaaaactctcgtagcatcatcaggggaagctttgaaaaagatataactatcatcaacaaaaaatatatgagagataataggagcttcctagcaaactttgattcctctaatccacttctgagattcatatactcgaatcaatgaggaaagaccataggcacatgttataaataaatatggagataattgatctccttgtcagatgtcacaagttggaaagatagtccccatctctctaccataatgtacaatagtataagacactaaagtgacataagtaagagtcaaatcaacccatctctccatgaattccatttaaagcaaaattacacgaagataaccccattttgccctgtcatatgccttactcatatccaacttaagagccatacttccctcccaatctttccttttcttttcaagtagtgcatgacttcaaaagagaccatgatattgtcagagattagatgactcagaataaactcgctttaagtattagacacataaacatcaacatctaacaaccctttcattcaattagcgatcaccttagtaatcactttgaccaatacattacacaaagaaataggttacacgtctcccaacacagaagagttcttcttcttatgaatgagaaccctattagtttcattaataccctctgggagcacaccatccaaaaaatctcaaaccatcctcaccatatcatgatcaactatctcctaatgtttttggaaaaaagtaggattcatgccatacggtcttgggctcttctttaagtgcatttagaacaaagcatgctgcacttcttcttctaatataggcttgagaaactccaaattatgtgcaactaaaacaatactcagaacacacagaaccaccttacgccagtttgcattagaagccaaaaataaattagaaaaataattcaccaccaacacttgcaggccattgtcccactcctcccaatcaccttgatcagttttcaacttaggaatgcgattggtacgacgccaagaatatgctttttgcaggaaaaatttgctattttaatctctggattgcaaccacaactgctttgactgctggcgataataaatctccttctaatcaagaatagtaaataatttcttttaaattaactagaaccgcaggctcaaaatcaaatcattcttcatgtggagctttataattttgactttacacgcttttaacctttacccaaacttcgttgtagtatccatctgcccaactcgtagcttaactacacacccacaccttctgctgaatattcatcaagtagcttccttcataactctccttgactagttaaaaatacattggttctaccaagcaagtattctcaaatttaaagaacctcctatttatcgccaacacagatcttttctgttctaacaaattgggactatgattcaaagacgagtcttccaaattataaagtcttttcatatcaaacaaagaaagccaagctgatgtaactaaagcccaatcaatacgagttcttataaactctaaagtacccctaccacgctcccaaataaactcatgaccaaccagttccatatctctcaaccctacatctttaaaagctttattaaacatgtccactagccacctaaggtatggtgccccgccccacttatctacctaatctatcatattattcaagtctccaattacacaccaaggcaagctagagttttgcaccaaagttcgaaccaaatcccaagtcttcccacgttgtgctctattagtctcaccataaacccgagttaaactccaagcctccgtacattgacctttgtaataacatcaatatggttttgagaaaaacaaattaagttcgcctgatcttcctcaggccataacattgctacacccccactcttacctctcgagtccaccataaactttcctttgaactccagttgtctatgaatccattccatcttatctttcttgcataaagtttcacaaagaaaaataaacacaggtttcttgtgacgaatgacgtctttaaggaacttgccattctgtcggttgccaagtccacgacagttctaactgaggacactcatgatgcaaggcgggtcgaaccagcacaattccacaaccactctaaattctcacaaccaacgtgaccacaaaacctccatataatccctagccctacaaaagatcttaagaaaaaaccctaaacttggaacacacgcagcacactaggaaaaaagaaaataaaaaaaattaacaatggacgtaaaattagggatatgatttcaattgctttgattacccaatttttaatactaattaactaatcttcttcctcctatgtgatgacagattataaattaacgtaaactcttttcagatcataaaggccttaatagtatgtcaacgactgcatctctaagataatataatataaacaattcacattaagtaataatctaaaagtaacataagctatgtaattacttttatttcacatcaagacccatatttattttttagagcattcctaacattcacttttcagattttacattaggatcatagatcatgcataatatgaccaatcaaatacatttaataagaaaaaatataaataaattgcacaattaatgaagaaagaaaaattaactactattaactcatgaaataatgtcgaacgatatccatcaaatccttaaattttgagtttagctcataattaaatccataaccaaattaaacatcaacataaacatagaaaataaaagagaatgagaaggaaactagtttgggattgtcacgaatcactaacttcttcctccaatcttcttctttttttttttagtgttttgtttctgcctcctttgggtccccccctttatttctgaagccctcttttgcttttaaaatagaatattcagccaaaacaagagaaaagataaaaaatcccgtcttcctttgacggccacactgcagtgccagtaataggcatcgcagtgcctggagcaacttcgacactttatttttcctctgtaaaacctcgtcgtggcaccttggaggcacaattagtggtgcgatgctagttttgggtgccacaacacctgacatttttcagcttcgacctctctcagtaaaatatgtataacttttgcataaaaactctaaatgagctgattctagatgcatttaaaagctaaaaaaaatctaaaacttttaggttttcttattttcctaaatctgaacaaaacgtggtttaatttctatttgaagtttcagttttttttttttcaaagttctctattttataaataactgtatttctaatatttgaccatacattccaagtgtcaaaacctaaaacaaaaaaataagcataattctgttccaaaaactacaatttaagaaaaaaaaaatagatactcaaaatacttcgaacattaggctaaaaatagcctaacaaactcttccaaactaactcatcactcgccctcgagtaagataacactaaacacaaactagaactaacacacaaacaattaagcctccatttttattaacaaactgctgtgaccacctataaaacttcaataaaaaattttaggtagaatttcaactcaattactcagatgtctccattggaaaagtagtgtataaattcaaattagaattcaacatttcgacaaaaacataccaatatttttctttccgactttccacaaaccaatattcaatattcttgcatgttttacctctctctccattaatgtcaacattacttgcttagaatcaattggactttctaagtaataatgaaatgactaaggtaaagggtagttgaaaattatttattaggctatattatgccataagctcattatgaaccaatcaa

SEQ ID NO: 24182 - DNA, 5378 bp, Cannabis sativa
  modified_base (44)..(78): a, c, t, g, unknown or other
gaaccatgcaacattaaatgttagttctgatctatattaataannnnnnnnnnnnnnnnnnnnnnnnnnnnnnnnnnnggcataaaacccaacagttttcacttaaaagtaagttacatttattgaaagctattacatgatttacacagatcttagcttattgaaatagaaaaaacttctaaacggtatatttcgtctaaaagacattactaaagggcaatgattgttaagatagacaacactttgggagtggtcattcagaccttagtattaacacctttatcatcctttgattggtaaccgttcagaagtacaccacttaatagcgatatttgagcactatgcaattatgtggtcttcaaacccttgcatttattagtaatattttcttagatgttcgtcattccaatacagtgatactagaattagcttcatgttctcatcataccaacccaatttgtatgctcctgattttgtaattttagttacttggtatggcctttcccaattaggttcaatcacacctgctgcacttttttcagtgttaaggaacactcttctgagcaccatattccctacaaagaattttcttgcctttacatgtttatcgaagtaccaagctactttttgttgatgagcttgtaagtttgccaagtctctcctttattaaatttcatcaagtggctctgctaggaggacgtggttggtctcttgattgtacatcaatctcctataggacaaaggctctaattccacgggcaacattgcttcatagtcataagataccaaaaggagtttgcctggtggtcgtgcactcagtagttttgtatgaccaaagtacttcgggtaattcttcaggccaattttctttagcttcttcaagtcatttctttagagtgtcctttaatgtcttattgattacttcaacttgtccgtttgcttgggagtgtgtgattatcgagaagctctttataatcccatgtgccacgcagaagttagtaaacatcaggctattaaatttctttccattatctgaaataatttttgaggaagtttataccaacatataatgtttttaccacaaaatccaaaactttattggaggtgatagttgacagtggttcggtttccgttcactaggtaaaatagtcaatacctataactatgcattgcactccaccctttcctttaggtaactgtttgattaggtttattccctatatggcgaagggccatagaccctacatctatatacattcattgggtggtgcctgagggaccttagagaatctctgacacttgtcgcatttcttcacttaagctcttgaatcttctatcatggttggccaaaaatattcttgtaggaggattttcttagacaaacttttccctcagcatgattaccatagaacccttcatggaccttagtcaagagccgtacaacttcttcatttgtaacacatctgtacatcacactgtccactattaaacatcttgtagctttcctcatcatctttcatttctgtcgatttgaagttcaccagtgttaaggtaggatgttattggtgtcatccaacatttcaatttcttctatgcagatgatactgggttctttcatgaactgaattgggaccaagtttgctttatcagtgactgtgttgctcaccaaccatgcaagtgcattagtggtagcattctcttctctgggaattcttctgatggtatatcctttaaattgtgtgagaaagtcttgaattttacttagatacgccatcatcttttctccttgagccatatattctcccataatataatttatagccgataaggaatcactaaaaatctctaaatattcaacacttacctctcgtaaaaattttagttcggtgataagtgctttatattttgcttcattattggttgttatgaatccaaattagatttccccgtgcaaaggttgtcctcaggtgtgataagagcaatccctacactagacagttaatcagtggatgatccgtccacgtgtaacttccaaattagtctgatggaaatgtcttcttctgctggggaatctttttcttatgccctttttggctcgacattgttttctgaatattttatttccttgcccgtgcattcagctatgaagtctaccaaggcttgaccttttattgctgtgcggggctggaaggtaattttgtattatcctagctcagttgcccatttaagtagccggtaagaagcatctggattttgtaagacttggcgtaagggttggtcagtatacacccagatgagatgagcttggaagtacgaccttagtttccttgaggccatgagcaagcaataggttacttttttaatcagggggtatcaacttttagcatcaattaaccctttgctaacatagtagaccagatgttaggtgttattttcttctttgacaagtacaacaattattgcaaatttggttactgcaaggtagattcctagttcttctccgtttaggggtttggataaaataggcggctgtgcgagttgcttttttagctcctgcaatgctttttcacactcctcagtccattcaaatttcttacttccttggaggatgttaaagaaaggaacacatttatctgctaactttgacacgaacttgcttagtgcgactatccgactaatatgactctgaacttccttgacttttgttggtgacttcatatccagaagggcttgaatcttccttggattggcttccattcctcgagcattaataataaatctgagaaacttagccgagctgacctcaaaggaatactttaaaaggattgagtttcatgttaaattttttgaggattttaaatcattcgtctaggtcctctatatgccccttgcctttttggatttgacgagcatgtcttccccatatacttccatattatgtatgatttggtctttgaacatcctgactagcctttagtaggtagccccaataatctttagtccaaatgacataactttatagtagtacaagccaacatatgttcagaagctaatgtgttcctggttaggtggatgcattctttttttattataccccaaataggcgtccatgaagcttaggatctcatgacctactgtagtatccaccagctggtcgattcttaaaagtggataatagtccttcagacacgccttattaaggtcggtgaaatcaatgcacactcactatttgttgttcggcttgggaactagtacaagtttggctacccaagctgggtagaaggcatcaattatgaatttgtttgcacttagcatgtttacctctttttttaatgcttatgcatgctctttatctagtagtctccttttctattggacgggacaaaaattgggatcgatattgagggcgtgagaaatgaatgttcgatcaatcccaaccatgtcttcatgtaactgggaaaaaatgttaagattgctcttagaaattttatcaaagctgattttattttgagtaataaacctttgccgatttttagtgtcttggtgataggatcaatttcaacttcttccaaatctttgatcgacccaacatttgtacttggttccccaaggcagggatccatgtcttcgtccccaccttgggcggatccctatttggcaatacctttacctttctttgaactttggctgaatgtttcttctttttgggcttggtaagcaagattgataacattcccatgcagtcctttgaatgcttctcaaacaacctactccattcctcattggaaatttcacacataagtgatatataaaagtaacttccttcaagtcatatagggttggatgacctagcatgacattaaaagcataaggaccatcaattaccaagaattgggccatagcagtcatggttgtcagagcttttcctattgtgagtggtaaacgagtatatccaagtggagcaatgctctggccgaagaattcgtacactagctctgtacaaggaaataaatctcttagttaaaggcccatcttctcatatatagttttgaaaagaatagttgaagaggttccattgtcaatcatggtctgagccacagtcttattcataatttgtacatcaacaattaaaggatcattgtgcggataaataatgtggttggaatcttcttcactaaagaatatgacttgttcttccttacgcgactatttagactttttttcttccacgaccagtatttcatctttctgctcgtactgtagggtccgatcatacctctctctagctttgttcgagtctccagtaatatgagggcctccaataatcacttgtagatgcatgtccacaggtggggacatcaactggttctgattattatctgattgagcgaccctttaatcctggtcgaccttaatgtacttttgtaagtgcggattgtttttcctgatgaggaatttgatttcttattttagattattgcactcattagtatcatgactatagttttcatggaaatgatagtatttggtggtatccctcttgctcatatcctccttcaacagaggaggtcttttgtacgacaccacagattgggttgtcatagagatagtttctatctcttcagtaaggatagtaaaggcagtgaactttgaggctttctttgaggatgttgttattcagagttattgctaaaatttcctttgtttccatttccttgttggtagccattatttgaccttttactaccttgacccaagctgctattattatgatgcgagttttgagtctggacagatgtattggtagcagtggtgtgactttgatttgttttttttttaccaactgtgtctacttgccgatctgcttcttcaagcttaataaatctattttctcggtctagaaactctcccattgaccctacaataagtcttttgatgtctttccataccaaaaattcaattccttctaggatagcaaccagttttccctcttcggttaaccctttcacttttgtgccttcaatcataaacctactgatgtagtctcttaaaggctcccttggtatttatttaacttcgactaggtattctatgtgagttgagagttgcctagaagaggagaactgcacgtgaaactccaacatataagagttccatgaactgaattttcctaaagctaacttgaaataccactgttgggcggcctctgccaaggtagctggaaagattctataccgtacatcaccttttaccgcttgaaagtccatttacattttaaagtacttgatgtgggacaaaggatcttccttgcccatatacattttccatgtaggaatcttatgttgggaatattttgccaagatctagatttactaaca

SEQ ID NO: 24183 - DNA, 2097 bp, Cannabis sativa
  modified_base (52)..(53): a, c, t, g, unknown or other
aattccccctgaactattgtgattatcgaatttaaggacttttgtctaattnnattcaattttactaatttagtgattatttatgtactaaatcatgttcccggactttagtatctaccaaatcacacttctcaaagtttgacatgtaccaaatcatacaccttgaactttcatccatgttagatttttcttactaaaattggataaaaaattttaaatctatcaatctcaatagttcaagaaaaatttttaacgaccaaaaaagttcaagagacatgatttggtacatgttaaagtttaggggcaaaaattctcattagcctataatttgttctagcgagtaatgaaagataaattttttgcttatatttttacactataaaaaatatattaatatataaaatgtttaagttaaatttaatttttatttttattttttcagcagattaaattttgttgaatttaatgtactcatatttgataaaaaaaagaaaaaaaaaaggtacacggcgaaattttggaagtggaaaacagaatgcggcggggactacgttggtggatttaatattctaatcattaataatgttctggagtcgctaacaatgccatttagtcatacttatatactttccaaatgggcaaaaagtttggttgacgaaaaaaaaaataagtacgttatggatgatataagaatatgtatagacatatatttatgttgttcatttcgattattgttcttcttattttgaccgcacatcgttgagagcaacgtgagttggtgtggtattttaatttttattctgctaaatatttggatgcctaagtgcacacaatcaacacttgagccgacaattattattcgtataatgttagagatatattaatatttcacatcaacaaaacataaatcaaaatataacacaaggtaatataaccactacagcaattaccttaattagccgcggatcactccactgctaataaatctaattccaataggctattagcggcggtaatccgctatttataggaacataagctggtaattttttacattcaattcaaaatataaccgttaatgaaacgtgatcaattctcacatttcatttaaatcgtatgttggataatactagataactgcttaactagctattattcttatccttatagatgattaatactgatttggacaattgtatcttgcttatctccgagttgttatccttgtccattgtaatgtagaaaaaaacgctaagtgttagcagatgattcgcctcgtcaaatttccttaaaatagcgagttggttgtctcgctatttgtaatccaagattgcgttgcataactgtattcactcctttgaataaatgaattagcttcttgggcttgtgtactccgaagcaggtatgtgtctcgtcaatatagattttaatagtcttctattcttgtttcgcttaagactatatatagtgagtgagttatgaatattttatattaatcatttatttacgagttattcttttttcttcgtattaaatgatatatggttccatattccactgcaagacacggtgttatttttgaagtgaagccgaattttgggtataacaattgtcccttaaattttttttttaataaaaagtgtttttttaaatgattacaagggtatttttgtcttaattaatcacattttgaaaaattacatgcttcgagttttcgtggttgaagatttcgaggcatatcattagcattaaatgcccatctttctgattctctcttgttcccatctgttacatctttattctttcaatctaatggtgatcatccttaaagtataaaactcaagtgaaaacacttatttgaaacttcaagctttttttggaaaaaatcatcttcgcctatcaccttgcatgccctcattgtccttgacctattttctacgtattttctcaaatttaatttttaattttagaaattctttgagctcatcatcacgttcatcatgatcccaatcacgaagttatttactactaaaaaatcttcagaaaaacagtaagtggtttatttcttattctatcttattccctttttcctaaatt

SEQ ID NO: 24184 - DNA, 3914 bp, Cannabis sativa
tttattttttatataattattattaattttattattggttgatcaaaattcaaaagggaaagctgaaaggaaaaagaagaaccattttaccagctggttcaaaatcccatcaaatctctttccctttttccctcagattcaggaggttctgcaattttcttatttattttttatatatatattttgttcttctcctttcaaagatcagggttcaattaagcttaagctcgtcgttacttttcggatcatatacccatttttgtttttttggggttttgttcttattaattagggtttttcagattttttgttttctgaaagtttttgtattcataattgcatctttataaattcccaattggataaacatggaaaatttttgtcttttttaagttcttgttgagatttttctttttggttaaattaatggcagtgatttttttcgagctataagatctctcttcaatttattgcctttatgtaatgatacttggaattagcaagtaattattatttgtttaaagagttaaattgagcttgtgaatgggtaaacacccacctcaaattgtgtctatattcatgctagtgatgttggatcttggatcactgtattgggttttaagtataacaatataaatctaattactcatcaaaccaaaaatcaaatgaaaatactaattagttcaatttaatattggattgcattagattttcgaacaccccatctaacaagttcgggtccgatcataattggattggatcgatttatgcatacctttagatcttagtgtgttattgtaaatttgattatatctcccaatatatttctcaatcacttgtgagaaggaaagaaagaaccatgattgaatgtacataggcatctgcttagactgtacatctttgtttaggtggacaatgaattgagtttgtgaagcttaagttattggcacatttttaagttatgctttttcttatttgagtgtttgatcaattgctttttaccagacatagtatgcttctatggcaagttggaatcttattgaatgttatgcttacttgaattagtctttctatatattctaaagatgaaatccctaatgttgtttttgccgttgtggttatattgtatcatatgctaacacatattatgttcctttctttattcaactttgtgcaggggatggcaactggggaacatgctgaatcatcgaagttaaaggctcagctatgcgaaacacctgaaattcggaagcaggaaatggaagaacaagaatcccaagtggatttgctgcagtcgaaattcatggaggtgaaagcatacatgaaagagtctgaagaagagtcaatgaaagagttggatgttctttggcatagagttaaaacaacgacgacattgttaacttacttgaaatataaagcaaggcttatggctgttccccatttagcccgaacctattgtggtattgaacaattagaaggggtaggactagttgataaaaatggtacacctttgtcagattggtctaaagacattgatgcttcttcgttcgatagtttagatgatgagacttgtaccgaaataggtcagtttcacggttctctggatgtccaagatgaagcttatattagcgacacggttaaatcagtgaagatggttgcaaaggtgatggaacacctcgttgagagagtgttattggcggaatctgaaactgcaattgagaaggaaaaggttaactcgggtcaggaagaaatcatgagaaagtctgttcaaattgagaaaatgtcattgaagttagaggagatggaaatgtttgctcttggtacaaatagtattctaaatgaaatgaggcagagtatagatgatttggttgaagaaaccactagacagaggcaacgagcttcagaaaacgaacaggaacttagtcgtgtgaagcgagaattcgaatctctaaaatcatatgttagcactctcactactgtaagagaaacactcctttcatcagagaagcagtttcaaacaattgagaagctatttgaacggtcagtatgtttgcttttcaattccattcattgaatgatctgatcaatacattgtccttttgattgaattggttataattatactatttgtactttcatgctggcaatgctgcatatatgtttacattgatctattttttgatacactattattccaattcacttcttgaaagaattagagaaaacaacaaggttctaaactctttgaggcagtttggtatctaccagaaagtattttacttacacacaaattaaaaaccaattacagtattctaactaacacacacacacaacaatcagccctataggaactaaactgaaataactaacttgtgacttgttcatacaccttagcctaagcatatatttgaagcctaacatttttgttgcattgtgtttcttaatataaacttatccaaccttgttaatttacattccattagttttcctattgtttattttcttttgtacccaagatttatcttttttctgatgttggtttcgaaacagattagtggtgaaaacaacacagttagagggtgagaaaatgcagaaagaggtagaagttcagaagcttatggaagagaatgataaactaacaactcttcttgataagaaagaggcccaacttctggcaatgaatgaacagtgtaaggtgatggccttgagcgcttcgaacatctaatttcgacagtcttgttcttgtttttgttcgtctacctctggtacgaccgagtgattctcttttacaagatcattggatacaacaaagtcagacaagcttatgttcaggctaagctacatccttttttgttgttcctttgttcttcagattgtttgtgaatatgatcatgtattgattatctagtggtacagtatgataatgattatgtattgattatcaatttgaacttcaccaattaccaaatgcttgttcatttatttcactagtatataatgcacttcctttcaaaaaaaaaaaagtaagaatgcacttgtcacacattaaacaaaaatgatacaatgaaaaatatttagagtagaaaaaacaaaaaaaattagacacaaaagcaaagaaaataaatgataatactattttggtctcttcaaaaagagaattgctaaagatactaatagtgtctagtattcttttcggtgtcattctgttattattggtgtgattaaatattgaatctaatataacttaaaaaaataatttttaaagaatatcgttaattaattataagataccacactactactataaatatcactattaaatttaaacaaaagcatttaattaggcctacatttaataacaagctttctatcactgttaatacttaataatacaacctactactctgcatttcaatagaataattattgctataatgtcctttcattcttcttttctttttcttttttttttgaaaaggggtcctttcactctttaaaatttgcaaacaaactacttttcattgtgtattataaaccaaattaagataccatatccaattccactgcatttccatttacggaatgtttggtttataagaatgagaattgtaattataattaacatttccattattttatttgtttttttttaacttctgtgatctattacattatataaataaggtaatacttgttaaaaaaaaattaatgtgatggtcactacaattacactttattataaaattaatataatattataataaaagaatcttgctcttagtattttgatacataataagtccacctcaccaaacatagtattactttgataaaaaaaaaagggattattttacaaaaacataaaaacaacaaaaaaaaatttcaaaaatatggtttcacggaattttaaatat

SEQ ID NO: 24185 - DNA, 1172 bp, Cannabis sativa
taattattaaattaaattatgtgaaacccgatacttaattatactaataatgatataacatatttaagtgatgctagccactatcagtgccttttggtgtttttattttactttggttaattggaatttttgtgtaaatatcatattaagaatatattaaaatatttatttaattagtaaagtgaaaaatttaattaacttttactttttacaaaagttaactaaattccgctctaagattaaaataaaagaaacattgtatttaaataataggaaaatataaattaatttaacaataatattaaaatatactaaaaaatatatgaaaccatttaaaatctaatttcatggggtatctctaggcccgaccatcgctaaggcgggttaggctcatgcttagagcccactcaaactcagagtccaaaatttttatgtagtatatttttttgtattggaaaaaatagtatttttgaaaaattttgtaaaaagaagcccaataatactcacgtttcactttagataaaacacacacttaaaaatttcttaggcccattattacttaaggtcagccttgggtgtctcgatctcctacattcaaaatttgagatctgcaagtagggctaaacatttagtcgagtgtgtaaggtttcaggcgtattggatttgttgggattttataccccaaataaaaatttaatttcaatattaatcttatttacttattaataaatgatcagagatcattttttcactattatctattgtttggtttacatgttcatatagtgattaatgcacatggtccccacattacttcgaatatatcatcttgatgactcaatccattgaaattcgaaaattgactatgtctaatttgagaattttcactaaggttaggcaaaattgagaagagaggataaattagattttatttgttaattataacactttatgggtcaaattgataattattaaattaaaattaatatttaaatagtttagattataaagtaatagtaaaattggaaaaatataaaattattttaatcaatgtttgattgaaataaaatgataaaaaatcaaactatgggtctccatagtgatttcaatcataaggagtttttccagcttatttatcttttgtttggtccatttattctaaacataaacct

SEQ ID NO: 24186 - DNA, 4038 bp, Cannabis sativa
  modified_base (2835)..(2840): a, c, t, g, unknown or other
  modified_base (2868)..(2872): a, c, t, g, unknown or other
gagttcgtgtctcagttttgaatccgggtctagggttcagtccgggttccgagtctacgtccaggtcacgagttctgggggtccgagtccgtgtcccgatatttcgggtcccaggtctaggtctcggttcctgggttcggtgagggtcctagaatagaaccgagacccgaatcctgagtacgggtcctgggtctgggtttgggtccatggttcgggtttgtgttccgagtcttgggttcgagtcttaggtctcaagtctgagtctcgagtttgggtctgggtctaggtcctgggctagggtcttaagtctcgagtcacagtccaggtctggatcctaggtcctgtttctgagtcagggtttgagtttaggtccgggtctggtccgggttctggctttgggttcgagtctggtcccaagttcaggtctcgggtttgggtcccgggtccggtccaactcttgggtcttgggttcggggtccgggtcctggtcccaagtctcgtgttcgagtctgggtacgggtctggtccttgctccgggttttggtccgggtcccgggactgtgttcgggtttgtgtcttcggtctcgatttgactcccaggtctaggtccgagtcctaagtctgagtctcgagtaaggtttgggtccggattgagtctcgagtcttggtccaggtttgggtcccgagtcttaggttcaagttcgggtctagatccaaggctgagttcgggtttgggtcgagtcccaagttcgggttcgggtcttggaatttgggttcggtcctgggtcctggtcccaagttagggacccaaatctggtcgtgagtttaggtttgggtctaggtccgagtgtccgagttcgggtctagtctcgagttcgggtctgtgtcctggaacctaggttcgagtctaggtcctgtcttgggttcaggtcaagatcctggttcaggctcaaatctcgggcttgggtctggtctcgagtctgagtttggatcccgcgcggatatagtgtaggtctgggatccgagtcttgcattaagtgttttttcttagtatattgaaatcggatcggatcatatccgatttggaaaaaattaggcagggtggagcggatctgatttgatatctaattagtatctgaatgtttcagatcagtaaatgatccatcggatcgtagctctaatgtgctctaactaaatggatctttttgacatgcctacatgagaatcgttaattgattttaaattttaaaaaataaataaactcattttaaaactaaaaaaaatcatagtttttaaatttctttatatattttcttaaataaagttagactaaacaagtttttttagttttaaaaaagaattttcatttttataatttttaaagtataaatttgcaaaattataatttttctcaaaaaagtatttatacaaattttttagaaaaaagttttaaaaaaaaataaaaaacaacataagtcaccctcatattaactagttaaactctggttaccataaaggtacttagttacccttacttgattttcttatatttttcaacttattcttcaatttttctataaagtaatttttttggaaaaagaaaaactatacaaaaaaaaaatataaaaacccattatttatttatttaggtttttttcttcagaaaaaaattgtactttacaattatgtatagtggtttaagcccatatatgtataaatatacacttcattattataatatgacaatattaactagaccacatatctagctatatcccatcaacacaacagcgccaatcaatggcaacaagtactacaacatcactactagcatttcccatcctttgttcaataatctcgatactcctcactcaacaagccacagctcagagcacaatttgtgttgatgacaaaggtaacttcactctcaatactacctaccataacaacctcaattacctcctctcaacacttgccaccccacaaaacaacaacaattacggcttttacaatctctcctacggcaactcatccaaccaagtttacgcaatcgcactatgccgcggtgacacaaccccgggcatctgccgaagctgtcttcgcgactctactagtgtcctcccaaagcgctgcccaaatcgaaaggaggcactcttatggtacgacttttgtatgctgcgctatgctaaccgccccttgtttggcctaatggaaactaggccaaacgtagtttatcacaacactgaaaatgttccttctgatattgtagaggaatatttcagagttattaggagattattagatgatcttaaaagaagtgctggtggtggtggtgatggtggttctcttagaaaatttgctgcagcaaatgctacagctccaagatttagaaccatatatggacttgtggagtgtacacctgacctgtctaaggaggattgtgattattgtttggaagatgcatttgggtatattccgggttgttgtgatggtaaaataggaggacaattacttggacccagttgtaaatttagatatgaggaatacctcttctataattctacaactcatgctcacaatatataatttagatatgtttttgttctatttgttgtgtttcttggtctgataatcatcttcatatccacttgtttgtttaagattatttgatcagatcaattagactttttatcttcatttttttgaaagctattccatttttttatctttcgtcaacgtcaaaataatcttttaatttagtatttgattttacaaagtcttgttcagccatgaatatgagcattgcaattaggtgcctagcaccttctcgacatnnnnnnttacgattgactagcgatactccctaannnnnattatattaaactatatgagacccaataattagttagaccaatagcgatattgacaagtaggaatgtgctagtcactattggtgccctttagcatttctccatgaatatcgatcaatacgatctattttctcagtcaacccataagttattgtcattttttgagagtttgtcttttccttttagtgagactgtttattgatcggtaattatttatttgtaaaatgtacctaacatatatgacctttctttctcatccgacccacaagatcttttttttttgttaaataaatattgatgagttttatgtcttgttttaatgggtaaatgtaagaatattattgtggactaatataattatagataattctataaccataattattaactataagtctaatatttgtcaataattataatgagatgatttacaataattaattgtattaaagaaacatgagaacactcttgtgactaaattggccattaaattatagtctaccattaattaaactatataagccctattagctcactcattaggattagaagggtgtgatatatatttgatataagagggtttaactaatagtaatgaaattgacataagggaattgctccacattggcctctcttcaagatttaccattgaactttttttctttttttggcattcatcacattgaaaagattagaagtatcaaatggctcatatggacaacatcccttaggaggcatgttttattgctcatctatgccctaaataaaatattagatcttcgttgatatttatgagcattgttgatgatagtaaattaatgatgttgtgtttaatgctcatatcttgttatatactttaacaattgttattaagagctagtaaatttgattttaggaattaaggacagtttggcacagttgtgctgtgagaaaaagcagctgtagatgtgctgtgagaaaaaacagctgtagttatgctgtgaaaaaaaaaaaactgctgagtgtttggtaaatatgattttaaaatagttgtgagttgaaaaaattgtatataagtattttataagctagatgattgaatatctattaaatatacaattaccaaaataagtatgatatttgttatttaatttatttaaataaattcatacatattaatatatttata

SEQ ID NO: 24187 - DNA, 1944 bp, Cannabis sativa
atatataaatatgtgtagaagatatttccaaggcgtaacaaatagagttagtgcttgtgtttgcattccactaatagaattataacacaattaatatattaccctttttgggttgtgcttatctctatttcatatttttatataaacctaatttccctctattttaatgaaacagggggctgcattcatttaggtttaagctaattattaattagtagtaaccaaaaaggagaggtcttttatatccaccaaaaaaaaaaaaaaaagaagaagagatcttcaattttagagaaattatttttttttaatttacggtttgaattgttttagtgattatttttatagtatctatataagttgctatgtgtaaattttagttgcgatttaaattgatcaattacttattatgtgggttgttatatgtgtttttagtaaaaatataaaaaataattattttgaagtctaaaacttcttaattttatatatataattaataattggggaatgtatatgtatgtaattattttcaataacgttattcctagcttttataaattcattaatacaaaggtacaattattactactttaatgggtgcatgttataacaactatatatagttattataatgttgtatatctagttagggttgtgttgattggttggagatataaatggcttgtttttttggtaacttttttaaaataactaattgctgtaaaaagaagtagtaatattgaagtactatgcttggtattattatcaataatacaatttgatattaaatttctctacatattttaatttaatatttattataaaaatattattaattatatataatgtgtgttctaattaatatcactaaaaatattagatcatgcgcctaattatgactttgtcaagcttaaaccaaaattagtttaagaaaataaataatcaatcgaatttgacatgaaagatttgattgattgactgattgtataaccgtctcatgcggagtggattgattatatatatatatatataaatgagaattaatatataacttgatttgctattttttttttttttttatataaataatctaagacaaaatatatattggctaattaatattattcttagtatgatgtaattttaattaaatagaaatatgtttgattacacatgatgatcgagtggatggccatggcccccactacacaaaagaacaaaaaaagaaaagtttaagcattcaatatattatgcaaaagattaaaataaacttaattatatatataaaacaaaatcagtttttaattttaataacaaaattattatttagtacgtactaagtttatttaaataattaaaaattaaaaatcattcagttcatttattgagatgtaataataattaataagttgttaccattaatttattaattacttgaataattaagttgttaccattaagttcatttaatgtactttactcatgaataagtgttattagaaaaataaaaaataaataaatcttttttttacagtatatggcagagaagaattaaaaaaaatatttaactaaaaaagaaaaaagaaatcgaatttatgttatatatttttctataaactattttgatatatcgttaaaagagattttcgtacatatttttttttaattatataattaaattaagtatgaaaattaatttttttttcatcattatttttaaaattgatatttatatttattaattgtttttagtaaccatatattgagtatactcatcttccaaataatatatatactagatatttccattatatattaatgtatatattctcactaaatgcatgactacatcgcatataaattatgtatggattggtatctttatatattaaaagtgtttatttaacggcatttctcggtatttcttggtttaacagaatatacctt

SEQ ID NO: 24188 - DNA, 1746 bp, Cannabis sativa
ttaatgtaaaatatatatttataattataattataatttatgttttatgttattttttttttattttaaattacattaccggcggggtacccgtcgctattaatgtgtcagatatttaatttgacgcattaaataccggcggagctcaccgctaatggtccgccggtattaattattaatagcggcagatgtgtcaatctgccgttattaatgattaatagagaccgggtattaccggtggggcaataccggcagaaccccgccggtcatagcaaataccgactgatttgggttttaataccggtggactcttctccccctaattattggtattgttgtagtgacaatagagaacgggtcaaagaagagtagcagaaaggtgccactaatgataaaaagtcttgggagaagatggagaaaacgagcagcgagagtgagaatcgccacgttccgaagggaagtgggctgatcacttctgatgctttctaatcattcttcttttaattcaaaggacctttggggaattttctcaatggcaatgtggagagattaaaacagagtaacgatatatcatttaaattagtataattagagataattacacagttgataagtttatctaacaaaacggatatataagtacaataatgaataagtaatactttggtgtaattaaatttatatataaaaagaaagggaaaacacgtatgaattatttgtcaaaaagtttatacatatttattaatttatgtctaacaatgatttataacttggctgcatgcagcaaaaataaatgatacaaatcactttatcgaaccatatatatggtgattgaggcaaaaacagataaaatgaaaaattacgctgtttgattcgcgcaagaatacataattaattaataaagaaattaagcattaactgttgattattattggatggaaggcatgcatagaaaatgaatgagttaatttaattaatggctgcaagctgaggggttcatgtagccggagacgctgggtttgacattcttacaaactgaggtaagtttgccatctttgccattgtatttgagatcaatgccggagagcttgacatctttgcatccatatccaccgcaaacaagcttgataccaacaggagtggaacaagttcccttaatgttcttgaagctgatatcactaagcttgattttggatggcttccccttaaactgagagcacacaccccatgggcaatattcctggtcaatactaattggagtctcaacattgtccatgatgagatccgaaaaatgcatgtctcttgcaataccttcacgagaagcttgccatgtcttgatcctaactccatttgaggtacccttgaatgtgcagttcttcacgattataccttctactggttgttcattctcgtactttccaagacttccgatgctgattccgtggccaggtccgcatacaacttttgttatttctaagtctctggttccgtccccaattgagatacagtcatctccaattataaatcctatataatctcattttaaaaataatcaaaatattattttttttctctaaataagagccaaaataatggagacgcgagttcgtggctggtgggtggtcgatggtggggctgctgcgtctggtcggagcggtgaccaccgtcggttccactccgatggtggatgggggtggctgggttcgcgttggtgggtgtgggttcgtgtgggtggggtgtgggttc

SEQ ID NO: 24189 - DNA, 2277 bp, Cannabis sativa
ataaatcattaaaaataaatttaatttcaaatactaataaatgattttcataattaaaccctaattatctgctaatttcaaaattaagactaggcgctctttacattctaagatcatcaaatttgttctaacgcataataaatctagagcgcttaacatcaaaagttctttcatattgagtttgaaagatttgccaagaatctttagtagatttacaagaagatataagcataataaaacattcacctactccattaattatagcatgtaaagctttactattacaagctgataacttatcatctttaataggccattcaagttaaggtttttactttgaattgcttttggaatctaccacaacatgatgagaccatcctgaaagaatgattctccaaactttttcatctcgtgacttgataaatacccttattctaaccttccaataaggaagtggtggatgagaaatggaacttccttcagcaaaaaacgatgtattgcacatattatacaagaaaacattaaaggatcacactaagagtttagtgtccaactctgataccaaatgaaaaatcatatttttgtaaatgccaaaatattaattaaattccagtaattaaaaacacagatgttacgatctgtaataacaacatagaaacttgttgctggagaacacagatttgtagtagcagaacataattaacattacagaatataaaaacttgacacaagagaattatatgtggcatcagtgttctttcacactgttttattatacggggtcatgcccagagaatgaaattgattactaaagtatcaaatattacaaaagcaattaatttaaacaaatttaggctcactctaataattttttacaacccgttataattcaccttgcttatctgattttgaacaacaccaagtagtgaactccctttagctattgatgtgtgcttactttctcctgaagttaggcttaaaaaaatcttctcacgaagatccacgcttgttcaaagcttctctttaatctattctatgaatagtatgagatcataataagaaaactaaaacttagttgaacactctaggtttttacaaatgaaatacttctcacaaagatagatttgaaaaatatacgatgctagaagatccacccacacgtggatgagccaaacggcccatggatggcctcttcccttctcttttgtctctacacaataccgataccaccatgtaagttttctctgctctctctttcttttggtctcatgggtgaaacatttttttgtacagatttttgatttggggacgaagacgaagaggactaccattttctatttttgggtttttatttaatgatggtacttgttgtgttttgtatttggatctgttttaaattttccttgtatgtttatttgtgtatatcttagtatttgtaaatttctattttagatttgtaaaattaaaatgaacattaaaatcttggtattgttttagatttgggtgtgatatcaggatttctttttttttttatttggttttttgttgtgtcggtacaaaaccgacgagaatgttgtaaaaaaatttctgtactctattagcgactgttttcaaccgtcgctaatttttggtaccgactgttaaaaactcaaaataatgtagtttttgcgtctacggtatatacgttggttttaacaatcgatgctaaaagaatatatgtcagttgcaaaccgacaaaaacaccatattttgtagtggtgattatttgatatgcaataaacatgtcaaaatcaaatttaacaattagaataaagagagagtcaatttttcaaaaaaaaaaaaaaaataagtaacttttcataaagaaaattcattctcttgtaagacaagtttctaaaattaaaaataacagttgaaaataaaattttcttaaaaggaaaaaaataagaaaaatcacaaattaacacaagaaaattattttaattacctaataaattaaattgttagacgtaacaaaatctttaacttatttgcgttgatgatgaccatattaaaaggcatccccttagtattctttttctctttagcttttcttcattgatcgagtttagcggtttaaggtatgaacgaagccaaatattccccttcaaaagataaataaatagctgcacatgctgaaattctcttaaagtttaaatagaataatgagttatatgtacatttatattcgaaatacatacttaaataacatatatattatgatgtgtcataaatttt

SEQ ID NO: 24190 - DNA, 2042 bp, Cannabis sativa
  modified_base (122)..(144): a, c, t, g, unknown or other
tagtcacaaccgggtatttcgggccaaaccgggttcggggccgaaatacaatttggggattatttattggcattttaattaactatgattaatctgaaatttaattgggtatatttatgttnnnnnnnnnnnnnnnnnnnnnnnaagcttttatgtgttatttggccctatggggcattttggtaaattggccttttggattaattgcaacaaagcgaaattattttacattttagaaagaaaaattctgggctttttcctctgccctagccgaaccccctctccctctttttctccatatttccattttgctaagtgttggaaaattcatcttgaaaacttggatttttggttggttttgtgcttagcttggtttggagcttgaggtagttcttaacccatttatttgttgaatttcttgctgaaatttattgttcaaaatcatgaaaatagggtatgatgttcttggtatgcatgtatgatgatattggtgtaatctttacatcttatgcgtgattaagttagaaattgatgtaggatgcttgagtaatgttgttgggatgattttagggaattcataagtgtttttaatctgttatgcagctctaattttagtgttgtgtttgagtttatgttttgggatttgaagattcaaggtgtgagtttgaatatgttgatattgtgctcaagtttggagctttggttttaatgttgttgaatctgaatttctatacatgtggactgtgattttgagctttataatttgtggtttaactctctattgtggttgtttaattttgtaagaggttatagtagtcagatcgtttgagcatcaacgggacaagggatgcaatgaaagaactctgaattatcaaacaatcaaggtgttaacaaagtgtcgtcgtctgggtgttcctaacacgaaaggtctggcacagggaggtcctcccagggaagggtccccacaaggagatccttgcaggtcccttctcatagggttctctttccaaggaccttctagcagagggtccccacaagcccctccttgcagggggccttctcgcggtttttggaactccgccttcctccgacttcaagtggagaacctttctcgcgcagattctcccggtaccatcttcaaataaaataagagggaatctatatcataaatatttttttctttcaatcatgaatttcatcaacaatataccaagagaagaagaacaaaagttagataatgaaagagttgctatatcataactatattttcttccactgaacaatgtgtgattagttataacctctaaaatgtcgtatgctatttttattcaatattcaattttttcatatttattattttcatatgatcacattactctttttttttttcttcaaatatttaagcaaaaaaataacatgattaccttaaggaataataacatcaacactcattataaacacttgaattgtcctagataattatgtgtaaaagtgattaaaaacatagccataattaatcaaacagataatgaatgattaatattaaaatataaacttttcaaatgtttaaaaatggtgaaatttcaaaaattaaaaataaaaaaggttggtcccataccaatccaacgtcttctaggtttagtgccgttggactatggaatttcaaattttttgtttttagctttcggctgaaaaagctttcaaatttgcattattagccaaatttgtctatagttaaaaagttgaaaggtaagtggggtatttttcaatataaaatacatgtatgtgtgtaaaggtgagtttcaccgttgtatagatagagtgtaattttctatatttatagtatgaattataaaaaaaaaataaaaaaataggggtttttaaattttaaattttgtacttttttattgtgagccgaattttttttcaaaaatactgtgtactgtgttgagttttacggttgtttcacagttatttttcagttgttccactgttgtttttattgttccgatttattgttctacggttgttttagagaaaag

SEQ ID NO: 24191 - DNA, 3008 bp, Cannabis sativa
tataaaaactcattaaaacaacaaacataagtgaaatagtacgtatggtaaatggagttaataaatacaaaattagtaatcttaaaataagtggttaagtgtcattattttaaaaaacagttaagtgtaattattaatatgcattaccgcaggcatttcatgaaaactgaaatatctcattaatgtaatcaataaaaagcctaaagcatgaagttattttaattatagtagttatgattttaaaatttaaatatatacatatatcatatcggggcgggtatctattctcctgcccctgccccgatcccgactcgagtatgaacatttaaacctatacccaccctgcccccaaaattcgactcctgtccccaccccattaagggcgggtacccgaacctgcaagtaaaattgtgatcccaatcaaaagctcccctctctccttcaaaattagggtttaaatactctattgggcctaatccacttagcaggcagcaatattgctcagtgaatgttgcagcccgtgtcttccaagtccacaatccttcgccatttttaatgtagtgggccgcgacattacttagtgaatgttgcggcccaagtaggcattttttgggcaggaaaggctcttcgcaccatgcctcaacatcggttccccaatgttaaggcatgtctatttttttttattctcaaccattctgtccattttttccacaacaacttcctgacattgaagtccaatactagggcgctactccaacatcttcagatcttcgactttaagggccttgattgcactgaatattctaaattgttccatgaactattcatttggcgtactagcaacaaaacttcaattaaatcttgttatccatattaacaaactaaagcataaaatagaacaaaacaaaattaagactaattaaaatactccgaaaacatactcaaaaaatagtaaaatctagaacctaacacaattatgcttttaaagtcgtaaaagtttcgcaactacattaagtttagtcaaactaagttctccaacttctactatttttcaccaaaatatgttaaattccttccaaatgattccaaatgtatgattatccttcataaaagtcctaacaagtaaaaatcatactaatcaatcatttaaataattaatttaaaaatattaatacataaattatctatatttataagataaattatcaaagtgtatgaaattaaaaatataaaaaaaattcgtgcagcaaatattccaaaaaataaataaaattatgcaaaggatacaattttgtaaatattttttgcatacttattttaataaaatattttttattttctagttaaatttagcacctattaattttagtacattttttaaaacaatattggaatagtaatttttattaagtgtgctaaaatataataatatattacttttttgatattttcattggacatgcaggatttttaaagctaaatttagaattaacattctctcaccaaattatttattgggtgtttgaaaatataaaagttgccaaacatacatcttaaattatttagatctttttataaattcataaaaaaaaaattaatgtaattataataataccatcgcatatttttttaagaaaaatttctagttatatcttgttttttttttttttttgaaaaattagttatatcttattagaacttataagttattcatgtgtataaaaatacaaagtttatcaccatacaaagaaaaaaaaatagttagcatgactatttacctaattcacaaatcacaatcagtatctatatatctatataaaataaagccaaaaaaaaatccagtggcttttttttatttttatttttacctatttgtgaaattttttcaaatttatagtgtgaaaaaaaatcccacatagtttatgagctattttgaattctaagagatatatttatatttatcaaataaaaattattatttattcatgaaattataaaaatggttataagaaaatatataattaatgaacataccttaatagtagaacatttgataattcttaacttgctctgaaccactccaattaatatttattaaataactcttttttatatttatattattgcatcacattaacaacttgttggatcaaacatgtttttttattattatttatttaagagagtttcctaatttttagaaaaataattattcacgaacttctctaaaaaaaacacggtaagttatggaagtagtgcataagatcttggaatcaaatcttaacttaactcaaaatatatatatataatagactttcatcaaaaataatactagaataaactaggcagtcttgtaatcaaatcttaccatgtataattcaaatatatataatacacttccataaaaaaaaagagaaaaaaaaatgaaaaaaaagctccttataatatcacaattaatataattacgtaataatttttttgttatgataaacagtattagttaaggtttctctaaatatttcctatgtttactattttttgttcctaaattcttaactgtcggagtttgtctcttttccttgacaaggtccgtcaacccttcctaagcttaggcatgacttagccagggtttgtaattttgctattgtgattaaatttttgctactacgattagtcttgtctttatgacatagttttgattgttttttttttttttaaattactacgattaatcttgtctcagtgacataattttattttgttttattgttagttcatcttttttgttgttcaatggctcgccatcaaattattgttagtagttaggaataacaagttttttgtggttgaagagattgttagtaatacagttacatacattgcacaataattaagtgctcatactaaggagttgaataaatctactacaataatttctattgtttgttatcttctaagcgatgaaactaaatgtaaatatttttaaaattaactgcaatctttttcat

SEQ ID NO: 24192 - DNA, 1386 bp, Cannabis sativa
taggtactctacaatagttatatatgttcggcaaaagtagactcactaaaaatttaatttacaaatgattcattttctttcttcttttaagtattcattttctttctgaataaagagtggtaggagtttaagaaattgactaatcttattcactatgaaggcaacatcaagtctttttaagcttagatattgtagagctcctatagtacttatgtacagtgttgaatctttaaagagatcaccctctctcaggctcagcttggttgtggaactattaggattatgacaaggtttagaaccatccatattgagtttgactagaatgtctattatgtacttagattgagaaagatacataccaaaattcattcttgacaatctcaacacctcaaatgtagtgtactctccctaggtcttttaaagaaaaagattgattcacatctgttacgtgcctgtttggaaatgagactctaatttggaccaatctctaatatgtcattaacatatactcgtaacacaatctggttagctcctgaagcatgaacaaagagaggtatcaactctagatgcttgaaaactctgttttagcttttcattctaggctcgaggagcctattttaatccatatatagccttgtgtaatagacacacatgatttagatattttatattttcaaaacgtggtggttgttgcatgtacacaacctcatttaaggtcccatttgaaaaagcattgaatcaagttgtgtaactctccaattattaaaaactgctaaggagagcatagtcctaactgttacaggtttggcacatgccatgcgcatcacaagcaggtttatttcttaccctggagagcaacaatgggaagctctaaaatggataatgaagtatgttaaaggaaccctcaacactgaaacagcttactgtgctagctgcaattcaaaagaggattacagggtatgtggacagtgactatgctggatgcatagacactataggagatcacttacaagttatgttttcacaaaggtgaatgcatagattgaaaattaactctgcaaaaaggtagtagctcagtactgaagtagagtatatggctaaaaggtagtacctctcaaaatgtaatatcgctattgatttaatataataatttttataaaatatcattaatcccaattgcaatgtgcaacctttaggtagtattggacaccactaatacttaataataattcatataagagaaatgctaaaaggcatcaatggtacttagtaccctcttcattgtcataccagcaggggcggagccagaattaaattcttggggaggccaattattaaaggataagtatcgacaaaaaaaattaacatttgtttagcaataaaagt

SEQ ID NO: 24193 - DNA, 3326 bp, Cannabis sativa
  modified_base (3257)..(3257): a, c, t, g, unknown or other
atcgcatactatgtcagtgtcacgttatgtcatatattatgtgaaattaattaatttatatttatatatatatgataagctattaaattaaaataactctaaccttacagtcaaagaaaatgagctttcattacatcattaattaaaataaattagttcaataaatacaactttcaaataaactatttttcataatgaaattgggcaattttttttttgttgaaaccgtcccatttgacttcttctatttggaagttgaaatgagttttcaaatcatgattaaagtctcaataaaacgactaaggaattctaggggcttgaattctcacattattaatgttatataatataatattctaatttctatcaaatttttgtttcaaaaaatttaacaacagaatacatatccagcaaaaattctgataaacgacagatttagtagcaaaacgacaataaatgaaaaacgacaacattaagtgtttcataataaatattaaagacactatatctatatacatggtatcactttacattttttttaattactagcgtcactggaaaaacgacatgaaatgaaaaaacgacaacaatgggtgtgtcgtatatatattggctagccttccaaaacgacaactttaggtgtttcataataaatattaaagatcaatgacaatatcaatatacatggtctctaatgatctcttaacatttttcaaattactagcttcactggaaaaacgacatgaaatgaaaaacgacatgaaatgaaaaacgacaacgatgggtgtgtcatatatatatatatattgactaaccttccaaaacgacaactttagtagtaaaatgacaaaaaataaaaaacgacaacattacgtgtatcatatatctagacaaagcttccaataaatattaagactatatatggcctcttatgactcacttttttaaaaacgacaatttaagtagcaaaacgacatcaaatgaaaaacgacaacgtgtatcatatctaagacatgacaaagctcctaatatttaatattaagacgacgactatataatatatatgcctctcatgactttcatttttagaaaacgacagcatcagtatcaaagcgacaaaaagaaaaagaaaaaggacaacattagacgaaaaaatgaaaaaagacaacattaggtatatcatatcatattatctagacaaagcttccaataaatattaagacaacgactatatatggcctcttatcacttttaaaacgacagtttcagtagcaaaacgacaacatgaggtgtatcatatcttcttggttaagcttccactaaatattaatacaatgacgacctccattttccaaaaacgacataaactgaaaaacgacaaaccttggcaacaaacaacaagtaatgaaaacgacaatgaatacttaaaaatggcattaatatgaagacaataccatctcgacaaaacgacaatatttttgcaaacgagcttatcttaaaaaacgacaataagtatcaacaaggacattagattaaaaaaacgacattatcatgataaatgaccattagtttctgaaacgacattatcattgaaaaatgaccctacattattaaaacgacatctagttcatgcgtatctcattctctcttttttatttttattttttcctttttttttattcataaaacaatcaaaatctatattaaaccattaacccttaacaatattctcaggaaaaatatcatatttgtctgtttacattaccagaaaaaaaaaactaaaaatttatatattataggtctgtaattttccagtgcatcatgaaggccaatgatcagtattattgatatataatataaaattaaaaaaaaattgttttatttactgggaaataaattctttgttttgtatgattactgttgtgttgataattgatatcagtaaatacgtatattttgggctgggttgggcccatttatcttttagtacataggtatattcattcaaaaaaaacgtacattttgggctagcttgggcccatttatctttcagtaaatacatatattcattcgaaaaaaaaaacgaatattttgggctaggttgggcccatttatcctcttttttgggcttcccccaattgtcaagtttgttacactatgttttggcccataatcacgtactttatatagggccattttctaactatgattatttgaccaaaaaatgatgggatttttacaaaactactagattttggataaaaatttacaattttattatcacgcgaatctttttacgaaatactatcttttataaaacaacagttaaaaaacaaaataaaataattaaaacaatagtggacaagtgaaagactatcatggaacaaccgtgaaaacttaacacaattaaaaaaattccgccccataataaaaaagtaaaaaaaggttagaaatttcaataatattaaaaaattctgccccatattaaatttatacaatgaatggcactaacaccaccaatacctttttaatgttactctataaatatttaatatgcttcaatcatctttaatttttatgcgagaataaattttcacacttcctactctcctaaaataaagtgtttattctgccactatttttaaccattaatattttagtgacaattttttttttactaaaattaaaattttttgtagtatcaaacttaaaattagttagctagtataattattattatttcaaaatgacacaatatagtccaaaaatggactcgattgttataacactaaaattttgtttgtattactcttttactcttattccatgaataaaaaatatttaagcacgaaattcatgttaatttatatgttgtttgttgaaaattttagcaataatgataatataataatataaggtgttttaaaataataaagagctagccaaaaaaaaaagctataagaaaatcaatagtgacttaagtagctttagagtatctcccatggtcaaaaaatcaaaatatatataaaatagggatattggcggctaaaccacctaaactttacgatttctaacacttaaccacaaaaactgaatttttggcggctaaactacctaaactctggttccgttttgctctgcacacctccgtccaaaaatcacagttaagtgccacagtggactgtccacgtgtacacacctgtacacgtggcaactttttaatggtccgcataacattaattttaaaaaataattanaaatatttaaaaaaaattaaaaatcagaataaaaaaaattcttttttacttttttttaatttaaaaaaa

SEQ ID NO: 24194 - DNA, 6942 bp, Cannabis sativa
  modified_base (6914)..(6914): a, c, t, g, unknown or other
tactctctttttatcctaaccttccatagttacacttatagcaaaaagaaaatatattatttaggaacttgattggttagaagccaaacttaccaaaaccttttgtagttaattttgaattgctatcggctctcgaaaacatataggtgccatagtgaaataattttaattaataaaagaataaataatcgcattaatattcaaaattttgagtttttaagttgcataagtatttaatgttataaaaagtataatttttgtctaattttcgtcagtacagactccgttagtgtcttaaatataatagatgtaagacccagattccaaattatttgatctgaacaaaattactaacaaatcttcttttaattaatttaaaactgagtttgtactaacaaaattgaacgaaattataattttactaatattgagtacttatgccataattttcccaatataaaattagccacttaatcatattatgaacaataaattaaaatatcttaattagtaggtcacaaatttagtaacatcatgaaatatagaattaaaagaaaaaagtatatcttgaagaaattctcttgtgaatcaatttttagtttttaatttattaatttatttgaataatatatttattatttaattaatgaaaaaaaatatgatgtcttgcacttgtttcatttgagaacttttatttttatccaaacaaataaccaaatactttttatatgatttttttatcaccattaatgtcatatcatggaggaagtaaggctatccaatattatgaatcttcctatccaaaatgagaaaatgaaatcgatacacactacctactttcataaatacatatatagacaagacatattttttataattttatttcttaatcttaaataaataagggtaaatattattttggaccttgtgttttgtaaaagttattaattggaccatctgttttgttaaatgacaaaatggactctgtattttccaaaatagtacaaataggaccctgaactgattttttgttaaaataaaatttaattattattttatctaaatatgttatgacaaaactgtttacattttctgtatctgttagtgttaggaattatcttcaagttggttatattaaaaaaaatcgaaaattaagcttagggtcatatttttactattttgaaaaatacaaggtccattttgtcatttaacaaaatagagggtccaatctataacttttgtaaaacacatggcctaaaatagtatttacccaataaataataatagaattgtggacctaattattatagtattattttatagatatataggtagggctcctgcataatgataaaaagtttagggtttggaagcttcaataattagatacacactagaatagttaaaatatcttcaagactattgaactatatatattggaaaaaaaataattatatgttaagttgggtcatattgaaaaagattattattaaagtatacaacttattatcattacactacatcaagattattaattatcaaagagttattattattattattattattattattatatggataataaaacttaatttgttgactcatacatataaaattatatctttaaaaattataaatcatgattataccaaacactaatctatatattaatataaaagaaagtttaaagtaagtgaggtgatattttatgattttttttacttattttctttatattgttagaattagtgaatttaatgtcattatatgattttttttttttttgacaaaaatttcacatggtttacaaataatgtggatattgtatttctaagtgataaataaagtagtcgtatattgattttgttttggtattagtgattgagaattttacccaattaattataattatattggatttattagtgtatatatattggaattaaaattgaatgtaaatagtatttatatataaatttagtaaattctaaatgtatattatttaaatttataaatttaatattatatagttagaaaatatatgatatatattgtaacaataatatatatttatttaaaataaaatatacatacttatcatgttattatttgttttatagattattatagatacatgcaaaataatttatagtacaatttagttcggtaaaaatatgtacaaactctaatttattaataaattcaagatgcatcagaaaattaaaaaatttctcaaaaaaaaaaaaaaaagacaattaaaatcgtatacataatattatttattataatcgcataaagatttattttatgtgctaataagataaaaaaatgaaaaaaaaaaattaattaaattatgatattctcatatttttaatatattaataagaaaatattgggaagtataaaaataataagtttatgaaactattttaggtagtgtctaatttcatataaatttataagtataatattataaaaaaaaattaataaataatatagaatgtataaatttataatattcttttatttaaatttataattaactaaatatataatatctagttatctcaaattctacacaaggtgacgtaacatctatttgagtgacatatggagagaatcctgcaacctagacagacaattccactcgtaatgagtcttgtagggagatttgatacttgaagtcataacagaagctgtaacatccgaccagcttccatcacgcaagcagctcgcatacaccgtctgaaggatgcaagttgggcaattttagagatatatctcatatatcttctaacttgcaagtcatggcaatatccctaaattcatgggatagattcacaataacaaagaagaaatgaaacctacctagtttcccatttggcttgttttaattatagaaagtaagtagtttctcattttatttcttattagttttgggaaaccaattggctgtaattcttccttataaatagtgtagtcatctcactatttagggacacaaaattcagacagattacacgataaattttagcaaagaattataaattcaagagtgaaacactcaaagatcattataagagctttcgacagagattaatcccttcttgcttctctactcacaagttaatacaaactaaaggggagtaggttattaccgttatcaaggggccaaacctctataataattctggtaatttctttacttattcttgttatttaattaatcttaatcattttaatttgactcactgttgttagttaaaagcgagatcaatattttggtgctttcattaagagcaaagaaacacaaatctttattttaagactttttaggacacaagatggatgtacaaacatagaggaaaaattagaccaaaactattgatatgatggcaacagatcctaatgtgcaaacacctgcaaattaaagagatcgagtcaggatagatcccgacccaactattcttcagccaccaacaagccctcaaacaacaaagcatagagtgaccacccctgtaacgtcctgtcctacaaggatgtcacgtgtgtacttttataaatttatttataatctaatttattaatttaagaaaagtacagtagaattaaaaacttttaattaaagataaaatataaccactgtcaagtacagggatcccctctgtaaaaattttacactatgtttcaaaatcagtattacaacatagggttacaattcaaaatacagccaaaagggtggatcctgtccactggaagccaaggcactgcagtcgatatgtacatcactgaaagacctctgactcatggttagtcgactttaccattccttacctgcagcacccgtgagtcacagagacttagtaagaaaagctattaaaattcaaacagtgttcaatacaaataatcacaacatgccataccacacaaatacattaattcaaagcataatcaagcattgcataaacagttatacgtcttataagacataccaattttgatgcctcttaaagcacccttaccacttgttatccacgagcaacatatgtcactatcgttgtctgataaagcaaataagtaagaaatctatctggggtttaaagtgagtaattattcataacggtaatgactgtatctatccctcgattataatcgagtcacaacattaataatcattacctcgatcataatcgaggaaccaacgattatagtcgtttcttatctaacatgcttggcaatacttttcttaccccagtctagtaatcaggtgtgcgtgccgacctgaatggaaataaagctcgacgatcccgggtcctatgtcacgacaacaaaatccagtgaataccttaaccaatttctcgacacaaaccttaataccaaaactggacaaaccctaccttccactagctccaaaataggttatacaacacctaaacaacctaaactaggtactggaaatcaccccgagctaaaagccaacctcgaagaaaattggaaatttcccctgcaaaccaactggttgaccggtttttctataccagaacccaccagtcgatcggttctggcaggtaagaaatcttgggttttcttcccccaaaaccgatccaaaacttcttcaaacctacctaattgctccagaacagtttaataacataaaaacaaggtattcaaatcatcaattcacaacaattcaacacaatacttaattcaccatgttagaactaaaaattaggttcttaaaccaaaatttctaactccaaaccatacagccatgaatttcaaccaattagaacctaaacaatccctaaatcagacctaaaaacataatctaaactcaatttagcacctcagacccgaaagcctaaaaccctaagcaaaactcaatctaagctacaaaaatcaagtagggaaggatagagaacttacctcacaacttagggaacttctatccttgatcaaacctgctaaaaactagttgaaatagaaggagaaaagtgtttgattcctgttgctcccaggacttcgaaggatagagggagaaagggaatgaactgtgctatttttcttaagtttaatctcttaattttcctaaataaataatatatctaatataagtaaattgataatcaaactatcattcagcccatactcactagaaaaatcataaaaaaaaacaaattagggtaaaatgactattttacccctccccttaaaacttaagatatggaataacctaggggcattttggttattttctaacttttttgattaacctacttctaaacattttaacctattccggtataattctaatacgacaacttaattatcgtgacacttccaaccactccgtcgagtttccaaagtcgccgaactcgaaaatattttatttcaaaagtagtatcaactatatctacataatccgataaaatcttcgtaatttataaattacgttttatttaatcatttattagatgtaccttaataatcacacaattagcttatgtaaaatcattatcttactccaatatcaatataatcacatatttaataaaatatacccaattagattttataatattttctgggatattacaacccctctagctgggttcattctaggtgtccaagaaactaaaaccaccaatttttggaccaaactattagggtttatgctcttaagatcctataaagatatttctgattattaataaaaagttgaacattttaatatatgcatgagtgtaccataaccttgtgtgtggtggatcaatttggaagactacgatgtgagtttctaatcaacccaaaaggattcaacttacgaaaagtttcaagaatatcttgatagtcatcaagaagtatattaacttttttcatgcattttatgttttgatttgatgtttacatctggagatctattgggctatggtacaattataattagatatatgaatttttctactacgtacctaatttagtaccataaaactaacagttccctactgtcctggggcttaggcttcctctggggaagcctattccgttgcatgtggtcagagtgtacccttttgggatcagggtttactttgtcctccctaggtacttcaatgggatttgccttagcattgggaggcactccagtagggtaccctatgaaactcggtacatgttctttctgttttttggttgtggtcaagaggggaaacctctggcattgttaggcaagtttcgaatggtggcagagtatatgtgaagcccggtgatggccaagacctgttttaaggcgacaagagcctcttgaattattttgttagcttcttgctactttgccaactcatcattgtgtttgtggcccactgtcatagggagatgagttttgaattgtcctacttgttctcttcttagccttcaagataactctctaccctgtaatcttggtcattgacatcgtctttttcagggtcaactcgagaagccacatcttcgtcacggtgtcctagaaggtcaggttgagaaggaggtttttgatttttcttaattatcaccatgacagcaagagaatcaactggtgaaagattcctacaactcttaatgaaagtaccaaaatattgactgaaatttttgacaactacttaaattaatgaatatttatactaatatattttagagagtgtgtttttacgtggttaggggcactaataagccttaatccacgagccacttgtatgtaagcgttgaaaaaaaattacaacaatagttgatttttgcatgaataattttgtataatttttcttaagttctcaaattctcgatcccctttacaatggatttagaaccttatttatagaaaaataaatgggcttttagagagaacttaggctcgttccctgtgacagtcagtagtcccntgatccgtaaggagaaatatcgggtaag

SEQ ID NO: 24195 - DNA, 2622 bp, Cannabis sativa
aagagggtgtggaaatctaaaggggatgaacaagaggctgtaaagaaggaatttattgagaacttaaagaccttagaaggagagcttggtgacaagctttactttggtggtgataagtttggattggtggatttggctttagttcccatcacaagttggttttactcctttgagatttgtgctaattacagcactcagtccgagtgtcccaagattgtagagtgggccaaaagatgcatggagaaagatagtgtggccaagtctcttcctcaccccaacaaaatttatgactttgttttgttacttaagaaaatatatggcttgtaatacatttggaaacaaaagaagcaaaagaaaaaatatgtacttgctagacaaatcgttgattcccttgtgttgttttgtgtgtacttttataaataataataagaataaatatatgtataaatagtaatctaatgagaaattataagattttgtatctatatttttgtacttagttcatatgttaaaaatacaatctattctaatagtaatttattggataatttacatatataaacgtttttgtaatttattattaataataacattaacgttaatttattattgtgcagtttattatttatagcttagtttgacaactttttttttttttttattttcttttgtcttttatttgaacataaacttttagaagtataaaataaaataaatctctttttctatcctatacccaactttctcccaaagaaaacataataaaataaatcttatccccaacttcaacaaaaataaaaaaaaaaatctactaattaatacggctagttatttggcttaaaaaataatactattgcaacatactttaaatatgatcattttaaaatataaagaaacataagtaagaatatttttttttaatccagtaatcaaaaataccatcattttatattcattaaaatgtaccaacttttgtgggtgagttacccaatatacattcaccctccacttaagtctagcacatactttttattaacttaagggatatagtagagacattatttattaaagtgggtatatcttaaaaaatataaaaataaaggtaaaaattaaaatatatataaagtgatgtgggtatacaatgtaatttcctctatattttctcgcctacttcaaaatcaaagcaactatttaattgtttactataccaattatatactcattagttacattttaacaatgtatacaaataattataaaaataaaaattttataaacaaataacctattaatattactttaatttaccaattaaaatatcgtcggtcaccataaaaaaaattccaacattagaatatttttattggcattttaagctactaaaaagtttttttcttcaataaagtaaggtagttaataaataaatgaatcatttttttactgtttatgagaaagtaacattgtaattgtttcattttaggtatcagaagcaattaaatagttcctcttcattaccacattgaaaagtaatttattaccacatggaaaaatatgtatatatttttacatgtcaaataaattaccacattcaaaagtaatttattttctatttagttaaccaaaaagtaacaaattttttttacagtttaaccaaatataatatgagatcaaatttatgggttattattttgctattttatttaaaagttactatatatatattaactctaattagtttctacattaaagtaatgttacttaaataatcacaacaaaaaagtaatggtatattacaatgtaaagatttacgttttgaaggtaattatttcaaaaagatgatctaaaaaaatttataaataaaagtcacactgatttgtattttaccatcgtataattgtaatcattttattggtatgtataaaaaaaatttctaactttcgtttatgaacaggaggagaattggtatataaaactagaaactgaacacattgtgggtttaggcccaaagtagaatgtccattacgagacagagaatgacttttcgataatattacgaaaactttaagtgagcttaggatattattatggtaaagactgagacaaattcctctgtgattttcaactagctgatcagaatggtgggagtcggaggaagcattgtcggacttttcatcgccggtatgaaacagagtgggagtcgtaagactcatcgccattggtggagagggaagaataagagtactcttggtcatcgccattggtggagagggaagaataagagtactcttggtccgaggcgccattttcgttgtcactctcatcctcttcttcttggtgatcatctgactctgactcctgtgcttcttggtgattttcttccttttcttggtcatatccatcttcatcttggtcttctgacccatcgtccgattcatcttctacattgaccacagtgaatctaagaacatcccaggtctaattaagtttcccgctaacacctcatttttgttttgcatgctcatccacactctagtactctgaaacacccctactcgcggcaattcccttacagataatgttagagatattattacaatggaagataaaccaagatatatacaa

SEQ ID NO: 24196 - DNA, 4647 bp, Cannabis sativa
atcaaatgacatgaaaatgaataatttaattcatgaacaataaataagcaagtatgcttctgtctctctagactgcaatacaatcttgtttgttatacatagaaaaaggactagcggtcttacatgtgcgaaacttgggtagcagcccaaccaatattaaagatagctgcaaatgtgctataactaacagtttccaatgctgatgaagtgttagaaaaaattgtgcaaggtaagcagccaccaaacaccgaagaaaaagaaatagcaaccaagatagaccctgcgccatgccatattttgaaatgcccaaatctgtctatctgacaattgaagcaaatataaacaaatattttatcagtcaatgtaaaattaacacacacacacctcaactcaactactaactactctatttatttttcaagcttgtgatattttacatatgcaggaggagcatttcggtaggcctattaacacacatctcaactactgactactcttatattgcatgctcatgatcccatttaagattctaattcttagtttctactgtaacataaaaaaatttgtaagctcacgctatttctacatttagtggctttaaacttgtgaaattccttgttttgcctttcaatgtaatcaaaatgagaacacaagcttctctccaaacctccccccacaaaagtaagatgtattggaggtctactgaaaagctttaaaattacattatttttatgttttcaacatttaaagcggaatccagctctttcccacatctgacaatgttagtcatggactgcgaatcttaactatgtctaatgaaggtactaccacaggtgaaagaatagcacttttttgaggagtactgatacactactaaaggacaagcaatgcagaaaaaccttgtatagaacaaaaagtagacagctatttaaactgaaaaaaataatactaaatgtcacaattaacatccagataaaagggttaaaatggtacataaagttcatcatccattaaaaggaagtataatagttgatatattctctaataaattaatcaaccaacattaagatgtttttggttaaggataaaatgataaaaacaaagaattggtactggatttcatacttcaatgctaattttgttatgaaactgaggtcggaattctaaaacgacacatcaacagagagagtagaaaggtcctaaatcattcacatatgaaatgtatatgtacaacagcaaaagtgaaaagtttttttgtttctccaaagaataaagagaaaagcaatcattgagtccaatgaccctaaatctggaaagaccgccaacaaatagaataataataatgacaatgtgtcatctccatcaactgtcatttgcagattcttgaggttgtttttaaaactaaaatgatagtaaacagtagttgatatatatatatatatgtatatatattaaatgcttgtgtgtttacgtttggttttaagatgccatcttaccagttcgccagtaaatatggttgcaaaaccatcagcaatctgaccagaaagcataacaatagctgcatcactacaaggataaaatatatcgaaacaagtgtcaacaatattattggatgtatggtataaagatcacagaacaactaagtgttagtaataatattaaagcttctaatatttattgaatttccttgtcatgctgtcgaacttggcgagttaaaagaattaaactcagctagatggttgaaattcctttctgtttcactgtgcattactacttatcttctaatttctataccaggtagactagctgtttctgtttgttcctaatttcctaattcagtcatttatactctcccttatttttcctcacaaaacttcatattcattgatttaaaaacaaacatttaaacatgaaatcgacacaatcctaaccacatttacttgctcgaaaatcaagaatgtcaaacacaatcccatgtgaattgtaaacagatatttgaaaatgaggttttcagatcagtatcatagtataggtaccgcggggagagcccaatgtctgtcaagaagattaaaagataagtaaaccaacaggaagcagtaatgtcattgagcatgtgccccacaccataataaacgaccgaacatcttgtaagaggcctagtgaacgaatcatcatcttcgagattacaattacccatgaatgtgtgagcaagctgcatagaggagttgaggcttttgagcatattaatacttactccagctaattagagcacgtagaaatgagctaagagtattgaaatataacttttgcagcctcatttgagctaaagtccatttaagacaaacaaattagttttaaattacagccaaaaaggaaaaactggtgacatatattctagcagacaattatgaaaattgaatgaatggaaaaggctacattgactaagcaattaatcatacaacacaaatttaattttatctttataccaatttctgtctaatcaaatttaacaaaaacttcaacaagaagaggtattgaacagttgaaccaagtaagtagtatctttggaaatcagactttctaagttccaaaatggaaaaaatcttaaaataaagcttagcccaatgaatacattgaatagtaacacacatacacagtaaaggaaaaaataaaacagaggaccccaaatagaagaattatattttgtcgtcatggatgaatggttctggtgcaactaaatctagagaaaatgaaatgaatgggagagtaattgtcttacaagatccttagttcaatcccaaattaacaaaagaaaaagaaaaatggtaatttaaatcatttgcgacgaacagaatcaaattaagttccatatacttgtttttcattaatcactaattctgtggcttgatctagtttttcgctaaaaacaccaaatttattcccaaacataacctaacaataaattttacaatgtttcattacagaatttcataaatcataaactaataatttttagtgtataaaccatgcattagaaatgacggtaaagcaaatccaccaaaaaaaaaagaaaaagaaaacagagaaagaaacaagaatagaaaatagaaagattttattttattttatttagaaaatagaaagaaaattaaacaattgccaacagtttgtaagcattgaacgacactataaactaaccttaaaaagaaaaagaaaaacaataaataaacaacgtacgacaacaaagaacaaacgaaattcttataaagaaactggaaatatagtggaaaacaaaagatcctaaaataaattttgtgaaaagttaatgaatgaaacagaatctttctcataccttgtcttgaaagtaattagaacttgttgggtagatagaagtggaacacaattaaagaaaatcagtatatgtattgtatattatatataatccgctgtatatgcggttctgaactctacgtatggttatctggatagaatcttgtgtatatataatatgatttttttttaaggaaaaaatatattgttttgttctgaaactgaggatattttatgattatttaggctgccgattttttttaattttctaattttgttctccacatatataatattgtaggacttggaaagccgccataagcgttgagctcaaaccagaagagaaagacattaatatccatgtaaagtgcattcgttaaaggtgaaaaggaaagggtatattggtcttttgggagtgagcttcggtgctgacaatggacgtgctttagatcttaattttcggttctgacaaatgctagtttttggcatgacgtgttgggaagctaaccttaacgtatggaggagaaagtgttaaaaaaatcaaagaaaagactagcgaagaattgcgggattctcaagtgtgaaccattttggtaatattattattattttaaggaaaagtgaaaagggagagcagataaaattaaatatggtaggaagccaaaataaataaattgtataggtaaacggcggcaaaaccatactttgattttggtttcgttaaaccccacaacccaaaattttgagggtaaacccccaaaactactattccgttagcaaaaacacacttccgttcacctaacctcgttatttgcctacgtggctcagtccaagtaagcagcagttcgccaggtcataaattattatgacttggaaattaaaaaaaaaaataatgttttttttgtttaactaatgactaattacccaaaaataaaagacaaaacattaaaagaaaaaaaaaacagagatttaaattaaaatacaaatttaattatccaaaaagacaccattaattatccaaaagacacattaaattcaagtagtaacggtacaaaaattaaaactaaactgtaaatgaaaaccaaaaactcaaactttccagagaaatcaaaggaaccccaagaacagtgaacccagaaattaccaccattgtcgtgagaaatcgaagaaaatccaggccataaaatcgttgtggagaaagcacgcaggagggagactcgaaaccacgggaggcgaggttgagattcatcatcgtcgtctgaaatcgaaggaaacctagaagattggtagaagcagaaggtttttgcaatggcgttt

SEQ ID NO: 24197 - DNA, 2354 bp, Cannabis sativa
tttttttttttttttttttttttttttttttttttttaagggtgtgaggaattgttagagcacattggattgattggtttggtgatataaataaatatctaaaaaaactttagttataataaaaattcaagaaaatcaagaacgtttgggccaattggagtgaggaaagtgatgaatgaatcatattatgacattttgtcatttttctccaattggcggttttggatataatgaagcttccggatatggtacagtgcaactatatttccccaaaaaactactaaccactttgttttaagataagtacgtaatttcttggttttgagcattgctaacagattagatacatatattttttttttttgaaagattagatacatatttgttagctgtttttatattatttgttaaaaaaaaaattgtgtaaaatgtgatttgaacaaatagctatatgactcgagatgtacatgggataaaaaattggtggggagtgctctatttctattctcgttaagaattttaattcccatccgtacttattcttcattggtgatggagcgggaaatcaccagattcatgcctgagcatagacaaattagacttataggagtctagctagttcgggataaaaaataatttttttttaaatatatattttttgtactgattttaaaaatattacattttttttttaaataatagcttaagttttttttttcttgattcactaaattttaatggcgatggtattttgtaactgaaggtagcctttaacattttttttctttttctttttttgtttttacattagaagatgctaatacatactatgggtctagcataaatacatttgctgcattttgtcgaaaagaaaaaatgattaaattgatacaatgcgattaattttgatcaaataagttttttaacaagattaaatctaaagtgatttttcagcttaaattgagttagggagacatcggtttgttaaagaactatttaatcaaaattaagcgggagtatctgaattattattttatataacatatatatatggaccagtagtgtattatttaatcaaaatcaagctaaattgaaatttaaaataatcaacacaagtagttttttatattataagaatgtgctaggtggcctaattgaattgatcattagtttgtaacatatacatatgattagtttggtattatatatattttaatttggggagtgggagagtgtcacactcacagactcaattataggtgtggatgattaaaaattaatcctcttctaatcttgagactaattattatccaggtgtaaaaataacatacaattatacaaagtcataaataaggtaaaaaagaatgacaagattaattaaagaggtggagcccacacttgttgattatatcattatcaattatatgtagataaaattggatgaaaatattgtttggtgtctaagtttcaatgaagcaattgggttgggatttttggagagttgtctatttatcatcatcagtctgagtcatgatgacatggtgccacgtttggttgactcattctttgtaagatgtaattggttacagttgtaagccaatccttactcattcataatcacttaaccaattatatctttaactatatgggttgtttttattcacattacttgaaaatttccaattaaaatttccaaacaataaaactttgtcgtgccaagatatttttgaatgatgtctaatcctaagatttggtataatacttatttgattatactatatttgcaatgatactcatttgatattctgtaattaattaattgaaattgtacaaatttagtatattgaattattaaattgaatttaaaactcatgatatgatttgattgcattaattgaaatgacaagtactatgtataatttttgtttttcttaacgtaagtactatgtataatttaaattacaaaatattaaattaggattattgataggtgattgatatttttactacaagcgtgaataaaaattagagagtattgatttctattttgaatcatgaatctaaatttattaaagtagtatttggtaatatttttatttttaaatgttttaaatacaaaataaaagtgaaatttttatttttgaacaacaaaaatgtgttctataactcattttattttttaattttaaaaatagaaaataaaagtgtgtcctgtaaattttatttttattttaatttgttgattttattttagtccagtctggagttcgggttcgggctcagttacgagtctagatctgggtccagttttagggttcaagttagggttggggtttggggtctggggtccaggg

SEQ ID NO: 24198 - DNA, 4954 bp, Cannabis sativa
acttatgagtagatctaagatcctagtaaaataattttcaacaaaaatacctctgaaagtctgcaattttttgtggagggctgcctcaggtgttttgccaacttgctatcagttgcagaagagacatgtgactgtgaatattgtctgtcccgtttgtaatttggaagatgagactatctaccatgttctagttgactgttcttttgctagatcatgatggaataggtctttggtggatattggtaacacaatggttgctgattttttcagttggcttcaggagattgaaagtcgtgggaaggcaggagaaatggtagagttggctatggcggcttgggcaatttggagggctagaaatgaagtcgtgtggcagcaaaagagttcaaatgctactagcattgtggcatctgctagatcatgcctggatcaatacaagactgctcaagaacgaagagggaactctctttctcatttgcttgaagatgggaataaatctgagcattagttgaagcctagtagaaacaagatcaaggttaacgtggatggtgcattgtttgctaatgaaggacgttttggtatgggctgcttagccagggactgtgaaggtcgaatgattgaagctttctccttgggaaagctgggcttggttcaacccgaagtggcggagattatttgtataaaggaggctttgagttggatcaaacgctatgattggcaaaatgttgtcattgagactgatagtttattacgtgtccaggctattcaaagtaacattcctatgacgtctcaatttagtttattaatgcttgatgttcgtaatttattattgtctttgaattatatggatttatgttttgtgaaacgatctgcaaacaaagcagctcactgtcttgctaggagctcttgtttctcgtctggtcgtgcacttcagttagaagattgttcttttgaagtgtgttctattatcctgaatgattaccatttttaataaaaagttgctattttattcaaaaaaaaaaagtaattttaaagtttaagatatatctgtattgcaaatgatagaaattataagaatggaatcataaattaacatttttacttatcacataaacacaaactcaaatatcagacccataggcccattccagccaatcacttacgtgtctattatcaaacaaacttaatttgactctgtcaaatatcaatcattaaactgaaacaatataatctcctatgcttttttccaacaaaagctatgtacacgtaatttcttttaagttatgattagtgaaaatagtttccctagagtataagtgcaatacattaggacctatggtgaaaataccctatatatatggtgaaataagattttaataaaatgatccaactctcatcatttgagataaagtcaaggatgtgtatctcatgtggaacggttttgagtagacccatagcacaccaccatgcggctcccctgaatgtcgcgtgcttggaaattgtttgctaacatgaatgaaggagtacttatatataaagtttatagctctaggacatttttttctcattgatatggatgggcggggaatactatatgatacaatttctcatcaacttctgttaattggaatataatatcttaaatcactcccactccctcacacatacataaatatatttatatttaattaaaggttaattaggatttttattcccaaattttgatgtatcaaattatacccctaaactttatggtcgttaaaaattctcctgaattattataaaattattatatttaaggatttttgtccgatttcagtaaagaaagtctaacatgaatgaaaatccaggggacatgatttggtacatgttaaagttcaatgtgcatgatttgatagatattaaaatgtgaggagcatgatttagtatataaacaatcactggattaataaaattgaagaataattagtatttttgccccctgaactttcgacactacttaattttatctcttaaaatatatggcttgttaaaaatttccctaaaatataacagttatataattatgccgcttctgttaggttccgtttctttaaccgttgaaaagtactatttttaccctctgaactttcactaatataaaattttgctcccttttattaaaaaaaatagttataatgattataatattctatttgtttaaagcaattataatattttattaattctaaaaaaaataaaaaattattagaaaaaacttaataaaaatattaaattaactaaaagtattaattttactttaaaaaaacttaaattattcctaaaaatattttcaaactttatttcatttataaacacgtattttaaaaaattaaactaaaattattgagagtctaataaataatttaaataaactaagattttttgaagaaaaattaaacttatttaaatttataaactcatatctcaacaaataatgaaaaataattaaaaatcaacgaaaaattcaaaagtactttgaaaaaaaaaattatatattaaactaaaaaaatattatgtttacttcaacaattctacattttttgaaaaaaaataaaatacactcaagtttgttcccataaaatttagtttttacaaaaattaaatttttaatatcaaaatgaatttttttaataaaaattaattattttttaaatcgcttaattagttttaaaattttaattcattttttttaatttttttaatcattcaaaatggttttttcttaagatctaaattatttttttttaaaaatttactaaaaacaatgttgaatctttctcatttttattttgaggaggcacaatttgatagttttcaaagtttaagggataaatttgttaatttacaaagatatgtcatcatttaaacggaataatgagacataatctaatagaaggactaaatatttgtaaatgtaaaagtttagggggattcttagcaaatcgtatattttaggggataaaatcagtattgtcgaaagttcggggggtaaaattgctaattatttaaaattgaatgtgattggacaaaaattcttacatccaacaatttcaatagttcatggggaatttttatcggtcagaaaagttcatgcggcatgatttggtacatgtcaatgtttagggggtaaaaatcctaattagcattagttaagtaagggattattccacaaatgcacaaaataacaaaaaaaaaattacaaaaatacggttgtatggaattttaaatatttttacgttttttatgattttatttaccgaaaatatgatttttttgatctatttttatatatttttttttttttgaaacggtgtatttttatgttatacacttgttaatttgttattgatttttcattatttgtatgttattttttattgttgttttgatgttattttactgttacttttatgtaatcatcttattattttcatgttattttttttatgaaaaaaccgtaagaaaaaaatatatctagatgtaaaagtataattcttttacataaaataatatttgatgtaattatctcatctatatattctatatatatatatatatatataaaggagaaaaataaagcggtgatatgacactctaaaatctctctaatttttatggatagagcgaacttattagaaaggatattaatgatgattacaagtgagatacggtggtgacatcaattttaaatacagttggtgactagaaatgagatacgatgatagttattttaaaattatatgatttgttaccttctttctgttttagatctctattttgtgtaaggattgttcagtttctaatttttttcattataatgtataacatttaaaaaaaaaatacgttatttttcatttatataaaatattgtatgataactttttttctttttgaattctttaaagttttcaatatagatttatttttttaaaaaatatattatttaaaaaaatatatgcataaaaataatttttttttcggataaaattaaatctttattagatagaaaaatctgctaatacaatggactgaagaacaaggggaacatcactctcagtaaaaagacgatctgaccaataacaagcaccacatgtcatacagtgcgcgactttgttagaagaccgtttaacataaccaatagaaacattagttaaagaagataaaatagactgacaatcctgaacaaacaaaccaaaaatagaaggcatagagaccgaactaagaatagctcgaacaactaaaatgcaatccgtctctaaaatgacatttgacttgttattcctctttatccaactaagtgcctctttgacacttagaatttttgcaatttcaggttggcaacttatggaggaaatagttaaaaatgcctcgattatacgaccatcacagccgcgtgctacaaaaccagtacaaatcttatttgtgtcttcaaaaacagccccatccacattaatttttaactatccagcagctggtttggaccagttatcccttgtgtcaatacggttgtaggccagagaaacaaaatctaaccgcttagattgagcacaagtccattgtcgaagtatggtacgagccagccaaacaacatcagcagctagcactacagcttttaccattccatagcatatcatttcgagccttctaaattgcccaaccaaccatgacagttttttcaactaaccctatattgcctactgccaacacttccataaactagtcaaaaaagttggttgctgcagaatggccaacccccaacgcaaatttaatccaacatgaatgaacaaaggaacattgaaccaaaacataaaaaattgactctttaccatagttacataacacacaatacataaaaataaatttaaaattatttgatacgtactgattttactgttcaattaatatttatataata

SEQ ID NO: 24199 - DNA, 3019 bp, Cannabis sativa
cccgccgctaataactagctgctattaatgattattaatctattgctaataatcattaatagcggcgaacattagtgacataacccaccactaatttttttggaattgaacagacaataattatgagcgacaggctctgctggtaatgcatgctgctaatatatttaatatttaggaaaataaaaaaaaataataaattatatataattaaacaaattaaaaattaaaataataaattatataattaaacaaattaaaaatattcaaaattttcacaaaaataaatacaatattcattattattacaatgtctcaaacaaactttgtatacttaaccactccatctagacaaacacatacgatcagaaaaatcatatattgtctacaaaagtactgcacacattgtaaatatcgtgttcgtcgtactatctctggtggctactccattattccacaactcttttaactcaccaaccaatgatcctaaaaatatattcatgtgtttacctagctagtgattttgcacaaaaaaaaaataaaataataatattaaattttatttattagtgacatagtattgattccataaaattaaaatactcttatttattaataaaaattaataatataaaatttacttattaataaaataatactaatcttatttcttactttaaattaatttgacgttgaaaagtggccaacatcagctcgttagattggggagataattaataagtttcagtaaataatctagagagagacacacaaaatttatagtagtttactctccatgttgcaatgataatgaagctacgcctacttcgagtttttatttctcacaagaattacagaataaggctaagggagctctccttttataggtgaaggaggtccacaaaaataagaaagaaaatacaaattagacatttttgattgtagataatgatctaatggtaaaaaaaatatcttttgatggtaatggctatttttttggagcccggcatgttaccgagagcttattttcataactctcttggggtgaaatttgacgatgatatatttggaatcacgatttaagtgcgagacatgacttgatagatcatttaattagcttcaaaagtcactttgaatcaagtgaatcgggtcaatattgaggagttatagttattttattgaaggaagttcatgactcagcgccaaagttgacatcccaacacccaagttgacatatgacgtcaacctggatgttgtgtaagtgcaaaaatgtccaagggatgtactttaaggtgtcaaagtgatattttgacatcaattagcacgtttatatgttctgggaaagctagtcaccagttatcagagatgttactggtctgcagaaatgagagactcgaaactcttcatttttaagtggaaatgagaaatacaaagttgtgaatttgacttctctgacttcatggatctttgttattgtgaaaaactagacggacgattaaaacgatattagaatcggataagcaaaacccaatgcattaggacaccttttgtcaacctaggtgctgggtacttactcctgagctcctgagatctttttttgatactttcaaggcttctgaacttgaggacaaggtatcctactccattttttaccattccagattcattggtcgaattaggtttgacatttgagcaaggcagtgtcctaagttgattatcaacctgggcgctgggtcccgtttctaggggctgggacttgtggttttctcctcgagtttgcttgaatcttaattattttttatgaaaaaaaaattaaccaactcagagtcttccattagagtagttctaattctttctaataattagactgaagcgttaaattactaagtttgccaaccacaaactcaataccttctgtaaccatgtccatagctaattgaggagagatcatcttggtactgaaaaatcgacctgggcctctcctactcaaggcatcaaccatcgtattggctttcccataatgataaagaatgacacaataatccttcacaattctaaccactgtcttggtctcatattaaaaattttctgggtagagaaatatttgagactcttgtagtccgtataaatctcacgtttctctccataaagataatatcaccaattcttcaatgcaaaaaccattacattaagttctagttcatgagtcaggtaatgtttctcatactccctcaactagcgagaagaataagtaatgaccctgtcagcttgcatcagaacacaccccagactttggcatcacaataaaccacgaaattttttattgatttaatggcaaagccaacactggagatgtaatcaatcgctacttcagctcttgaaaactaacttcatacttgtcggtcaacacaactgccaacttttcttggtcttaaaggtgtggaaatcttagaaaacccttccaaaaaaacgacgacattattagggtttatgccttaaaaagcttgtaaatatatttttatttataaatataaattgaagatttttatataagcttgaatgttaaattattaatatttaatgtataaatattaaaaaattccttattcatacatgaggtcgtgacttgtattgtacgaaaaattaagatcacttattcatgaataaaatattcaaaaacatattaaagttatgggatctataatcaaatgttttctagtgtggttcactaatgtttgttatttggtgaaagtgatctcaattcagattgttgatgtaatatgacatctaactgaaggtattgtatataatagagattatatatgacaaggatcgatatgtaatttagctatctttatcaaacatcttatttaccataaagaccttatttataacataatgatgatcaatagtggatcagcataaatcctaagtaatcatgaactcatgttcatgttattagtttctttgtgttgggaaacatggggttccatctcaaaaccaattggcaatgagtggagta

SEQ ID NO: 24200 - DNA, 1905 bp, Cannabis sativa
agaaattttgaattaaattttttaaaacactttaatattattgaatactgtgttagttgatgtttcacttatatatgtgataattcatcaatacaataaataaaattttatcacgaagcaaaacaaagaaatcatatactacatatattccaattaaagagatagaaaaatctaaaaacattacaaaaaaattaagaattaaagatttattaggaaaagatgagatcataaagggcttagatttagaattttctagaaattatttttcatatttagtccgtcataaaaaaaaatatctttctcttccaaaattaatattgtagttgttgctcgactcctatagtatcatcatcaactttctcattactctaattgttgtaatgccatatgttttcttacaatattttttgctccaaataatatagcaaaaaaaaaaaatattagattaaaacttgaaaaaattcttcaaagctctaaattctcaaaaataacaataataaaaattacttgaaagataaaaataaaaattcacaatatacacatgaaaatattcatagatttaatgctagcaattgatccaaaattcatatatttgaagtgacttgaacccatgtttgtctcgaacccaacgtctaaacagcattatacagatagatatgtagatatatataggtacatacatagagaaatacataagtatccgtatttattccactcttttttctctgttgttccagaagagatacgaaaagcatcaaaatcctttaagctcatccaactatgtccaatccatgtccaagttggaacccgcgcaaaggacaatcccttgcctcccccggctttttcctaaaacactaaacagaaatataaaacaataatgatatagaggatcatcatatcttacttcatgctatctacgactcgtttctctgctcaagtaggctctgagtgtttgaaccattgccccaagccctctccttccaaatattctccacttcctcaaatgtcaatcccttagtctcaggcacaaaacagctcacaaacacaaatgctatcactgctataccagcaagaatcaagaatgtaggaccagtcccaagagcatcagcaattgaaaggaatgactgggctacaatcaaatttgaaacccaatttacagtggccgacatgcctccgcatatcccacgatatgcttccggatatatctctgagttaaccgtccaaggcacaggtcccattccaggtgagaagaaagcaatgtaaagtgctaaacctataactgcaaaccaaccagagagtccacctgtagaatcagacgaaccaaacaaaaaggcccctgagaggatgagaagggatacaattacaccagctaaacttgagagggccaacttccttcgtcctgcatgatcaataaggtatattccgagaactgaacccgcagcattcattgcagcaacaatcaaggacagcaaaagagctaactggtttgatttgaacccagccatctggacaatagttggactgtagtacatgaccgtgttgataccagtaaattgttggaaagcctgaaaaaccacaagagctccatcaatttacccacacaaattcataagaatcatcaaatatcacactgccaagaatatactagacgtttaaaaagaaattttccttagtaataatagtcaacaaaaactcccccatttccatacaaaacattgacggtggcaggcaagagaatcattgaagaaaatatcatgcaccaaaacttttatcgaaaaaatatatatatcatacacccaaacttgctaaaagatccttacggctaccattcacttaggagcaacaacactatcttataaaccatttccatatgtttcaaacaattttcaaatatatacaattaaa

SEQ ID NO: 24201 - DNA, 1524 bp, Cannabis sativa
tttgccacgacgaacttaccaagtatatggatatggtgtatatatgtaggtccgtgagctggagaacaatccacattttaatgcaggtaaaggctctgttttaacttgcaatggcaatgttgaaatggaagctagtattatggatggaagtacgaagaattgtggagctgtttctggcctcaaaactgtcgttaatgctatatcattggcacgtttggtcatggaaaaatctcctcatgtataccttgcatttgatggagcagaagcctttgcaagagaacaagtaagtgcttacctctttcttggacttctcaactagggtcaccattcaccaatggagttcattacttgtgttagttgcaaccaactttgtcatggttggaatgaaaatgtgtcatatactaatttgaaatgaatccaccactcacttcagttgattcatttttcggttacttttttagggagttgagactgtagactctagttattttgtcaatgaagaaaacatcgaacgactaaagcaagcaaaagaagccaacagaacgcaggtacattaacacctcctttatgagtctgagataataaaatgttgtatgaaactctatgacaaattataatcagtatcattttcatggatcgacacagcttgattatacacaaccaacactgaaagacctgaatggtgagaaatggattccaaacggagatagccaagggacagttggatgtgtggttgttgacattcaggggaatttagcttctgctacttctacaggtggacttgtcaataaaatgatgggcaggattggggacacccctatcataggtgcagggacttatgccaaccatctttgtgcaatctctgccactggaaaaggtgaggccataattcgaggcactatagcaagggacgtggcagctctcgtggagttcaaaggcctttcgctcaaggatgctgcagattatgctgtggagagcattccaaaaaatactgctggccttgttgctgtatcctccaaaggagaagttgcaatgcctttcaatacattgggaatgttccgagcttgtgccactgaggatggctactcggaggttgcagtatggccttccacaatgaattgaatgaagttttatagtcagattcatttaatttacgttttctgtatttgtataatggcacaaaataaaatacatttatatatttatatatattgttgtgatcgaatcgaatcactcagccagcctaagaagaacacaaacaaaaaaatgcattacaagaaacacaaagtatagaataattaacaataaaccataaataaaaaatagtacacaaaagtaaagaatgacactaagatttaatgagtttgagccatctgcaatgttccaaacctcgattgaacatcagtctcaatcatcttcataataggatgagagttcaaagattacaagtgttttcaataaagaacacaagtaagttacaaaaatgactttctaacttgtgttagaactctctctctctctctc

SEQ ID NO: 24202 - DNA, 2108 bp, Cannabis sativa
ttttagatcggattattattaaatgttattttgaacaaaaaattagttcagagtcctatttgtaccattttggagaatacatagtccattttatcatttaacaacataaaaagtacaattggtaacttttacaaaacacaagatctaaaatggtatttatcctttttaatattagtacaaaattatttaaattaattttatattatctcgctaactttatttaatcgcaaatcaatatgtgataagaataaatattctaaatatggtaagtttttaatttactgaatcatttattttccgatttgatttcttaaattaattgtcaaaatattctgataattaatgtgacgcagatactgatagagtatctcacctataaatcattctatactaacagcaaattccatctaaaaatgtagagagagcttggaagcccgattacccaatctgaagctacactaggattgaagctcaaagatcaatgactggaactcgatttgtcgttattattcccttggcaaaccgattatacatgttttatttttcatataatattttctaacaattggtatgagagtaaatatatacatttgccttgattcttcgtttagttttagatgtagatataggtgtatatatttactatatataatatgtataattttgttaatagctgattgtatcgcaagatatgttgccaacatgtcgtgaaatatcgttgaacactaggctacgtatctatgattcttttttgcgatgattcaagacatatttaagattcatgttacgattttcattttttttttattattttaacaaaatttctaataattttgcagatggctcctgaacttaaacttctaatttctcagtatttcacaggttgtcttacctatcaggatgcagataggtttagagatatcaaggccaagtttacgaagcttgagttgattgatgcgattaaggctagtcctttcagacacttctggaaagctagaaagttgactttctctggcactttagtccacagcttcctcttacggaagatgaaagtcgataatgaaaaggaagatgaggtttggtttcatataggcaaaaatgacatgtgattcgggcggatatagtttggacttattattggctttcctatgggtagtcccactatagaggaagaaataaaagtcaagtccaacaaccatctagtcaggatgtattttgaagggaagagttttgtgcagttggattcactgttgctccaactacagaggtgcgaagtaagagatgatgcctataagcttggactgattgctttcattgaaggtgtattagtatcaaaagagggcaatgttcaagtttggcctgacatcttaaagtttgttaacgatcttgaattcttcttcaagtatccgtggagcgagcgtgcttttcgtaagttgatgcaaacattgaacaaggacatgcaacattataaagataatgttgacaagaagaaggggaagaaggttgctcaggaggaaacactgttagtggctatatacctgtcactcagtactgggcatatgaagccatagagaaagtgggcaagaagtatgttcaatgcaatggtaccaagttccctagaatggtaaactggaaaactccagagggccagcggaaacaagatgtgaaggcaaccgacatcgcattattgttcaacactcgggtatgtttcttttctgttttgtaaaattcttttgttaattcaataaaaatactggtttaaaagttaaattagttattcgcgacttgtttcgcgacgtatcttgatttcattcgcgatttgtagatgtatagtacctttgaaaaattgttttctgatttgcgacttgttttgcgatattttgagatgtcatttgcaataattatatgtttatgcttactttttaattcgcgacgtgtatcgcgacagttcacgatttgggtacaaatattcttttgagatgctagacctgttttgatgacatactatcgatgattttgatacatatcatgatttttgtaatttagtttgtgaaatattttgtgacatttttcaatagtttttaatttctgtttgttttttttttttt

SEQ ID NO: 24203 - DNA, 2594 bp, Cannabis sativa
acatgaacctctggcaagtcgtggtaccgcaaagtgccatgcgactgcctattgccaacttgccctgtctgggcttgtcggacaacttcttctagcttgataaaactgtcagctcactcgagaaactccttcatgttgttggtcaaaatccttcggatatgtttccagaagtcactcagtggaaggatgccccctagtatggtcgtatatcgaccttcttttgtaagacctttgaccttggtagccttggtcgtgaaccttaggatgtaatcctttaaaggttctccttgttgttgtttgactttgccaaggtcttcttgttgcgacggtataagccttgaggacgagaattgtgtgtagaattcttgggaaagctcattctaggaattgaatcttcctaaagccagcttaaagtattattgttgagctgtttctgacaaagttgccataaatatctgacactggacatcactagtaattttttggagatcaagttgcatctcaatgtcttgatgtgtgccaatgggtcttctcgcccggtatatatcttcatgttagcatcttgaactttggcaagggtaaggcattaatatatgctgagaatggtgatccccttcacctatctagttcaaggtctgaaggtcttggaccagctaggcctttgatcatgtcccttatttggtccaactgtgcttgcatagaaggatccgttggtggagggacttggctgactagcccttcttaaatgggttgcagccttgaatgtgccagggtgtggtcagccgtaccataggagagagtatggtggaggccggccaaccgtgtcccctatagctggctttagccagctacccctagatagggtgactggccttggccaaccagccctatgctaggttgggcctggccgcccattattccctgattggctggtataaccagtgtgctgacagggagtagatcgcaccagttgctagatttaggtggatctagatatatgaggtaattagactcacttctcaagtttttgttttgggtgtttccacctgttcccagacctagccagttgaagattggcctctaggttacttgctcccgaaggccccgagatgggatttcaccctactagtcagccaagggtgtaccaccaagaggttggccagcgagaggctatccaagttggggtgttatagaggttcagatccctagcctgccccccaaactgctagttgccaatatctggctgttcttgccatcaagccttcatggcaaggcttgtcctcctttgggtagaggaaggtctgtcctggttcttgaagaacctagttggatattctgtcgatagaccctccccgatctatcaactagtctaccttggagaagatcgctgatgagatcctagcctctcccagcagttctttcattgaatcaccttatcaggtcgctagcttctctgttgcagtggtccagctccgcctggtgagatcagaggatgtactcttggtcatccatccatctcaaaattttcatctctattgtgcaaatacatcacaatcaacaacgtgcggttcttcagtttggctgacttggcaaatggtttctctaagtctaactaactcaagatcttctcctaagtctacatggggcttgccaatgtctggctcgccgattcttggccccgtctctccaacataatactggggatgagggacgtttgtggtgcctggaggctactccatgtgggtccttccttcagtgggaggcaccagtgtaaggtcctccctaggaggcatgggccgatttttcaaatccatcaaaatggttgtgtcaacctagccaactatggtggccaaatttgtggtgtctaccatgatggcaggagtggccacatctgtggggttcgtgaagattctagttgtaattggaatacgaacattaggatctacagtcataaggtcttaaggaagacccgatgaggtagatatcgtagtctctcctccttgtgttaataaccatgacattttattagataaattaacaacccactttcaatgaaagtaccaaactattggcctcaaatttggccaaccgacagcaaagtcaaatttaatactgatgtttgctacgtgttacacaattagaacaataaagtaaataaacacaagattttatagaggtttggcccctctagttagagggtaaggacctactccccttttagttgtattgatatcaagagattatactatttagatcactatattgataggatctgaagtagctctctcaggattacaatgtaggaatgagagttggaaaatctcaagtatgagtgtagcagtgggcgtgacagagagaaaggtgagttcttagacttagagctcaggatttgagacttaatgacttagggttttagggttcgactaaagctctttatataggagagcttacacccttcaaatcccttagaaggtaaaataaactattatttatatattaaattaataaaatacaaatgactaaaatgcccctcaaaaataaatatattctctctattttcatgggttgttaaggcccaatttgtggtttgactt

SEQ ID NO: 24204 - DNA, 2908 bp, Cannabis sativa
ttatgtacattgtaattatttaaatttctaaaaattttacaatatatttaaataaatataacgtatataactactaaaaaataaattaatgaacaaacaaatttcaattatgcatgttttttttggagtgcaacataaaaatagccaaacaaatatataagaataatatttatttatgtttgtttttgtttttcattcttttaagaaagcttatcttttagttttaaacatatataattggacattttttgaaaaagaaataaataaataaaaatataaaagaaaaacatttataattgaagtgagtgccgcttttactaatttaacgtttttttctttcttttttataacgtctagggaagctggcgggcgcgcaaatagattatataacagatttacatgatctctcattcggtactctccctcccaacactatgtagtacttagtagtaatcttttttcttattttttttgaaatggattgtattagcaatctttgatttactattattagtttttaatgaataaattaattaattcagtttaattgtcaaataactcaaaatttattagtttttattttttttggataataaaattttattagttaaatatatacacaaatttaaatacacaaatatgtacaaagatttgtacgaagtgatgggatcatgggagagagcccaaaaatcatgatgatgtcgtctagatattccactctcccaatgacatcatctcacgtcagaccctacttgctttacacactccaaatcctcttcaacgacataacccgattacccggagacttaacccgacttatatcgggcgaacccgattccatctctcttcttgactcttgcaaacccaaactcacaagatcagccggtttatctccccggcaccactccggccttaaacaacccaccggagaagattccgagcaactcatctccccgccaaatctatcatcagaaacgtcgattactctagactctgaatctgaccctaaacccatttcacccactgttataacgatttgggccgaagtttcaggcccatggaccggagattcggataggacaggggcccggcaaagagggcagttggagtgtgagccgaaccagagatcgatacactcgacgtgaaagacgtggctgcatttgggcaaagcacggcctaagtcgttgtcttcgaactcggataagcacacggcgcattctagcaaggcggcgccaaccccgacacggtgagtggaagaggaataaacgaaggtggggatagttttgaggatagagaggtccaaaccttgagatgaaacgacagcgtttctttgagtaatagaattattacgagcaagaatttgacggcgtgaacgacgtcgtctagagggattagtgaaccagcgagaatagctatggaagaaaacgacgagacatatgatgatgaagagaattactactgaacagagcattatcttgccgtttaaggcgtagttggcgggtgttgtagtgtcgtttatgctgtccatatttttatatctgagcttgatcgatatagaaatgtatatatatatatatatttatatatacagaggagagggagaagggagggaggaaggttcctatgtgttgggttgatgggtttactttactgactaaaatttgtagtcttatggtccatgatgctgtttatactaaaaacggaaatatattctcataaatagacttctttctatttatttaagaaaaaaatatttgttggcagttgagtacagtattatatatatttgtgtatttgtgtatattatcttgtccccatttgtaatttgagagacagtaagatgaagtacagttttttggaatatttatcttaaattcaagtttcttctattctagtaggtctatagctataggtcgtaatattattttattctttgactgtatgtgatagatatttgaaaaataattttattattatgaaatattgaagaatattattttggtccttttcgaaaaaaaaaaaagaagaatattttggttgaaaaataaaataaaatataatgtgtatgtatacttttgaaaacaattgtgaaattttataatacatcaaactgatgataaaaaagtgcgtatcattatagatttagtgttttgaaaaaattattaatttgattatctattttgttaaatgataaaataaaaatcttgtattttttaaaatagtacaaataggaccctgaacttaatttttgataatttttttcttaatataaccaacttgaaaatacaaatagatataaaaaatgtaaacaattttgtcataatacctttagatcggataattaataaatttattttgacaaaaaaaaacagtttagagtcctatttttaccattttggaaaatatagggtccattttgtcatttaacaaaataaaaggtccaatcagtaacttttacaaaatacagggtccaaaatagtatttacaacatttacttatttttttccttgtcaaatttagcatatttttaaaccatgcatttgaggcatttttgtaattgcactctaatatataatatattaagatgtaaattataataaaaagtaattattattaataataattaataaattaaatatatttttcaacaaataatgataatattataattaaaaaatatattaaaaatatattaattaatattaaatgataataatataaataaaataaaaatatattcattaattacgtactaaatttaacacaaattttaacacatcattaaataaaataagtacatcaaatttggcaaaagttttattgttttattagcacattattgaataagtactattttacatgaacatcaaatatagttttacatcatttagttgacactctattattg

SEQ ID NO: 24205 - DNA, 5457 bp, Cannabis sativa
attaatctttaaatcaactgctaatttctaaattagactaagcggtctttacaactgagtttgagtactcaaatcgattccacaacacgaacggtaccttctacttcaggttgaaaatttaccattttatgtttgtaatcaatactaacgacgtactcaaataggaaatacattctgaataatatctcaatctcttttatacccaattatacaaaattagcacttaattctgtatcctcaactctaatcagagtagacctaatccaccttttggagataactaattatctaccaggtaatagagtttcaaaccttatttcataactatttcaaggcctactcaagttatcaattaccctagccaccacatatgaatttgtatctcaagaatcaattaacatagagtaaatagagtagttaactagaagctgacctgacactactgaaggagtagcttcagcattggcttggatagtggtaagaaccccaaacatgaagtggatttttcctcttgtcctggttcctccttctataactatgggcaatctttcttaaaattccctactagattgcattaaaaacatggcttacagttgcactctcctagatgatgcttcttgcgacaagaacactctgaataagtatagtgacctccaaggccatcgtaacctggtttcctatgaattgtctttttctaactcaagcccactattgtagatagagctttcctcttttaattattccaggaaccagaaccacttttgacaagattggaagcaagaggagcagtatcctcaccaataactaaagttcctcgggattcttggacaaactttgtaatgctcacggcttgagaggtattcatcacatataaatttccaaaaataatcaaaggtccttgcatccaatatttcccatacaatggtcccatttggttaccaacaataaactgttatgttggcaactctagaactcaagtaaccggtacttgaggtgaaggcacaataggagatccatgttgcctcaacctcttaatctcctcatctagctattgaatcctagcttccatctccacgaacctttgctccaaatttagtggagcctgtggtggattttcataacctcctccataagtcctttcttaacctgtaactcggtcttgggaactaggagaatctcattctctccattcgccaccagtgtcaactacatcatcctaactccttatgttctgccaggcatccatctataggacaagcccgcgaattcatgagtcagatcggtcaggcagcaattaaaattgtaatctacttatcgcttacatgggatcttaatatccttctattcagctatcaatctactaacatgctttctatcatacttttctaatcatgcataacaaatcaaaaatactagaatgtgtaaaaacttactgaaccacgagtcgagctcatctttgataatgattatacatatcatgacgatcttcagaaaataacctgacggctcttataccaaattgtaatgccctactagtaaggcatgctgtagtgtttcttaattgttgtgcatgcctttgataataaaagagtttgttgaaaaacatgaatatttaaacttgttaaattaacgtaaactgtgataaataatcttaatttatataacttcgagatcctgttaaaagtttacaaccatattcaaaatatattttatacaaaatgttatcgtccagcgaccaattaaaagtcagcctaaactgtcttgaagatcctgaatgcaagcgtgccagtagccttgagtcgaaactgttgcttgatgatttaaggccctaagtcacaatttacgtaaaacagataaatgacccgctaaatcattttcggggacttaaacttgaaactaaaatttccctattgatggatagcatggcaataccctaaatattgataaaacgtaagattagagtctgaaatctgaaaaattcggttaaccgaaacaccaaaatggtttaccattttctggggtcctgcctgaaaaaccgcttcaccatttttggaaaagcgttaaactgcttttctctacaaaaaagaccaaatttcaaaaactaggtcaaaactaccctaaattgcatcaaaccttttaaaacacctaattaggccaggacaaacatacatcaaccaaaaatagtagctataactcccttgactcgattccaccattaaagaaccaaatttgagcttaagagctcaaaccatgttcaatctctgatacaatcaccaagacccgaacaaaatagctcatataacttaaaaacaactcaattaaacatccttaaccatcccagctagtatagaaactatagtctaaactttgcatgctaaacctaatttaaattaaagaaaacaaagagaaaagctttaccttgctttggctatggtaacccttgaattgctatgttaaccctttgaatttaagtggccaaacaagaggaaggagaagaagacttaggtttgtcccattttcttattttcagtttaatgaggataaacttaggattattagatattatcttcaaaatcagattatttaactaaggatattctaaaaaaattccactacaagacaaacttcaaaactaaggacaaaagactcatttgcccttacttaaccatgaagaaatccctatacttagttgtaaaatggtccaaaaccataaccattaaaatctcgacattctaaatgcctaactatattgtcttgttatttctaagatactaaactatatccaagtgactcaaattggtcatatcattgcattccactgttacaggacataaaatataaaaaatataaaatttcatatataatatatattacatctagaattcaaatatatctctataattgaaaaaaaaaaatatattttttttaaggcttatttcacacaataagtaatttctactaagaagcacataatcataaattaataattaactgtttaataatatgctaattctcataatttaattatgcggtcattacaatacccctgagaccctcctgcacgtcaagggggtgcatcttcatctcttccttccggcctatgtcaaaaattattctaatcgtcccttccaaggtagtgaccaggcattacttgttcatcagtgtgtctgtcacgatttttctcttggggccccgggatggtgggtccgtctctcctcgactattgcgcatagttttttggacgctcgtctagtccatacacaggtccactacttagaatatacatcctctttcccctgttgtcattctgtctgcgcagttgggcctaaatgttctgccttccagtctgttaggcaaattgttggactagatcagtagcttcttttccctacggttgatttcttcatgtcggtcacacatttctcgagcagtgtaatccatccattcttgaaactcccgccactactggccaaacacttggttcactgtggcgcgagtctcctcttgattgtggtggagggtgttggtgtgcgtttgaacttgctccaagacttctctgaggttctctaactcagagttatcttccaggtccatgcgaggctctccttcagatggctagtctgtctcgactgcagtctctccagtgtaatgtcgagtggtggtccctgtctcttgggcaccaaatttgatccttggcatctcgatagtaactctgtttgtattgcctgtcgtactcctgacacctgtgaaagcagggtctctaaccctggtgcccaccgaagtgttgttgcaaggaggaagacaattatcgacattgtcggttccaacgtcaattgggatctgaacgtttggatcagtggccattagatcgtgtggttcaattgatgttgcccttcttgtttgaaccattgttctcgaagtgaagatgattgagtgatccttaaaatgcagatattaagtggagagcaaaaaatagtttaaactctcaatgaaagtactaaaatattgacttcatttttagccaacaacacgtagtcaaatgaaacgaccattgttatttttatttatttatttatttattttggatagaacttagggctgaaaactattttctataaacatatggcccacatatgaatatatataactgcacatataatcatgtatatataaataaaaaaggagattgaaatatgtcatacttaaatttgagggatggagtgatgtgtggaagatagaaagatgtaaataaataaaatctgaatgaaaattccttttgatactcattctcgactacaaccgcaccaacattccaaaatccaaggacgcatccagattgcttcgtattgaaccccttcactattccacgatgaggcaaatcttccatcacatctgacttcaacattaatatatctatcaaatttatttatgaataaaaagaagaaaaaataataaaaaaaaagctacatacatattctttaagcaagttggaacttttataacatacagaaatctgtctctctacatattttggttagttgttcacaaaggtaataaacggatacactgaaaaaactactaaagaaacgcctaaaaatcaagaacttgtgccttaagattacattagaaataatataattactgcaagagatgacaccctatgaaaaaattgttaatcagcaaatcatgctgctaggttccgcttggtagcttccattttcaataacaggtctttaatttctgcatccattctcattttcatactaaagtattcacgattttctcgttcctgagcctgcagttcttcaagtttttgtttacgcaacctctcggcttcatccaagtgcaagttggcaattctactagcatactcctcctcaatctttccatttttggcaatggctatctgatgcaggccttctgcatcccttcttgcatcatcggcctttgtttggaacatcttggcctctgcttgtttaattcttacaatactctccagctcatcgaaaagaggctccttggaagtatttgtccgcaactccaagtccatgttgcgcttgtcatttcggtcataactgtaactaggaagtaagctagcaggtatatccaactgaggaaccttttccgaatataccgattttagccatgtgggttcttggcttggcccagcaatcccattcccactgatgcttcctttactttgttccttcccagatggaagaggcatattatttaacttgaaagaatcaacatctacaataaaatgaaataattagaaacactttgaagattctatagatgcaatggtgaaagaaagtactaatgcaaaatcagatacaaaggactgtaaattatacaagacttgtattatctctaataactataacattcttttcaactttcaactaataagttttaaaattttagaggcagagcacaaacaagaataagcaatag

SEQ ID NO: 24206 - DNA, 2441 bp, Cannabis sativa
tttaattccagtcaagttgggtatgaactgaactgttgatcatttactctaatgttgaacttgttttgggtgatcatagtcaaatttaactatcccatgttctattttaatcggttttgtttgacgtgtactagaaattcatgtattaattgaactaaataagtagtgtagttttttttcaacacttttcttgtgctaagttgtgtttcatgtatgtcattgctattttgcacatgctaattttctccccttataagtctttacttttggaccaacaatgactaatttattattttttcttaattgtaattatcgtcctcatatcaactcataagtgcaatatattgtctgtacacaacatgcaggaccagtctcactgttctgctacgggggctaacactcttgagaattataataaacctttggtcttcaaggaacttaggaagttatgggaaaagctggagcctaatcttccatggaaaataggagagtatgatgaggcaaatacactattattggatgattcaccatataaggctttacgcaatccggtaggaaaatctgttcatatttttatttgtaaccatcttattgcaattgataatttttatcttaaaatgctaacattgtttcattactttgtgatctccaactggttaggcgaacactgcaatttttcccaagccatttgaatatcttgacagagctgataattcattaggtgagtcatttaggagtaggcaaatatttggcattggtcaaaaatatgtttacatttaatggaccaacatgccatggcctggtcacacagacatgaaacatctgtgtgagtttctcagggaacatggtattacctacactaaattctcctaaattaagattttttttttcctgattgtgctgtcttgtctgatgccataaaagatgtatgttttttttgatgttttggtttgtcatgctcataatctgaatctttacctgttgctgctgtttgtttattattattacctagaattaccacttgatctacaatttttcaacttgtgaaattttcatgaaatacaaggatttttttaatggtttggttatggctggtaatatttcctccaaagctgattgccattatcttcctctaattcttgtcattttgtttttaaaacttttcaagctgtgacacaaaatctcccttgcttataattgctatgttgatgttgatttagctattgatgatttccacaatttgatgttttaaatgttgatgcctttttctgtacctgtttaacctcagggcctggtggggatcttcgtacttatctcgaaggcgtagctctagctgacaatgttcaaaagtatgtagaacaaaatccatttggtcaacaagccattacgaaatcacacagtcaatgggggttttatcgtcaatttctgaagccaaagaaaacaccctgaaaacattgctgctccatctattgttcatgggagtgggaaaaggaatttttgatttttgtttttcagaatctcattggagcaatttaggcgatgatatcacataattcattttacaaattaggctacagatatagactatagtgcatacctttgaaatgtttggggtcttctgccacttcacaacgtagatacgaatggtttttattcattgatgggaaagatgatgactcacccggagaagcaattgtgaggatttgttaggctagtcttttataattcaagattgacacaagaaaagttcttactaatctacaattttgtattcatgatattatgtagtattcattgtgacagtaaattttgtatttttggtatttgtatgacgggattggaggaaaaggctattagttcctttattcgagtttagtcttttttggagcacagcacttgaaccaatacaaagtgttgtctacctaaaacattttaaagtaattctagattgaagattatatttatacggttaaaattataactataatctattactaaatttatttcattaaatataagggtgtttatccgattcaatttgcgcttttttagtcaaacaacatttaatttgcactaagtgcggatttcatattttaaatccaatttgatccgcataatagtttaaatccaatccaatctgcaatagtgcagattggattagttattttggatcggttgtgttttttaatgataaattatttaatatttcatagaaaaaaattaaaaagactattgtttcttaatctccaataataatctattttcatctctatttatatataaatcaaaccaatatagatatatgtcaatatatatgtactcatctttaaatttacacttaaatacatatgtattcattactaaaataaataagttagtatatatatatatttaaatttatttgtatgtgtctatgtgaataagaataatttttctggtgt

SEQ ID NO: 24207 - DNA, 7974 bp, Cannabis sativa
aaggtgtgaaggtcgatcctaaaaaagtggcagcaatggtcgattggccacaactacaaaacctcaaacaactccgaggtaaccttggtctcacgggttattataggcattttgtagctcactatgcgtccattgtagcacctctagcagatcttttgaagaaagataacttctgtgggccggtcttcccaagccactgcaacatttgagacactaaaaaaagcaatgaccaacactccggttcttgctttacccaatttttctaaggtatttgtgatagaaacggatgcttccaatgctagaattagtggagttcttatgcaagatggtcatcctattgcttttttcagccgcaagttgggcattgatttgtaggtacctcgacttatatgagggaattgcgtgtgattgtgaaagtggtgacaaaatggcgacaatacctcttgggacgtccctttgtgattcgaaatgatcacaagagccttaaggaacttcttacttaggttattcaaaccccggaccaacaataatttcttcagaagttattgggatttcaattttgcgcttgcttcacgatcaattttagcatcaaaacaataccttaccacactacaactcgcgtgatggattgctgtattttaagaacagaatcatccttagtaagcattccaacctcaaacatattttcatgtgtgagttccatgactcacccatcggaggtcatgcgagaattgaccgctcttttcttcacctaagtgccaatttcttttggaaagggatgcgccaggatgtgggcaaatatgtagaatcttgtctagtgtgccaaactgttaaggcatctatgcaagctctgtagggattattatagtccctgcaaactcctgaacgggtttgggagaatttggctatggattttattgttggattatcgagttcgtatgggctcactaatattcttgtggtcattgacaggttcaccaaaatgcccaatttggagcattgccgaactagtatacaaccaccaaagtcgctgaattattcactaacatggtgatccgacttcatgggatgccacacactattgtgtcagatcgagaccccattttcacaagtgcattctggaaaaagttgtttgagcttatgggcactactttacagatgagttcagcttatcatcctcaattcgacgaccaaatggaggttactaatagctatgtggagcagtaccttcgtgcatttacggtcgacaatctgaaataatggagaaaattcctttcttgggctaagtatcactacaacaccaaccatcattcaactattggaatgactccatttcaagcagtttatggcaaggtaccaccatcaattccagcctacaactttggtaccacctccatacaggccattgaagaagacctcttgtcccgtgatgctattctccaacagttcaaagaaaacttgcaccaaagctaaaatcgaatgcgacaacatgctaataagaagagaagaaaccacgagtttcgggtaggtgatttggtattagtaaagctgcagatgtatcgccaatctacggtggccaaacgtcttaatacaaaactttatcagcgatgttttggccctttttcagtcatagctcgtcggggtacaatagcttacactttggatttaccaaccgagagtcgtattcatcccacatttcatatttctcttctcaaaccatttcatggttgcgctccattcaggtactacctattactcaagctcaacatcgtcaataaacctcttatggtcccccttgctattttggccactcgtactaaaatgatcaatgccaaaccagtccaacaagcactagtgcagtgatctttgagctctcccaaagatgcaacatgggaagattttcttcctttaaagcattgtatgatctttcccaccttaaggacaaggtggttttcaaggaggggagtaatgctagcaaattccaagatcaagacccaatatcaattgacccaaagctaatggaccaaaagataagaaaatgggcagagcatgctaaccaacaccaggagttggagccttcggctttagctgtcaacaaaggggaagaagctgctgaaggtgagcatgaagttccagcacatgggaaaaggagccgagtgagacccaaatggctaagagactttgtgatggctgaaaggagttgagaaactagctggatgagctatttttacttttccttgagatgtaatttctttttctttgctctattttagaaacatataaatactggctggactacttttaggtttcttgttgaatgaatttgcaatagtttgcattgagagatttatcctgtctcgaagatgaccttattgctatcagataataccgaaaataattgtatcttaagaattatcccatagaatgccttcttcgcatgaaattttttaaattctaaatttattgttctgtcaataaattttcagtgccttataattttattaaagttgtaggtataaataatatattatttatcacagttgtttcccgttgaggcaaatatattttggttgaagactaagtttcccgtttatcgttacgttttgccaactaactctttctatcaatcaaaatgaatataaatatccttaattctcataaatactatctcaagtagcttttcacaccacttttcagtctcagctaattactcactaattgcgaaaagaggggtgttacaacttattacaacaatggtcatatatacatatttaaataaagcatttgatagttaggaaaaattagacctcactgaatatatattcactaatattgaagacacaccatttagtcacattatgggaacaaagttataaagtctagaaatcttagaaaaattagaacggaaacacaaacacagtgaccatatatatatactacacatataaaatatgatctgtactgaactatacagatgacagttgaacaaaataagattataattaaaattattatttcatttgtataagttaaaataaaaaggaagaaatattattttatattttatatatagtactacattagaacagtaccatctttttctatatatacaaaaacaatatttcaattttctctatatatatatacataaaataaaagttttttacatttataactgaggtgttagcccctgagttttatgcacacaacacataattatcagctagcccttacagccccataaccataacacacatattgttgatactgagatcatgtccggcgtatggttgttcggcaaaaacggcgtcacgcggcttataagctacccaacgagggaatcattcgagcaaaaagagccaccttttccaccagggacagccaccgctcccggcgctcggccacgtgtcctggtctaccttccagccaaccaagtaatccgctcctacgccgaactggaggttcgactcggagaactcggttggactcgttaccacaactcaaacagaccggacctcctccaattccaccgctcccacgcctctgctcacctcatatctttgcctagcgatttcgccaagctcaagcctcttcacatgtatgatatcgtcgtcaaaaataggtctttctttcaagttcgggactcaccaccggccacttcatcataagatcatcatctttattcgtcgtcgttgttgtcatacattttaagttaacttaattagcactttacgttgaatttaattattaatggtttagttaaacgaagtctgatatttatatatagtatatttattacatattttgcactttgttgtgcactaactattatgactcggatctccaaaagaagaaagtgttagatcctcagctttagggggctataatattatatgcttgttttttttagtaatttaattatgaccatttcatgcaagaccgctcttttttaattatatatatttatctaagaatataaaacaactcctccagatggggagcattctattattaacaagaattgtctgcattatataatatgatttttaattaacttagtatttcaatatatactatatgcagattatatgtatagattgacttgagaattttctgggtatcatttatagataggacacctaaatcctaattggcaataattaattaataatcaggtaagccatttaaatgatgaagaatgaatatatataatgattatatattgaatttggttttttctttgtgggtttgtattgtgtacgtagtctttatctgatcactcaaagcatgcttgtgtatggatcagatatctagctaggcttgcttacgtgactcttttcacatgcacgatacatgatgagtttgactgtgtttagttcatgaatatatatttttttatatgtatatatgaatcatgcaaatattactggtcacacattagcttattttactttaagaaagtttatttcataaaaataagaaagtagttatgtggctattgatcagcaattctctatgctatttaataaattaaaatctgttgactcaattcaattgcaccaataatatcagcttagcttttgtgtggtaccttaaggtaataatatttcaagaaatgctaaaaagcactaatagtgtcaagcactttcttacgtgtcattatcgctatttggtctaatttagtatcgggtatcgggtcttatataatttaatataataaattatcattagccaatagtaaggcgacacgtcttgaggatggtaggcaccactggtatccaatagcaatgctctaatatttcacatatgatggaggataatgagacgtgacacttcttatatatacactatttttattaagatcaagacaatgatcaaaactatatatagcatgaaattacactaattaacactcgaatattgtaatcgcgcagtgctattagtattcaaaattacagtccaagcaaatataaatctacaaaattagaataagtaccattgattgagacgaacttaaactataggcatttagtccttaattaatgattaatatttaataaacatttactatatatgaataataaatgtgtactaattaatgtatctcttaacattacttagtatatatactttgtttggagatgtacataatttgtaatagtgaaacaatgtgacattagagtttgtcagcccgagaaccggctgctcacaaagttgagttaattaaatgtattatatgtatgtatcatgcataaagctggccagcagtttatgaatttatatttattttgtatactatattaattgttagtcgcttggccttgcagtgaatataaactttttgtcataaattatagaagaaattaaaaatataatattaaataagtgataggaaatgtttccctatttccctctttttatttgattctgctatatatatatatatatggaatgagctggaatctatgcacatatgcatatgaatcatgatgatatgacatgatatatattatgatacttgattagaccaatcacggctagtatgatgatatagtgtaaagaatttgacatatattacttagtcaaagatttgacctatactacttctctcatctcccatgccatgccctggcccctggctccactgatcatcacagaacagtactgctactacgtacgtttgttcacatgacaatttaaacccctttaatttgttgctttaactgcaaatatcaattaaaatagaactcggatccttgtcaatttttccacttatatttctcgtccatctaaccaaatgatatgattttttggaagaaatgatgacataataattaatgactatagtaggttcatatggatcaaacaataagaagcatatgcatgttcaaatttgtagtaatgatttatgccacttaataagctgattattggctaagctggattacttgacagtgattattgtttttcgttttcttttattgttaacatgttagtgttagttagttgttctctataaatagaaacatattccaactttttaggtaattgtagcagtgagagtaacatgtaattagctgtacaattttacatcacttaataaaggttaagtgtaataattcaaaaaaatgtacaagtatgagattacaaagttttgaagagagttaaataaattgatatattctacctatatatgacaataagatgcaataaagatctcagaaagaaaagtgagataagagaagtcttgagagttttggaagattgtaataatgaagaattgtgtatttgatatggtgagataatttagtaaattaaacttgtttgatctcaattttgaagggtgattgtatagctttctttctaattaataaagctcacaagtcattggtttggccattctacccttgaattaggtagaaaattactcaaactatctactgcaccaaataatatatctctgtgttttggttttaatttttcttacaattcattctttgtttactcttttttggttgtttgttattgattagtgcaggttgtgtacacaacacaagtggcatcagagtcgtggtgttctttggatcaagaactcaatcttataatgccctcgatctagtttaaagttgactagttcaatggacaaaatgatatttacctttggagaattaaaatgaaagaattgttggttaatatcaatggcttgcatattgatgaaacaaactttgagcaagactattgatgtcaaacacaaatagaaaaacattcaagtataaaggcccagagtgtcatcctattgagtataggtgataaaattttgagataattcaaatgtggaaactgcattaggtctatggaacaagtgtaagggctgggttaattatgagtaatagacaatttgtttttgaaatgggttgtaatagacattttaaacattaaataaagtgaacaatttaaatatgttgattattaaattattaattaattaaataatttattataaaatttcatattcatttatgaggtgtataatcttgtatgagttccagagattttttttttgaaggtgagttccagagaattaaaatcatagaataaattagttacctatatatttattaattatttaattaaaaaaatctgatattgattgaaataattttagtttagtaattattataattaaaatgattttgattattttcctaatttaatgttttaaattttaatacgttagaaattaaattgcctaattttatttttgaattaacatcccaaattccaattgggtcttagaaactatttgggcgataatacccaaaatttaaataattgtaaagctgttagaagaattaaacaagttttataattcaaaaatgaacattggaaaaatgaggtggcattagcacatcaagaatacaagtagtcatggaaatttgactcgcgcggacgagtacccattttgaatggggcggggatcacccatcttattaggtaatggagcaggagtggggttcaatttatatactcgaaacaggtttgaagcggggtcggagattataccatcacccaaatatttagtttctaaagttttcatataatttttaaattattacgtattaaaatattagttatacttataaagttgacaattaatcttctctaatttactttgtaataaagactttttaataagtacaatgtttatttattctaaagtcaatatcttatgttttatttttttaaaattatattacatcattttcttattattatttaattttaattttaatgggtatccaatgggttcccatacccaaaggagattctcctaccccgaacccatagggcccgtttggtacgcatgattggattggattagacatgcaaatttgtccaatccagtatttgggcatgttagaagtctggattactaatccagctaacctcatctgtctgggattatttatccca

SEQ ID NO: 24208 - DNA, 1285 bp, Cannabis sativa
  modified_base (1230)..(1240): a, c, t, g, unknown or other
gttgttgttgtaacaatatttggttattttgattttcttgttctgatctaaaactactacttccataaaaactcaccgatgatgaaccagccgccatctcaattttccctgattttttttttcttctagggaatgaaaaaagaagaagaagaagatgaagatgaagaatatatatttatatatataataataagataagatcaattcaaatttttcccaaacaactatgggaaaagctccaaaaaaaaaaaaaatcaaagcatttgtaagagagaagagagatagataaataaatatagagagacaacaagaattcagaaaattataaataagaataatcaataatataggcgtttttctttttctttttttcctttgctctctcttcttagctagctagctgtttggttcataatcaatcatttttatatatgtcatgtatatacacagcatgtatacatgtctataccatatgcatacccatctctctttttttcttttctctctgttaatttgtgaaaattcttttttgatatatatattaaatcaaaatattattttattattatatatttcttccctattttgtttcgaatagtataatagtcataattcattataatatatctatatatataaattggtggaggcgcctgctagctgggtgtcgctgttgaggcagctatctcacgcagcctaatgtgtcgttatgtgaagcccaacccaacccaaatgggatttgcgttacacaaattgggggccactccttctaataatacaattactatttgatatttttacacaaaatcacctcaaattaatcgtataattttacattttttttttacataaataatgttttttttctcacgttgtagaaatatagtgcaatgtagcataaatgttatatttatattgcaaaaaatatagaatgaaattcaatttgatttaatgtggttatatgaaatagataaaaaaaataatatgcattgaaataatctctcttttattggataatattgtcctaaataaactaaatgtaaaaatattgagttatatattatatatatataaaagaacatgagcgatttcattcagtattaattggttttaaaatgaaaccccataaattcttgtcatcctccaccaaaatagaatattaaatttcattgcatttgaaaaaaagaattgcaatgaaatttgattctttttcgggtaaataccattttnnnnnnnnnnntttgcaaaagttacagattagaccctgtgttttgttaaatgacaa

SEQ ID NO: 24209 - DNA, 6260 bp, Cannabis sativa
  modified_base (3732)..(3732): a, c, t, g, unknown or other
caaattacattttggttatataatctcagtttaggaatggtaatcttccattttcccttgtttggttggtataagatttttcattttttgtgtgtggaaatgttattaccatgggaatgagttttaaacattcccttcaatcacaatacaacagatttaatatactaagggagtgtttggtatgaagtactcaaaataattcgattaactggaataataaaatagagaatataattgtatgaaaacttataactgtgtttagttatgcataagaacatgtttagactaccacagtaataatattcttatccttaaatcaaaaaaaattcccataccaaacatggaaatgtaaaaaattatcattcctattgaaaacattacctcatagtcataccaacattactccaacaatcaacaccttttagttcttgtctatttttctccaaataactaggaaaggcaactgtcaaaaatacttaagaccttttttctctttacttgcataatatatatagaagaattttggtcacaatccccatcaaatatgaaactctacatcacgcttgttgaaacgtataaacatgtgtgtgtttaatttaaatgattagaaatgcacatatttggatcaagaaaatctattgtcatgaatttcacaagctgcaatttaaattctgtaaaaacacaaaaaatgatgctttctcctcacttatacattcctacaactccaaaaaagaaaacccagtttattttttgggaaatgaaaatcaatcccatatcgatgaagaacaacaaagaaaaagtaaacaattggcatagacataaattatccttgtgggtgaaaatagaaaaagagaacctgaaagggattggaagagagctcatgggtaatctcagattgcaaaagtttgagcaagtttagatcttgaagagctttagcacccttctcaatgattttgctcactctctgcattctctttcttccactttctgggcttagctagctacttccttcccctaacccggaagaagaaaaatgcaaaagagaaagagaagcttgataaatattctttactctttacacctttttctagttaaagaatttttaaaaataaaaaataaactttttttttttaaataatttttttaacggatttggcacacaaaaagaaatttctctctccaaaatatagctacattttttcattgctaattattaagggttttttttcattgctaattattaatatatatatattttttttcatttctagttttctacactttaaaattgatttttttatttatttattttttttttatatttttataaaatttacatatcaatctacttagtacttaaattataatcaaaattcatattaaaatacatacaaactattggagcaactcaaatcgtaaatttttttaaaaaattaaataatattgtatgagaaaaaaaattaaataatattatatgaggtaatttctcaattagtaaataagatttttgcttttcaaaattttctcgaacaattgagatatttaacaatttttatctattttttttctcatggaagtctaatgtataaaaaaattaggcgcatcattaagtacatgttaaaattcagaattataaattagtaaatatcaaaattcagaagtataatttactacattgacaacaattgaaaaattagacaaaaatttttaaattcaacaatcttaataattcgaataaaacttttaacagtctgaaaaaattcagagacatgatttattacacgcaaaaatttggtggcaaaaatactaattattttttttttcagaaaaaaaaaagctaattcccatgaaaacttgtcgtttcaacataaaaacgacaaataccacgtgtttgtttatggctgctgagagccaaattcatcaaattaaacgacatgtcgtttatacaaaaacttaaaagaagtgagattttttcttcttttcgctccagatttcagtttccatttccaggccaaacttaacgcagttttgaaatttttagggctttagaaagtccctttaaaccctctctctctattggttctctcattcactgagctccagaaaaaaatggcgaacgatcaagacatgagtagctggacagatctcctccactcatcctcgaagcttctcgagcaagctgctccttcagctcaattccctcctcttcaggttactctcttcactttaagtttcgttcccaaaaatgtgagttgagaaagttgagcctaaaatctgattttcgaatcgtgtctcgtttggtgttcagaagtactttttgaaatagcaatatctgctgtgtaattcgcattaatgttgttattttgggtactgagaaatgttgaagaaagggcttttatatacgtggagattgtgcagtattaaaaatgattttgtttgtttgcttaaccagaaaatgaagtgaaaaaagtatgaggtttctaatgtttcagttttatttgaagtacagttgaacaactagtggttatctctgtatatgtgtatgtatgttgatgcaagatttaaatttcacttcaataatatgttaatgtgactaatggagcttatgaaattgtgtttttttttttctttcagagaaatttggatcagttagaaacattgtctaagaagctcaagtcaaaaaccctaagaactgaggctccatctcaatcgattgctgccacaaggtactttagtgattactcagaagttgttgctgtgtttcttatatattttattcttgagtagaagatgtagaatttggtgcagctgtttaactatttggatttcacaattttcatgtattagttctctgaaaattggaatttattttattttcttaatgtattttgttgttttgaaggctgcttgcaagggagggaataaatgcagagcaacttgcgcgggacctgaagtcttttgaattgaaagtaaaatttctttcatttactatataatcttcccatgggtttaaaaatagagaaattggtgtctttgtgatgtatcttataagattcaaggataagctgttgggattggaatataagctattttctatcttttaaaataaataaaaaaaactccattttctctattttaaaccattccacttttaatttcatatggtttttgtatctgtcaaaaatttaattggacgtgtggagagctaattaaaataagtttggttgttatacccttatttcaattttttcccctcatttcagtgacattttgcaatagtatttagatccaacgccagccacttctctttttgttttctccagtagttgtcttttttgaagttcttgcttttttacttaagcgtttttgttgaatatcagttaacaaccatgcagtatttttaaaattgatgattgattagccctttgtttttcctctactgtatgttttatgaagacaacatttgaggatgttttccctgcagaggcaacaactgttgaggaatatctgcagcaggtacgtttgcgtctgcgctcgttattgtttgtttgtttaaaagttctttattgccttctgtacttgcttaggagtaactttttttgtatgctacttttgttagagtggcttgaactttggatgtgtaaccaatttagctacttaaaacacatatatttcaaaattctaaaataggtcatgtgaattagggttattctctctctttctctctctctntctctctctctctctctgtagtatatatttatattttgttgagaagagagactcgttcaatgtagctgcaagcaagcctgaaaattggtttccctccgccacaagtgaggttacctaataaacttgggaggaggttagcatgtctatatctctttttcaagaacaaaaataaataaaagaagaaaagaagagactttatttgactctgagaaaatagcttttctactaaccacttgatatactttggccatgtttgtgactgataatgatttcttaatcatacctatgcaccaggtccatgaaatggcaattatttcagctgtccaagaagctcaaaaggacaacctcagaagttttaatgattacatgttaaaagtgttggaggttagtatgacacactggatgtatattacactaatcatttaatgattagaatattacactaatcatttaatcatttaatgttgtgaagtgataattaagctttgaatcctgattgttttgaaattttaatgcttggtaggaggattggcaaaaagaaaagcgagatagtcttcaaagcttgagtcgaatttccacattacctagaactaacatgatagttagcagtagtgggggtgctcgctctggtcagatagtgtcgatgacttctagccctcaagcttcatctggtgcatctagcatgcagcttgtacctcttgctaacaagcctatcctagagaaaaaggcagctgtctatgctgaagttgtaaagaatctgaatgaagcaagagaacgtggtttaccatttaaagtaagttgaaacaattttttcttccctgtaattaatcctattataattgattcacgccagtaaatgaaagagcacctaaacttgattcttgagtggattatcatattaatattttaaggaatgagtgggttgctgctttgaattttgaagttttagttttttgactagtgattgagttgctgctttgaaaattctattttcactttactaaaagacatcctgacagagtgatgctttagaaattgctgttaagttttgtttaagctgagataaaataccgattctaatggctcgtttctgttgttagcctgctacagcttttaagggtgcttatgagagtttaggccttgatgcatctggtggaaaatctgttcattttcagaagatttggcaccttattcaggtactcgatctgatgtttaggtgcttagtttatatccgattgtttatgattttctttggcttatttataggggaagttatcattttttcccttgactattctataggcattgactggtgaagactcatctgttccaaaaaatgtgtcaaaaaagatgtctttaattattggtgcaaggcgccatcttgagcgcggtcatgagaaatatgtaatggatactatacaaagtcatcctgcccaggtaagattacttaatgtttgggaattattttttttaatttttctaatgatgctcggtgtagtgtaaattccagtaattctgtaattttattgatccatgcttgctcatgtcttatactcaaattgttcatttcaaatttctttcttttgctgttgtgtctattgttgtatttagggaactttctattttgatgttcacaattactctcattgtaggctgcacttggtggggttgttggaaacatgtaaagaattcgtgcattcctccgggttagcatatttgttttaatctctgtgcatttttcatgtcattctgaatattgcttcttgtctaatgtatttcgttcttaaatttacagatccgtttgagggactatggagttctagattttgatgcaggtgattctagaaggcagcctcctgtggatacaacttggcagcaggtctgcagtattaattgctctaataattcaaaccatctaatacttgtgtttaattcatattagtctttgttgcattgaagttggagttgaaaatatgaaatgtaaaacagaagacatttttcaatagtccgactttgttttttgctttaccttgccgccttcttgttgtgcaacaggctatttaggcataaattctcttacgtgtgggtcattaaacatttttagtaatacttgagtctctaggctatgttcggtaggaaggagcgagaaatggatgaatggagagcttaaacatttatagtaatctctccttccatcactctccctccattcctctccatccacccatctctcattcctaccaaacacttttaatttctaactgctcagatttgtgcatgtacactcactgtcggacaagtttgtatatcataacttgattactcagtaaatgaatataaagccaacatttgagtttagctgttattaattcatttcatactaaatcatgtttgttgtctgagacagatatacttttgcctgagaactgggtattatgatgaagctagaaatgttgctgcgtcttcccgttcttcacaccagtttgctcctctggtatatatacatataattgtgttatctcctttat

SEQ ID NO: 24210 - DNA, 2255 bp, Cannabis sativa
attattacctttattgttttggacattatattttgtaatatctattagattttctattttgttaaatgataaattaaattttatatttttcaaaataatatacattaaactacattttcattaaatttttattttaatacaactaacatgttctagccatggtcggctcaagggtgaggcagcaggagcccacgctcaagaccccacctaagctcaaattttttttaacaaaatactttaaatttattttcttaaaataccataatttgtatttttactattgtttattaaaatatataactattttctaaaaaaatatatctaatttagtttttaagatgctagaatattttattttctttttaaaaaaatttaattatatttttaaaatactatattttaaatttttaccactatataagaaaaaacataatgtttttcatataaaagagcccaatttaactttttgacctaagatctctaattagcttgaagaggacctatcacaaatagatgaaaaaaaatataactactcgcatcataacaccttttttattattatttatcattttaaggtatattatactttgtaatattttgaaaaatacaattacccaaatatatatacataacaatatataatatttacttgcatctatataaataggcaatgtgtgtacaatacttgtattgtttgactaactttatgagaaatattaaaaggtattattggtacttaacaacctcctcagtgtcgtattactaatgatatataagtatggatctcatataacttaataaaataattttaaaaaaaatatcgtaaaccaattataaagtactacctataaaaaaaaagaagtattaaagggtcgaatagtaatgttgtattgtagcttaatttgtcccttcttattagctagaggtgggcccactcaacttgaccaaaaaatacaagagagagagagagagagtagatatgtaggctaggtataggtataggatataggagagaagggggggacaaaggagaagggcaaagatgttgaatttggttgtcaaaatgttgaaaaataaaaacacaagcatgttcttctcttaatgaacctctctactctattctttaatttccccatacacaacacaaaccccctcctgcatttaatgcatatatacattaattctcatctcatctcatctctacatttactatatatatatcccaaaaacgcatcctctcctattacatacacaactatatatactcttaaactcaacttatataactataaatacatattctataactgtactaaggctatatataatatatacttgatttgttcgataatctcgatcgtaataatgaatatcaatatgtcttcttgtgttgccctaattattttcactcttctttgtcttaatgcttctttgcatgcatgcaatgctcgtcatcttcctcatcatcatcaccaggttattataattagttatataaatatatatatacaagttttttatgtatacaaaaatacaaattaatatatagtactctctctaacttttattacttattattaattacagcgaaaagagcaagaaaataataataataataatatgaataatggtgcaattcacgctttgaagcacaaaaatccattgatgatgatccaacaacaacatcatgatcaaccttctattgatcaaggtacctaatttaattatatatatatatgtactattatttccaatcaagaaatctctttaggtggcttattagtaagcttatatatactatgttataatatgtatatagtttttcataaaagacaaacttattatttttatcttttcttttttataacaatttatatttagaaaagcagtttgttatgttattctactctatatatgtgtgaataataattgtgagctttatatatatataatatacttaatttgctaaattttagcctcgtgataaaattttagtaatggaatatatatcttttgataacatttatcaaaaatcccctcaacactaattaagtagtggatgagtttattaaattaactaactaaacttatataaaaatagaatttagtataaagctaaaaaatacaaacatcaattctaaaatataataaataatatatattctcaaaatttgctattatacctggctaattctgatcaagccgcatcaataaattaataaagtgttgtagttatagatttagtttagtgattt

SEQ ID NO: 24211 - DNA, 1574 bp, Cannabis sativa
aaattaaaataatttacataatttataatttacttttatatatatatcatttttcaatgatattcaaacattttggaaaatattttttattaaaaaatatatttttataatagttatccaaattgtaaaaataagataaaatttatacttatcttatacttctaactataaacaaatgtagaagcttagttaagcgagactaaaatatattaaatgctcttaagataataactattattaagttattagtaaaatttagttagaatccaatatagtatgaaaatagatctcaaattaatttgtgacgtattgaagaatatattaatgagtgaaccaattttttttttggtaaggatgagtgaaccaacatgggttctctctctctctgatctcttttgcttaattacatttagatgaattaaatttatgatatataacctcaaatattttttcccttaacaatcattgtggtggggctattataatccagtatgttgcataaaatatgtaacacattatcgttataattactatatatcttataatctgtgaagtgggtagggtcggttacaaatttctctattgggtctttttcatttccttaaaattttatttgtcatgataagaatgatattctagggttttatttccactctaataccaaaaagattaaaaaaaaaaaacctaataataaaagcaaatggccaaagtttctataatagtactaatacccttatgaaagtaacttcccacctactactccttcttcctttttcatcttttctttttccacttatttttttgagatgactttgatgtgtgaattggatttttactatgctttaattgcccatgccatacgaaaagtagatactattcattcacacgtatatatttatctagcaaaaaaataaaagaaatgaatctgaaagggtgggtcttagtgtttactcttttttcattggatatgtattttctaaactaattacttataattagatatataacaccatataagctcaaaacagtccatttcatattattacaaactttaaacttgtatgagaaagaaagagatgagagaagccatatggtccatggcttcctttttattcaatgaggatttgacatgtctctccaacaataccttcttcattttagcatttatccttttatgacttgtactatcatcttagcaatatgtggtccacttacagttttctctctctttctcatctatttttcagcgacaggtgtacctatataacaatgtattggatattttgtaaacattgttcatactaaaagacatggtggttagtagtgataattaatgtaattaagtattaattttatataattttgtaataattttttaaaaaatatcaatgattaattataatgtgacacgtcttagaagtattaggcatttctgataattaataacaatgctcgtacgtattgtcagagtgaatgttatccttcaaaaaattatatataatgatgaatatatatatatatgggtgactattcaatggttacatttgtagtgtaactatatggttatatttttc

SEQ ID NO: 24212 - DNA, 2566 bp, Cannabis sativa
ttagtacattcaaaatcccattagataaattcctaatgggaaatttcaacaatatttcaattattaagattcattatttcttaattacaaaatccaaaaaacgtactaaaaatctcaattaaaatttactatatatacagtgtactcaaaaatacagtaaagatggagattaatactttatatacggactctcgaatcttaagagagaatttttcgaagacgacgtcatattaaactttaacaacgaaacttttcaaaaattgtatttttaaaaatttattattttaccatcaaaagcattatcatatattttattatatataaaagaaacttaattatttgaaatgtgttttatatttcttacctacctattataattttatataatcgtttcttgataacctcaatgccataatcatacaaaaattcttttgaagaaaaaaatagaaaaatcatgcaaaacttttttttttttaaagaatttcactatatatatatgtaagatagtagttgataaaattatatgtttaaaagtacatcaaatttaaagcacattaggagcacatctaataaaaacagttaaactcaggcatatggaactccacgctaggcttttcttttattgtgtctcgttatcatttgtatgggttggatccaaataagattcttgtatgggttcaattcaaattggattctcggtacgactctcaactcaattgattttattatttctttgaagttttcttcgaaactaaaatcggagtattaatttacgggctcgcttgcaatgaatttggaaggaaattagtatgtatatttgtacgtgttttacgtgtcacattttaaatttaaccaactaaaattatataatgaataattctttgtgtattaatgtgttatcatgatttagggtttagagttaatggatggtgtattgtttcattatttgatcctaaagtaatagatttttagaaatacatttataacttacatggataacactttaaatatttttaaattatgtgggacttttgtatttgtagtagtttatttctaaacaaaatatgaaaatgtcaaaaaatttaaaaaatacaatgaagaatttttaagatatcacctaaattttatggtactttcctttatatttatatatatagatagataattaattggatcttaaaggacagctctttgaacctttgatctccaatggagagaagaaaaaaaaatgcaaaagtaattataacaaacagtaatagtcatagtagtaaagtgaactagaatcactgaaattgaagcaatgtcttgattataaaaatatatatacataaagaaatgaaagatctatatccctatttagtatatataaacaccacccattatctttacacattagtagaagcaattaggtatacataaatccacataaattaaatcccctgttccacataagaagatcattaattttggtaagtagtttttttttcatattgctttaaaagagtatagcaagttttgttgcattactaaccaaatatcaattatgtgattttgttttgttttgttgaagattaatagaaaccaaccaacatggcatcaccaacaatggaggacaatgaagttgctatagatattgaagcaatgtcaagtagcttagaaaataggttgtcgggtaatctagtcatgtcatctaatttttgcatattcaaagtcccaaccattctctcaaggcatactaaaaatgcatacgaaccaaatgcctttgccattggtcctttccaccataaaaaacctcatcttcaaccaacagagaggatcaaacaaaagtacttgcttgatcttctatctcgtctttcacataataataataatcccatttcaaatactcaagctccttttgatccaatgtggattaggaaactaagcaaagccattaatgagattcagaacaaagctcatggctattatgcggggccaactgatatgagcactactgagttcgtagagatgttactccttgatggttgtttcatcatagagttgtttcgtaagaattcataccaatctgatctcatagacaaagatgatcccatattcaccatgtcttgtctactccaatttctacaccatgatctcattttgctagagaaccaaataccttggtttgttctcaacactctgtttgatctcacaaaatctcaatccacagataagaaaagccttgttgaattggccttagagttctttcctagccttataaaaaagaaaccatttcgtttgaatctttctaatgatgatcaccggatacaacaaacaaaacacattcttgatctgttgagaaactcattgatttggaattccaaggtaattggaaaagataccaatcatgattggcagcatatacgcacagctacaggtctgagagactctggcatcaaattcgaggctagcaattcagagtcaatattagacatttcatttatcccaagaagaggtgttgtgtcaattccaccacttcttattcaagaaaccacagaaacaatgtttcgaaacctcataagtttgg

SEQ ID NO: 24213 - DNA, 3817 bp, Cannabis sativa
aaagcatgtcctgtagatactttgtttgtgtgaggagtaatccttgctctgtttttgtgacctgaatacctaggaaatagtccaccaatcctagatccttaagagcaaaagtattgctcaaaccagtgatgacatggttgattgcagtttcattgctcctcataatgagaatatcatccacatagaccaaaatgtagatgcaatgattgattgtaacctgaataactaggaagtgtcagcttgggatgagtgaaatcccatgtttacaagagcattggatagtttctcaaaccaggctcttagaacttgtttgaggccatataaagccttgttgagtttacaaacatagtttggatgttcagtgctgacaaagctaggggattgttgcatgtatatctcttcttgtaggtctccattcaagaatgtattattgacatctagttgcctaatagaccaaccctttgtgacaggaatagtgaggacaattctgatggtaataggctttacaacaggactaaatgtttccttaaagtcaaagccagtttgatgatgaaagccttttgccactaatcgagctttaaacatgtcaacggtgccatcaacattgtgttttattctgagaatccatttgcagccaattggttttctatgaggtggtatctatactagcacccacgtattgtttctgattaataccttaaattcttgtgtcgttattcaattccattaaggcatttgaagagctgccttgacaattattggttaacaagaggcaaggaaggcctttggttttcgaacctcagctttcagcttagttgtcatggggtgagttgagacaactgtagtggatcccctattgtgtgtgttatctgcagcaataacattagtggtaacatgtattacaaggcatattagtaacaatgttaagagggggtagattggatgtagattgaatttgaatgtcaactaactaactatgccctggttcagtgacgtggacaggagctatggtgttgctgatagtagatggagtttggttgtgcactagtgtagttgcagatgattgaatgggtgaagtggtagatgatgcaggagagtggaggttcaggtggtggagtgttgatgtgcagcgtggaagaaagaggtgggagactagaggtagacacaaagaagttgttggagacagattgtttttgagattcaacataagggaaattgtattcattaaagatgacatccctggatatgtaaactcttttatccttaggcatacatttaaaacctttgtgggacatgctatacccaagaaagacacaaggtgtagacctatagttcattttacttttgttgtatgatctaaggttagggtagcataggcatccaaagaattttagcatggtgtaattaggtggagatgtaaagatttttttccaagggagagatgttttgtacgaaagcaataggcattctattgataagaaatatggttgtcctaaaagcttcatcccaaaaagatgctttggctaaaaaagttaatcctgtttctaccacatgtctgtattttctctttactacaccatttatgagtgtgggagcaagctaacctatgaactataccacattgttcaagtagattagtgagagccctaaattctcctccccaatctgactgtaaggttttaattttgtgaccaagttgaagttctatttgtgttttgaacttggtaaatgtaggtaaggcttcatcccttgttcttaacatgtaaatccatgtatacctagagtatgcatccacaaaactgatataatacttataaccattaaatgaattgacaggggcaggactccataagtctaagtgtaattattgtagaggagcatgatagacagtggtggaaaatggaaaaggcattttgtgatgtttaccaagacaacatgcagaacaaaaatcagtatatttttttattgtcaattggtatattacatgactttagggcctgtttttcaattcgagcaatagggtggccaaacctactgtgccacaaaaaaaaattagaatcagggacaaatacttgatttgtaaaatagtgtggagtgcattgttgtttgggaatgaaagtgtgtggaagatgagagagttgatctgaagaaaacttgtagagaccattctcaagcttcccaatcaataatgtcttcttggtgtcttgttctttgacataacaaacagtgggatgaaattcaaagaacacaaaattgtcattagcaaatttggagacactaaggagattttttgtaatggatggcacatgaagaagattggttaatgacaatttttagatgtaaaaggtgagagaaaggaagagttaccaatgttttcaatggcaagaccagtgccatttcccacatagacctgtacctgacttgagtagttattgtaggaggcaatgatgtgagatgatgagttgcctgagaatctgggtaccaactatcatcttgaatagtttctggtgtggcaagagaagcttggatttatgcaatgttggtagaggcagtaaattgattgaagcattcaggtccagtgaaagatttatcaaacatgtagaagcattgcttgacagtatgtccaagcttgtgacatagttggcactggggttttgagtccaagattgagattctcctcgaccagtggtggatgtccattaccatcattgtgagaatgttgaccacgactagtgttgaaggcacctcgagctacattttgcatttgggattgagactcagtggatcgaaatagggcaccgcgattatacccagcaggcatctgagactgtggaaagtaagatttgccttgtgtattcccaaaggatggccttgtatgaacaagtttggcctcagtcttgatgatatccaaggctttggcattcttttcaattcgaaccaattgtgccataagtaaggcttccatctcagtaaacgagtatgcatccttccttgtggtgacagatgtgacaaagacatcttattctggtggtaagccattaaagatggcttcaatatgatcttggggagattttttgtgaccaatagttgcaagaagatcgatgatccccttgattttcaccagatagtcgttcaaagaatctgtcatcttgatgttcctgagttgagtcttgtacaggcctatgttggcagaattgagagcaatatagtattcatttaaggctttctatatctgatttgtggtctcgcatccaatcatgcgatttgttattttcacaaacatcgaagataagagctaagaaactagtagattatcttgctgttcccaatcttcaaagtaagggttgacgacattgtttatttcatcaactgcattgaggaattttggaagagctcaaatattatccaggaacttttagagccggcttcctttgattgatgcaagaacctgaagtttctagggtaggtagttgtgctcatcgagcttgatggataaagaatgactgaacaagacatggtaagaacggggaagaagagtagggttcgatcttgacgctccaccattgtaacttgcagtagatgccattgaagcttaacgattcagctctaataccatgttatgtttcaagagagatagaaagagaatgacaagtgaacaaaagattgtcttattgaaagagttgtacaatatatatacaatagcggcctaactgacaataacagaaatgaacagtaggcaaactaactctaacaaactagctctagcactaactaactattatctcccttaacagtaatcactacaaaaaaacagcta

SEQ ID NO: 24214 - DNA, 7656 bp, Cannabis sativa
aatttacttctgatgtgttagcaaaaggattggcaaatcaacgttggtattagaacttttgccagcacaaaatgaaaaatgctggcaaaaataacttttctttagttagattttagtcactacaaatgtacatgtgctggtaaaattttgacctttttgctagtacagtttgtgaaatgcgttggtaaaatttcttgtagtatatatatatatatattatatacattagcataagtgtgcatgtgtataatgatggttattatatgcatgattaacttgatcagatagtatgggcatggcttcatagtaattttttttttttaaaaaaaaagaaatatgtatgtatgtatatatgccctacaaattgtattattttagtacaattttattgtatatgcatgtgacactaatatatgattgtttataatatcgagaatgatcatatatattctcattctcaatagtatattttacctgataattctcttacatcgatcattaagataagatagatccatatatattcttataattcccaatatgtattaaattcttaagtgtattaattttttttttttttttgtcttttatataatttttaaaaaatgatcttcatgacaacaaggctactttataaaaaattataagtaaaaaagaaatgcaaaataattaaataaagagagattattcaaccatatattataaacttttaacaagcaacaatactatatggttattatatccatataaaaaatacgagtagattatatataatttacacaatatataatttcaactaattatttttatttaagataaatttcacttatcaaaaataatttacgtactataagaatatgtgtatttatgtgtaaattatgtgtaaatatcattattaaaaaaatacatattgtatatggttattatcggtttttaattaattattttctttttgaattgctctgatctaccaatctggtgtaatctcaacgttaataaaaatactaattgtatccaatttatactgacttgtttaattatccaaacttattatgtaattattaataattatataacctagtaattacagcactattttaaaatatggagaatgatagtatcaaattgtaaatacatataaatttttgttgctatgtttgataaaaaaaaaagtaaatagtaattatgccgaaaaaaagaatttttaataatatctttttttatatatattttatttataattttacgacttaaaatttttaattataaaaatacgtttgtaaagttttaaaattacaaaaatatatttactcagcgaaaaattaaaaaaataacaagaaatcaacctcacgacaactataaatcaaatataaataaaaattataaaacaactacaaacaaccagaaaaactacctcatgatcactataatacaactataaataaattataaaacaataaaaaaaatttattatttttattgaaaaagtatttttataaataaaaagtttaaagaataaaaataaaaaaatttccattgatgtatttttataatttttttcaaaaatttatttataataaataataattacttaaatagatagtatatagtaattgtacttagtatgacaattagaatataactaaaaacacttcagctacctaaaattagataactattgtgtaaaattatctagttaaacaaatactttaaacttaataactattttgtttataaagtaatggaagagtaaatattgattaattcaatgtatgtcatttggcagcatagtattttatatatgaacaaaaatagaattggtaacttaattctctaatttttttttatatattagcttaaaggagctcgaacaagaatgaaagagagtcaaaacagaattgtattgaatggaatttattcacttacaatataaacaatgacagctatttatactagcatgatattacaaaccaaaaccagcacactactcaattactaagaatagcaagcaattaattaactaactccctaactaaccaactaattacaaagtttatactccccctcaagatgagtgtagatatctttcaatctcatcttgtctttaaatgtgttaaattggttagggaatagtggcttagttagaatatcagcaattagatcttttgtagaaacatgaactatcttgatcacattttgctgcactttttctctaactaaatgatagccaatttctatgtgcttagtcctctcatgaaatactgaattggcagctatatgttgtgtagacttgttgtcacagtagagtagtgcaggcccttcatgctcaaccttcagttcctttagaatggagaggagccaaaccactttacatgtagtgtttgccattgccctatattttgcctctgcagatgatttggaaatagtatgttttttcttgcttttccatgatataatggatgtcccaacaaagacacaaaaaccagttgtagatctccttgtatttggacaagcagcccagtcaaaatcagtgtaagcatgcaacttgacatctaagtttgcagcaaagaaaatcccctatctaggactacctttgacatactgcaaaaccctttgtgctgcatgtagatgagtgactctaggtgtacataggaactagctcagcttgttaacagagtagaaaatatctagtctagtaattgtcaaatactgtagctttcctactattcttctgtacaatgttaggtcagcaagctttttctaatctaggccaagcttgggattagcttccattggtgtgttcataggtttacatcccagatacccaaggtcctccaacaattgcaatgcatatggtctttgtgaaacaaaaatccctttctctgatctagccacttcaagacctaggaaatacttcaattgtcctaagtctttcagctgaaattgagcatgcaatctgactttcaaatctccaagctcagccaagttgttactagctaggattacatcatcaatatatacgagtaggaagatgaaacttccattggaatgcttgatgaataaagaatggtctgttgctgagtgatgaaatccttcttcagttaaggcacttgagaattttgcaaaccattgtcttgaagcttgcttcaagccatacaatgatttttttagtttgaaaactacatttggtggcaactcccccttaggtctatacccttgaggtagagacatatacacatcttcatggaggtcaccatgtagaaaggcattgttgacatccaactgatgtaaatgccaacctttgatggctgcaagagataaaaccaacttgatagtaactaatttagttactggtgaaaatgtatctttgtaattaatcccctcttgttggttgtaacccttagcaaccaacctagccttaaacctttccacactcccatcagcattaaatttaatcttgtagacccattttgaaccaatgacatgctggcctgcaggtaatgaaacaacaatttaggtaaggttcttctcaatagcctctatttctgtgtctatagcattatcccattcagggataccttgagcttggttgaagaattttggttcaaaatggcttgaaagagccaaaacatcagctctaaatgcaggagacaacctgtggtacccaagaacctgagacaaagggtgagttgtgataaaagaagcctgaggaaaattagaaagattattagtggccaaataagagtgatattcatttagatatgagggttttgagacttttcttcctgatctagtatgtggagaagtgacattagacatgtcagaagtaatcacatcagaagagttaggtaaaacagtttcagaatgagattgagaaatacctgctgtatgtgaatcatttgactctgcagtatgaggagaagcatgaaaaaaagattcatgtgcaggaggaagacccccaatatgaacaaaagaaaaaatgtgttcataaaagtagacatctctagaaatgaatgtcatattagtgttcagatcaagtaacttatatgctttcataccaggagggtatccaagaaaaatacatggaacagacctagatgaaaacttagacctagattgactcaaagtagaggcatatgcaaggcatccaaaggcttttaagtgttcatatgtaggggctttagaataaaggacatcaaatggtgacttgttttgtaggttgggtgtaggttttctgttaattagatatgctacagtagcaacacaaactccccattacaccaaaggaatgtaagactaaaataataaagccctagcaacattgagtaaatgttggtattttctcttaataacagagttttgttgaaatctttgcacacaagaatgataatgcataatcccaagttcattgaacaagtctttgaattgtaactcttttgacttatctaacctaactcccttaatggtattaccaaacttgttttgaacaagctttataaactgaggtatggcaatttgagcattaaattttttgcttgatgagtttgatccaggtgtacctggaacagtcatcaacgatggtgatgaaatacctatacccttcagttgtcattgtgttataagggtcccaaatgtcaacatggattaaatcaaaacaattttcagcaacattatgattagatgtaaaaggcaattttctttgttttgcatagtgacaaatggaacaatggaatagggaattagaatcatcatgaaactttaaaattttattcaaaggatgaatttttacacaagatggatgacccaatctatagtgccacactatttcattagaaatttttgaatcagaaataaaagaggaaacaaaagcaaactttctatcactgttttgattacaactcaagtaatacaagttgccaaactttctacccatcccaatcaccttggtcttaaaagtgacttggatgacacaattttcttgagagaataagaaagtacaattagtttgtagctgttaaagaattgacagacaacaaattgcacttgaaagaaggcacatataaaacattctcaagaacaagatcaggagttaagacaattgttcctatgcaagatatttcagtgtgtaatccattaggcaaaagaacagtctttaaattaggatcaacataggtatttttgaataaagaaaggtcaggacacacatgatgtgtggctcctgtgtcaataatccaattggtactatggataaaaaaatttcttaccagagaaatgggaaaccacaggctgatcatcagaggaattaggagtgctattctcagtgcttttctaagcaaggaaggccatgagcttctgacattgaacacttgacaggctagaaatgagatctctctccattagcatctcctctggttttccttcatccattcctgaaaaatttacactagcagacttcattagaggtcctttagcatcgcgattagggaaccttccatgaaatttatgaccaggggatatccattgagtttatagaacctgtcaattgtgtgtccattcataccacaatgagtacaattgtactttgatctaaaaggttgaacagctccaacaaattgtccattgttgctcgatgatactttatccacatcaaatgaactattgcatccactacttaaccctctttgtctctcttcttgaacaacagcagcatatgctttgttcacacttggaagaggatcacgcatcaagatctgagatctaacaaaattgtacgaatcattcaatccaaccaagaattcgagcaatcgatcctcctcctgatattcttgaatcactttcattacaccacatgtacaaaaggttgtggtctatactttctaatttgatcccatagggccttcaaacgagtatagtatgtagtcacagtattagatccttgagtaggactctccatggtctttttagcttcaaagattcgtgatacattcttctcattgaaccgttcatgtaactctgtccaaatttctgttgcattgtcataatacattatgttatatgcaatctcatcagaaatagcatgtaaaaaatccaagaaataacagtgttattgcatctacaccagctatcatagtcttcatgatcatcattgggatggggaagctttccattgataaatttcactttatttcgagcaaccaaagtaatcaacattgatcttctccaggtgctgtaattctcactacttttgagaatttttgaaacaagaatgacacctggattatcaccattcgaccggaaataaggattcgagaggtcattggcattagtcgatcgtgaattttcaccaagaacaaagaacatattcgaatcacaaaaggtgttctctgtttcatgattttctcaagtgtgtactccaacatctcaagcttcagttccaccacctcgagccatgaacaatagctatgataccatattagctcaaaggagctcaaacaagaatgaaagagagcgagagagagagaatcaaaacaaaattgtattgaatggaatttattccgttacaatattaacaatggcagctatttatactagctgatattacaaaccaaaaccagcacactactcaatcactactaactaacttcctaactaaataattacaaaatttatcttgatatatacatatataaatatataattctttcgagactatgctctaggccaaatgttgagtgtatacataaaaatgctatacttacaaataattatatatataaagttaaatattgtgcaaaaggaccaaaaaaaaaaaacaaaatattttatcgaacacccaactttttactaccaatgatctaatacatggttctaaaatttgaattgccctctttcaaagggcataagtatatcctcaatttttttttatttaaaaaaaaacagactagttttacctttgacttgcactaataagattcctgcaaaacttctcttctttctaaccccatttggaaagaaggcttctatttgtccggacttgtatattataatagttatatgcaataaaaaaacatcatattgtaataaaaacaattacattatttatgcccctaattcaacacatttatgctattaaagatagtgtttgaaggattaatttttaacattgtaatcgttctagaaataatgttgcccataatttgtggctaaacttactaattttcttgatgtggttataatttggtggtcgagtttactaaattttatttgagtcttgttgtttaatgaaaatctcattttattaaaaaaaaaaaaaacatatacatacatcatataggattagaatattcaacattatgtatattatattgtaaggagttataattaatcttatcaacttaagaggacttcaaagttcaaattcatggtgaattgaatttcaatttcttttaataataaattagaacaaacaaaagtgtgttggttgcacatgcatatgaaaaagaatgaaggtatagtttgggggcaaaatagtaatgagaatagcaaaaaaaagagtaaaaaaaaaagggaaaattttagtattatacctataatataatcaattaacagaaataaccttaattaaaaaaatgtaccctaataacgtgacacgtaggc

SEQ ID NO: 24215 - DNA, 2550 bp, Cannabis sativa
  modified_base (2519)..(2524): a, c, t, g, unknown or other
tttttaaaaaaaaaaataaagaacttttggaattacttgcatatttataatatataacactgaaggaaaaaacgaaaacattttcggataataacgatgttttcatttgttgagacaatgacttcaaccaaaatttgataaggttaacaagcaatcacatgatccccatcacatttgtaatttttaatatgtacacacatatataaatatatatattagtaaaaaaatatatatgtttctttatctttccattctccactatttcttttcatttcttcagttcattggccactactttctctgaatgtaattgatttattggatttgcaaataattttaaaggattgctattgtattgaatacaagtggtatctagctaacacttttaataagtgacattatacgattaattaattatattctttaaatgatattgttttaaattatataaaatttaatatttaattacactgataaaactaaaatattaaaaaaaatgtgaagtaccaataataccttttagtatctctcattattttaacaagaaatcttctaagttctactacaaatcacaaatctttccacaaaaacttcaaatttattctgtatttaatacttaaaacaacaagcagaaaaaatttgtttggcaagaacattaacccacctctgactaatgttgcatagaagataatatatatttatattgaaattggctaggtaaatttttgttgtataaaattaaggtaatctttaatgaaaacaaccatggagaaacgacaaatccaattctatttattacatgaaaaatataccttttaaaaaaattagtattaagttgcatattgtgataataccataattggtaatatgggtatacccccataaaattacatacataaaacccaataactagttcaatcatgggtctaaatcaaaacaattcattctacaaagacaaatgataaatgtcatgaatttcaatagtcaaagtagctatgactttaaagtaattagtgcaaaaatataaatgtttgatctatctataaaaagaaaaaaaaaaaaaagcctaatattaagtatgtcattatccagttagaaactaacccactcagtacataattcaaattaatatgtcaaatcaaaacaccaagttgtaaatcggacatatcaggagaactatatataaccctttaatggttttttttttttttggccattaatgatggtcgagtacaagataaatatttagtttagtgaatttatgtaattgaccctttaaagctatccttctatttaagaatttaggaaaaaaaattagtcagatagcatagcatacgttataattatttaaaattatttgtaaatttttataaaatgctattaaagttagttttaaattgctaatgtctagaaataaattaccacatataaaatgaataagtcactcttctaattgtcaattaattttgagatggaacctcatgcatgttatcccaaattctaacaaattacaaataatttacagtgtcaaaaattaggtttaaacaattacttaccacacgtataagaaatactcgtgcatataacaaaatatgtaaatcttatttttgacattgcaaattactcgaaattttttgaaaaattaacaaatggtcctaattaactgtaactgttaggatatttaaagtctattatttatgtcattttaagagttaattttcttcttcattatcactttttggaacagaattacgcttgttttttttttttttttttaattttagatttcaacacttggaatgtattggtcaatttttttttaaaaaaatgatctataaaatagagaaaattttataagaaaataaagctaaaacttcaagcctaaattagactatgttctgatcaaattttggagaaagtcaaaacatgaaagttctagatctctcttttatcttttcggaacatttgaatcgtccaattccgagcaatattgaaagagttatggctaaaatattatccatcaatgcagcagaaagctcactacccaaataaaggagggttatgcctaggcatagaaatctcatgcctaggcccgtgtttgcaagcaacccaaggacgtggacttttggaaacacgggccgcgacataaaattttcatgtcacggcacgcccctttaattttcaaaaagatgatattttttttatcttttttttttatctatttttagctataaaaagagtgggacttcaatatatttgagcaagcaatctaggagtacgaaaatcagatagcaaaatcaatcgagaatgttttttcaacaaagttatcaacattcttttattctattttttcttcttttattcttaattgatatgcgtgaagttgatacgatgaacaagagtaattaaacattttattaggattttgatagatactgtttgacatcaatttatggttctaaagtgatagcaatttttctccccgaactttgacatataccaaatcatgctccctgaannnnnntggccgttaaaaattcctcctgaact

SEQ ID NO: 24216 - DNA, 5952 bp, Cannabis sativa
  modified_base (5123)..(5145): a, c, t, g, unknown or other
tattattttggcttggaaaattggatttgagtttgaatgtattgagtcctcccaaaaccatatctctggctttgtgttttcggacccccctctcacccttggctcctgtcatgtgtgtacggccccccgtatttccacgcaaaaaaagctttctgggaaaaactaatgtcgttaggggataggtttggtgggccgtggctggtcttaggtgatactaactttgtccttagtgcttctgaacgggttagctcaaaaggtagggaccagtttattcctataatctcaagtttggtgaatgcccgggggcttatttctttgcccatccagggtgacaggttgacctgggacaaccatcgctctgggcccaaccacgttaagtcggccctggataaaggtctagctaatggtgattgggttaggcttttcccgaaggctgttctctgctctttccagactgccaactcggatcaccgccctttgtgtctgtattctggtggtttgggggagaccatcagaaggaacttcaagtttgaggaagcttggactagggatgagcgaagcaaacttgtggttgattatgcttggaagtctatttctttcccttgggccccggccaggattttcaagaagatcggggctacacgggttgctcttatgcattggaatagatcccagtttggtaactttgacacccaaatctgggatctggaaagaaggttggactgttttcagaagctgcctgtgggatctagagattgggaattagaaatggagcttcgcaattctctaaacgaggctcgggctaggaaagaggtgtattggaaacaaagggctagaatttcctggctgaaggaaggggacaaatgctctaaatttttcttcctttctgcttctatcagaggtagaagaaatgccattgagagcatcctcaataaagacaatgtgtggataaccaaaagggagctcattgggaatgaattcttggagtttttccaaggcatcttcaggggacctgaaattgatgttgattttaattgtaatggccttgtccaggatagactgtctttggatgatcaagctgatcttattagaaggccttcccatgaggaaattcggacaaccctatttgccatgagtagtaacaaagctccaggacctgatggtatgtcagtgctcttctttaaacactattgggattcggttgggtacgacttctgtgatgcagtttcaaacttcttcattactgggcgaatgcataaaggagttaatgccactaatattgtcctaattcccaaggtccagaacccgaaaagacctaatcactttcgtcctctttgcaatgtggtctacaaggtcatctctaaaatcattgctaataggatcaagcctttgttacctaagcttatctgccccacccaagctgcgttcgtgctaggaagggctatacaggataataatgtgatagcccaggaaatagtccactttttcaatcgaaagaaaggcagagaaggtttgtttgcaatcaagatcgatctaatgaaagcttatgatagactgagctggggttttatagatcatgtgctggattgttttgttgttccccaagagttccgaacttgggtttctcagtgcatttctaccacctcccttaatgttttcctgaatgggggatcagttggcaagatctttccctcgtgtggtctccggcaaggtgaccccttatccccttatttatttatctgggttgcggaaatattatctaggattctggaggatgcccagagttcgaagaccataagtgggatcaggctgagtaggggaggcccgatcttatctcatatcttctttgcggatgacctgattcttgttggtaaagccaacttagaggaagccaagggttactgggactgccttgaaaaattttgcacctggtcgggtcaaaaggttaataaaatgaagacctcaattttcttcagtaagaacactcccaatgttatgaaacagaggatcaaggatttgctgggaatcggatcgccagaaggaaaagttaaatatttagggctccctctattcagatctagacaaaaagatgctgattttcttttattctggataacctgactgagaaattgcatggttggaaggccaagacactctcgaaagcggggcgagctactctaataaagtctgtgggattggctcttcctctgtacgctatgcaaactactaaactatccaaccggcttgcgactaaaattgatggattggtgcgtgatttctggtggggctcggagaagggaaaccatggtctgtacctaaaagcctgggataaactatgcctccctaagtctttaggaggtttaggattccggaaatataaagaaatgaaccaggctttcctcgctaaatgggggtggaacctcctaacaggcaaccaatctttatgctgtcgtattcttgaagccaaatacctgaagggtaagtcttttctagattgtgttccgaaggcttcagactcgtggttttggaaaaatgtgactaaggctagaactatcatttgtaagggtgcctgtaagcgtgtggctgatggtcaggagacgaacatatggtctgacccttggattgcgcacctaaagggatttacccccatttctaatgggcggattatgaatagggagtcaaaggttgctgaattacttcagactaatggcggatggaacatccaaaaacttaatagttatttcgaccaggaaactgtctctgctattctgaaagggggtagccctaccggcatgggcaaggatatctagttctggactttggaaagtaacagccatttctcctgcaaatctgcttatagagccctggttgaggatagagtgagtccaggcgaggtggccccctctttatggaataagctatggaatagtaaaatccctgagagactcaagtttctttggtggtgtattctatccaaagctcttccagttcgctcggtaataggtaggaggttccctatagaggatgagtgatgtcccctgtgtggaacgaaaactgaaactatggagtatcttttcctttcttgtaattttgccttccacctttggcggtcctctccttggggtattttccctatttgtgacacatgtattcgaatgtgggactgggttaaattcttatgggacctagggaagaaaggtataaatgaacaggaagtttttctttatgcatcgatcatcattgacacgacatggaggaatcggaatgaaaaggtacataataattgtccagctgatattgtaaaaagtattgataccattcggttttctttcgcagatcatcatgcttacttgctcccttgccccattccgtgcccgaaggaagtttggcgccctcccccgctggattgggtgaagctgaattgtgatataagagtagggttggatagcatgtgtgcagctgtggttgcaagggatcacgttggcaaggtgatctgggtggttacttctaagctggagttctcaaatgctctctgtggggaagcgatggcgtgctgtctggcccttcaagaagctaaagctcgcggtgtcaagtttcttattttggagagtgattcgagggtggtgatcaacgctcttaacggaaaggattcccggtgggagattgataactacgtctctttttgtaaaatcacctcccctttctttattggttgtacttttgaatttgttagtagacaatgtaattttatggcccataatgtggccaagtgggctttttcccatcagaggttcggctctgtgcctctatcctctatgcccgaaattatattttctaatgaccgcgaggtgtgactgtttttaatctaatgttttctttcaaaaaaaaaaaaaagattattgtgcttgggttttaaaaataaaagataatagggtacggttgataatatctttttaataagttttttttttcttttttcaaaaacatattctaaaaaattatttttacttttttatttttaaattgataaaattttaaaaaaaaaattgaaaataaaaaaaaaaatcacttttacaatttttttttcttaattaatattttggactctgaccccaacttggaccttgggattcgggctccagtcttgaactcggaccatggtcccaaactcggtcttggacccaacttaaataaatcaaaaaataaaaataaaaataaaaattatagaatacacttttgtttttttgttttttgtttttaaaattaaaaaacaaaagtggttatagaatacattttcgttttttaaaacaaaattttactttcttatttgtgattaaaaaattaaaaaacaaaagtgttaccaaacgctctcttagtaaacaaacaaatgcgtttattgttattattttgagttttttttttttttgccacattaaggataaggtgattttgaaaggtgagaaagtgttagtgtaagggcttattagtaatttataaatagtgtgaaagtctataattatataattatgtagttattattgaatatggaatgggaaattaaaattttaattgaattgaaagattaacattgtctcaaaaagtgtatttcaaaaatttgtcttatattaaagcaccttgaagtataggacaaatgttcaaaatgcactctttgagacggtacaccaatatctcaacttaaccaaaattctaatttcttatcattttttattccatatccaataataactacacaattacatatttataagctgtcacactatttacaaattagtaataagctcttacattattttcatataacataatactaaccaaatccatttaaaatgaaaaaccattagactgaaaataataaattgtcatgcattaataaactaaagggatttaattgagaacacatcaacacctattacaattacagattatcccaaattagtgtgttgtactattgagtgttttgtgattatgtaaagtgttaaaacacatcaaaagtgaaaagctacgtacgtacacttatatcatccatttaatcacgtatatatagtttaaggatatattaaattgaagtaactcatcaccgaataataataataataataatnnnnnnnnnnnnnnnnnnnnnnntaataataataataatgaaagagagaaaaaaaagtgaaattaatgtagccctagaatgtttcaatagcaattttagctaaaaattgctaaaaaatactactggtgtctagtactctctttaatgtcatactgctattggtataattaagtatcggatcctatataacttaaaaaaatagcttttaaaaaatattactaaccaatcgtaaaacgccacttatagaaagtattgaacggtatccaataataatgctctaatttttaggctgcgcatcaagtttaaagtttcaattcaacgaattagttatgcaagaagagatattgagtttttcgtttatagaaaattatataaattattatttttggtaaaaaatttacatatatatatatatttatggtattctataaagaaacaagaaaaataacataaaagtaataggaaaacaatcaaaaaaacataaaaaataatatataaataacaaaaaatcaacgacaaaataataagagtacaatataaaaatacattaaaaaactttattttatgtaaataaaattttaaaacctgtaaaagtatttaaaatgcttaagatatccgtacaaaatttttttgttctttttgtattttttttttttaaattattcctatcatttccatacagtaagcttttttttttttttttattaagaaaaaaaatatcgatacagttagtttacttttatttggaaatatttgttagatttcttgttatagtattattaaaaaatgtacgagtccactagcagaattgggtccatagctcagtggta

SEQ ID NO: 24217 - DNA, 2251 bp, Cannabis sativa
ttccaacatgagtaataatgttgccaaaaggaaactcaatttgtcacaaatttatcttatcattaatatatctaaaaaaacaatcgcaaagttaaatttacaagttggggggaattgcactcattttggaacctttagtagtggctgtcaatcaatttaattaattaaaaatttgaacatattcccaatatacatttgatatactggatgagtcttaaataagctaacatttggcagtcgataaatatcatgatgttaatttttcatattctcagctatatacacagtaatttttatttatttataatttaattttcttaattacttttgtatatatatgaaacaaaagcatattatattatttctctatccatcactcaatcgcaggatatggatttgggttattaagctaattaattactttaaattcataactaaaatgaaactcacatgcacggaatacataactaacttgtaagaactatttaattaagattccgaaagtaggcatataggaaccctagacatttatttgttaagttttgagtgtaatctatttatgataatgaggcatttgtgatcttctatttattaattcttatttatatttattttgaatccttatcaccattttatatttaggataaatactaccttaaaatgatacaaaataatattttgagttcgatttttatcgatttttttaaaatacaaccaacatgaagctaatttctaacacgaatatataaacaaaatatgtaattagtttaggttattattaaatattattttgacaaataatagagtattattttgtacaattttaaaaattacaaagtccaaattattatttaataaaacataaaattttaatttataacttttacaaaacacaaaatctcaaataatattactctttattttatgtaatatattttgctctcattattaccactggatggtcctatataaatccctataagaggccagttttaatattgtgcaaatatatactcaatcaaacagttaccaaagttaatatacttgtatatatataacaaaaatggttatacaagtgaacacacccagaaactttacgatgaaaccagtggtagtgtacaagaaagcccaagccgaatggagcaaagaagagctaataaataagttcaaaagccaagacatgaatggagatgggaaactgtccaagaatgaaatcaagaaagtgttcaaggatcttggctcctcttctggattttacagagctaagagagctatgcaccgtgctgactctgatcacagtggctatgttgatatcaacgatcataaagagttggaagaccttgttgagtatgcttatcaaattgggtataaagttaaagcttattaattaattaattacgtatactacgtagatgtaacatgaatcatgcatatgtattatatacacactatttctctattatattaatataatgaattaagctcaaatgcatatctatatatgctgcccatcgactatatattataaatatgtgtgtatctttatggagaaatattgttaaaagatattaatggtgcttagtactttttttggtgtcatattattattgatgtaattaaatattgctaactaatcgtaaaacgttatttaagtgttggatattactggtgtccaataataatactcatctttaaataatatgttaagacctgacaaaaaaataataataatatgttaagacaaaaaagaaaaggttaataatgatatatatcttaagaatgattgtcttattcctagcatttgttttgttgtagatgtgttttctttttcttctatatacattttatggctttggttggatgggcttctaaagctgcttttgagctgaaatttcaaaaacacttgtattgcaatttggtaatttgtgaagctgcttttgttgctttcaactcaaaaaggttattttaacaaaagccagaaattcagccaaacaaaacctataaataaattgattttttactaattataaaagactaagtcaacattaattagtcactatttcattgttattttgaacttgatttatattaactttcctagacatttctgtaacaagaaagagaagagaaagatatggaaaacagagagaaacagagagaaagagagggaaagagtgaactgttgtattcaatgaataaagagtgccatacacgcttttatacacaggaatcattaacagaaaacaaagag

SEQ ID NO: 24218 - DNA, 1473 bp, Cannabis sativa
tgttctgtagtgtggagttaaggaaaaacgattggatgagttcctgaagatacaaaaggggcttaggctcatctttctttctgccactggtattgtgattttttgtctcttaacccaatctctttctcaatttcaaccccaattactctatttttttaatgtttaaacctgcctaatagggatgcattacttgtatttctatactatgacatttctttgcatgtagtgcaaaatattgtgttaagtgtcagcgtgaaagaaccatttcgtgtttctcattaattttcctttccttttttttcccttcaatttaagcatttatacagtcaactagctttcctgggtaacttgaaatacttggtgtataaacttgatacttaatactaagtgttatgacttcaagaccttcgaagaatatatggattcggaggcaacaatgcccatggagattggaagtgttatgtaacatatgaaggggatgccgaagaaacatccatagcatcccaattggtaaagaatgatacttcaccttcagaggctatgatttccccttatgttggaatggtttttaagagtgatgatgatgctttcgagtactacggaaattttgctagaaaaaatgggttctcaattaggaaagaaagatcaagactaagccctcaattgggtatttataaacgtgattttgtttgttatcgttctggatttgctcctgttaagaaaaaacctactggagaacatcatagggataggaaatcgatgcggtgtggatgtgatgctaagatgtacttgtcaaaggagattgttgatggggattcacaatggtttgttgtgcaatttagtaatgttcataatcatgagcttctagaggatgaccaagttcgccttcttccagcttatcgaaaaattcacgaggcagaccaagaaagaatacttttactctctaaagcaggcttccctatacatcgaattgtgaaggtgttggagttggaaaagggtattcaaggtgggcagcttccctttttggagagggatgttagaaattttgttcaaaatcggaagaaggttgttcaagagaatgatgcgttgctaacagagaaaagggagagtgatacaatggaactccttgaagcatgcaaggtggccaaatatgcagatgaaaattttgtttatgattttactgttgatgaaaatgataaggttgagaacatcatgtggtcttatagtgattcagtccacgcatataacatgttcggtgatgtagtttattttgacacttcatatcgatcaataacatatggcatgctttttggagcgtggcttggcattgacagtaatggaagaaccatcttctttggttgtgctctactccaagatgaaacatctcgttcattctcgtgggctttacaggtttaccatcagtatcctctatagtgattttagctgtgtattcatatagcattcctgacgatg

SEQ ID NO: 24219 - DNA, 4600 bp, Cannabis sativa
  modified_base (89)..(97): a, c, t, g, unknown or other
aattatactattttaattattattaaaataaaaaactaaaatattaaataaaactaacactacgtggcttggcacgtaacaatcacctnnnnnnnnnatatatatagagagagagaaaagagaaaagtgagaagaagaattatagtgtttttaacaaataattatataaaaaaataaaaaaaataaaacactaaatatatatataaaatggaaaaatgacaccttataaaaaataactttatataaaatcatttttaatataatacctctactgaagcattatcttaaaagatatgagctttgaaaaaatacaaaaatacatagaggtaaaatagtaattccaaatttttatatttgcctttttttaattgaaaaatttcattcaactagaccatttcggtctcaacgatgacaagaacatcaatcgtgatattagagcctaaaaaaataacaattagcatttaaacgagaagctcttgcaatttgaggagcaactcgatcagcatattatttgacaaaatataacacaatattatttaagaattcaaaagatgtttgcaatcttctacaacacctccaaatgtagaaagcatcaccttaggactactacggattgcttggattaactccaagcaatcggtctcaacacttttgactattgataaatctctcttcagccatgaaaacacttcctttagagatatagcttcatcaatttcagctagcacaacattctcctttaattctgatatactagtcatcacatggctgtggggatctctaatcactccactaaacccatactttttgtctatttaccttgagtttatcagcatttagtttagaccaaatctcaatcccatttgaaagacaccaagcatccactgaaagaaaaaaaaagacttttatcttgagcatttctccattgatcaagtgtgatctgagctaaattaacaacattctccaccacattcttctttgccttctacaaaagttagttatgcatataccaaatcgcccaatacaacatgattaccaactacattccccctcatcaaaccgagtaattaaagtcatgacccaatccccaaaagagccatcaacaaaaggaaccaaggctaacccaaccacacgccaacaactcggaacaaattgacaagtaaccaaataatacaagatggactcacttgccaaatgacacactggacacaacaatgacacctctatgtgcttcgacttcaattggaatctagttgtaatgcacccatttatggtccctacacaaatttcttcaccttaggtggtaaatgcagcttccaaaaccccatcacatcttgatccacccttccatccctctcctcttgtaaaattttgaacgagatcttcacagtgcgtaatcatcaattctctcaaactctcaaaaccaataatcttccataactgaattagacataggaatactaaaagaaatggttgcctttattttagaaaaaaaggtccttaacaacatcacaattccaagcttgttccctaataatactgctaaccttttcattaactaagccaccactagaaattcttggattttttttttacaagaagcgaaggatctttgaaagtataagtacttgcaccatcatcaatacccttcttagcccatttgcgaagtaacttctcggtcttcaaaagactctaccaaataaaacttggattgctcccaagttgagcagtgagaaaatattcattcttaatgtagcaagccttgtagatctgagaaaccatcgagttgggcttagtaataaatctccatgcttgttttcctaacacatccaaattaaaatcccaaagcgaccaaaaacctaaattcacaacctctttactgtgcaacatcctatcctaactcattcaaaaaataccatgacgagaattagtagacgttccaccaaaaattagccataagttgctcaaggtcatggcaaatccacactggcaaaagaaacacactcatggcataagtgggaagactctatgccacattttgaaccatcccttatctgcacgagatagaagctttccatcccaacacaaaatacatttcctcattttctctttcatgaaacccaacacagttgacttgttcctcccaatcgtacttggtaggcctaaatacataaaaacagactaacaaacactactcaacacattgcaactaaagaaagcagttaatttgttcaaattaatcttctgactcgacacccattcaaaattgtgtaacagctcaaccaccctttgagctccaccattatcaacttgaacaaacagattaatagatatcattagcaaatagcatatgagagacaaatggagtccccctagcgacacgagaccccctaataagtagatggcgctcatatcttagaatcaaggctaaaaatctctcaacacaaataaaaaacaattaaggtgacaatggattaccctgcctaatccctcgagtaagaatcatgggactaacttgatgactaccatgcacgattactgaactaaggataaacaaccacaaactaactgcacccaccaattggaaaagttaaatttctttaatatagcacgaatgtaatgtcattccacatggtaatacactttgctcgtatcaagcttcaaagtcaagaccccttccttcctagaaaccttacacttcaagtaatgcataatctcaaaggccaccataatatgatctgaaatcaatcaccctggaataaataaagcactctgagtatcaaaaattacttgaggcaaaaccaccttcaattaattagtcaaaaccttcaaaataattttatacaccacattacacaaaaagattagcctcaactcacccatcgttgtagggttcttactttttttggattgggagagggggcgggggaataagaacaatattggtatcattaagacccatgggaaacacacctgaagaaacaacttttcaaccaccaccaccacctctacccccataatatcccataatttttgataaaaacctggactcatatcaaccgggctatgagccttattatgatgtatttgaaaaagtgccttatgaacctcctgtacatacataggacaaagaaaattatcattttcagctggagtaactgaagcttaaatatcattaaatagaacacctaattctgcctcataagcttaaaaacgattttgaaaataatctttcataagttgcgaaagcacatcatctcacgtgacccaggcaccactatcatcccagagccttaaaattctatttgtttgtttccgtgcactagccaccgcgtgaagataacgactattttatccctttctctcaaccaaaattgcttaacccattgcttccaaaacacctctttctgagttaaaatctcaaaaatcctcaccttgctcatatcagagttgtttcattcgaagcttactttgcttcaatttgtctttaaaatagcatgtgataccctttccccaaccggccaagaccttcccaaacttatcaattttctcaaacaagtttgcttgataattgtctttccaaatactccgaacaactgctcacacattggttaacgcaaccataaactctcatacttaatctgcttgttggaaggaacaaataactccaccattggtggcaataaaattggataatgatctgatgaagacatctcgagaataataagacaagcatctttaaacatgtccaaccaagcatgtgaaacaagagctttttcaagacgagcctctatccataaatatttcccctaccccgctccaaattaaatgggtacctagtgagctcaaaatcagccaacccacaaaagcatttcctgaaactccttcaacaaccaattaggatacagctgatctcctatcttctcctcattacttgccacattattaaggccaccaataaaacaccaaagaagttgaaaactattcttaatactacaaaccaagtcccacgttttctgtctaaagcttcgattattaggctcaccataaatacccgtaagccaccactccaacatactcccaaccgtaacaaccaagaaaatatgattgttcaataaaccaagtatctcagctccatcattggccttccaaaacatcgtcacacatccactatgaccacggccatcaaccgaaaaatatccctcataaccaatatgaaccttagacctctccataaccttcttgctataaataatttcacataaaaaatattgggtttttatataaatttgatatgtaatatataaatttttataattttcattaattaatttattacatttcatcatttgttaatttttttttaaaaataaatatttgtgaatgtatttgggtcattaattatccacagtccgaagaataattcttttcctaatatttttttcttaatattataggtcaaatgtattaccttgatcaattattgtatagtattatattaaattgtattttatgcaatatttttatataaaattatatgtggtattaacttctatagacacctaaatatataatcttttattataaattaaaatttaac

SEQ ID NO: 24220 - DNA, 2493 bp, Cannabis sativa
  modified_base (243)..(248): a, c, t, g, unknown or other
  modified_base (1765)..(1768): a, c, t, g, unknown or other
tatttttatcattttaaaaaatataaggttcattttgtcaatttacaaaatagagggtccaattactaacttttgctaaacacagagtccaaaatacactacaaaaaattttacttctagtcacaaaacttgcgactaaaagtgaaaaaaattgtgactaattataaattatgactcctatgttgtgaataaaaaagttcaatggataaaagtattagtcacaaaattacaatttgttgtgannnnnngtatttttagtcacaatatttgttatgactagaacttaattagtgacaacttgtaactaaatattatgatttagtcataagtaccattttgttgtgactaaaagtcacatttagtcacaaaaaattatattgtaagtaaaaagctgtcactaaaagtaacagtttttttataatgatagtatttaccctaataataataatcacctatgccattttatcaaatgaatattttatataataagttagtttttcgatcaattattacattggaataattttaatactcatttattaatcatatcatattcaatttttttatttttaaaataaaattcaatcattctaaacatggtttttgtagttttgtagtttttttttatgattgtaattaattttattgaaaataaccataatattatacaacctacataatttaaaaacaatcaatgaataaataaaaaataaatggcttgaagtatgattagtgtaaaaagactttgaaattgaaaaatatgattgttcatgaattggtttggtccaaatttttaattcttttaaaccaatttagtattacaattttctaaaaattaattaaaatcaagctacaccaattgaattctcaaactaatccaaaccaatctactaagaacggattagtttggttcaaactatgatttgtatttcataattattctaatttccttataaataattattcatttttttgatgattttttttacttttaataaatttataatatataaataacaatgaaaaaatattctcaaaataatattaagttaatatcaatattgtttccaaatattaatattccattcaaaaatatatattaaatatacaaaatagaatcatacagactggtttgatttgagttaccaaattaaaattctaaaatagtgaccgaaccatgaagttataaacgatccacattaaccaaactcactagattcacttggtgcggattagttggtttttgaaactacaaattgtaaattatatgaacctaataaaaaatagccaaataaaaaagaattagttgtaattcgattatgtaatattaaagaataaaataatcaccattttaagtaaatataattgagtctagtgttttccataatagtcaccaccatgttgaattatttataataaatgtattttttattatttattattattataatcttttattaaactatttatgtatttagtaatttaattgttaaaatattattaatttattttaaatatttaatgtattttaaatactattttattatcttgatttgttattatggctgatctgtatttatatgtattttaaatatttaacttcttatactattatttgattcagttttagctttatacacaattatttttatggcctttttatgacaagttttggagctaatttcgtggtacatgaactcatatggaatcacggaaagatactgattgagttgccacatcaaatgaccacttgaggctagctcannnngccataggtgggtgtgtgtgttggaggtcctgagttcgagtcccgggtaaaatatggttgtaatatataaatacttaaataaaaaaaaaagagttcccacgtcaaatggtgaatttgctgttgcagatcaatcaacatttaagttcgagtatattttcttttagaaaatttttgagacagttgtaaaaacatctattagctatcttcagggtttctatagtttataaaaagaacttagattgtgagaagggtacttattttgtaaaaacttagagtgtttagttaggttttagttgttttataatgttcttttattgtttgtagaataggttcaagagaagcttcaaacaagatgttgttttcaggagaagacttgtcaaagtctcatttcaggagaaagtaaacacgtatcaagggctgaagagatttcattacttggtgtactttagaaattaaattagcaacatggattacaaacggttgtgacaaatgtttagagggattcaaattttgtatagataattgtatttgtaatcattgatactttactaattgaatattaatatcacataattatcttgtgtgaattttttactttcggtaatcttttactactgcaagtaatgttaacgcgtgaggatgtaactaacttgttattgtaaatttttatagtaatattttaataattattattgtaaaagtaaattatttttttcaaaacatcg

SEQ ID NO: 24221 - DNA, 1361 bp, Cannabis sativa
aaaaaagcggcatttaaaacaatcacgatttatttccacttgaaagatcaattgatgaggataaggatatggaggtggaggtggatgtgaaaatggaagagtgataattggacattgttgtttgaatggaaaacttatgttttgagtgttgcagtagatgtcatagtctccttggcaactagttttatcaacatctaataaagatggagtgatgctaacattgtggctgcaattgtaaagtgtgaacaatttctcagctgtaaagttataggaagagaagagtaatgaaatgttaggtgtgggagcagagaaatcattgataagtttacatctatccctggaatgattccagtaaaagggtagtgttttctccaagaccacaaaagaactaaaatctggttgattgatattttttacaccataccagcctcctcctttcttaaattggatctttggatcattttcttctgaacagttcagtgtgaacaccccacaatcaggtctactgatattgctaaaagggaaaccaatcatgccaagttttccacaaggaaattgtgtacagttatgaggacgaggaatttcctttccttcagcggagcttggaagcagaagatgtctgagaaagaagaaaaagaaagcaagcagaggagtagtaggacccatcctgaggttgaacatcccaggaataattaatctagatttctaatgcaaaacaggaggggttggaggtttatactcctcttttggctaagccacaacgtattattaaggagaggcttttctttttctgcttgacttagttgttgacttggaaatttggatagtttttaagaacaacatacgttgaagaaaaaaagaagtaaaatgggttactcacgacgaaccttcccatactcttggatttattaatcccattcaaggccttgactctttgcttttcaaagtctttacaaaatgttttatttggaccctaaaatacggcaaaacagatattttctttcttttcccacaaaaaaaatgaaaaattacgtatggtggaacatgaactaggcatggttttttatgagtagtctttgactgagtaaacagattcatagcagcaaagagaaaaaaaatatctggttgtaagttgataatgctattacgcgttttttattccctttctaagacttagaaaacggcacaagtgggaccacatgacttttaatatagcttttggtgttagtttgtgagtaatgagaggacaatgatgcatgagaaagaaaaaaacacataaggactagtgaacatgatgaagtttgtggcttgtggggtcattcatcactttgagtctcatgttgatatacttactaaaaggg

SEQ ID NO: 24222 - DNA, 4189 bp, Cannabis sativa
aatggataatcgtgttgctggtgtaatatgcagactgtgagatatagtgccctttaagtatcaaagcagtcgtttacatgcttcctaatggacagtagttggggcatgaatgaattgggatagcttgttgataatgaatgccacatctggccttgttagtgttaagtactgtagtgctccaagagtacttcggtataatgttttgtcctcaaaaggtagaccctctgttaaagccaatttatgagcactacttgtgggacttgagcaaattttggcaccatctaaatgcactttaataagaagatctgttatatacttgctttgagacaagtacatgctatttgagtctctgtgtatttccactccaaggaaataatgaacaacccccatatctttgagagaaaaaatagcattgagattgctaataagttgctgaatgagagaaggattagaccctgtaatgagaatatcatctacatatacaagtagaataagttgactagaactagatccatgtatgaacaatgaagtatcagccctcgaagccttaaatcccaatagagtgtttttgagcttgtcagtccaagcccttggtgtctgcttcaatccatagattgctttgttcaatttacatacatgattaggatattgagggtcttcaaagcctttaggttgagtcatgtaaattgtctcactaagttcaccataaagaaaggcatttaagtcatcaagttgccttacttcccaattaaatgtgactgctaaggtgagaaccaatataaaagtgactggtttcacaacaggactgaaggtgtcctcaaagtctaatccttgctgctataaatatcctcttgcaacaagtctggatatacatttatcaagagtcccatctgcatttaatttcaccatatacacccatttattatctatcaaaaccatgcgaggttcatagggcactaaagtccaagttccttgagctttgagagcacgaatttttgttgacattgaaccattctaaactggatctctaagggtagatttcattgattttggctcacgaggcaacaaatattctggtagcctatgtttagtagcaagataagctttaagcttgtagatacctctcatagatcgtgtaaccacggagtgagtgcgagaaagattaccatctacattagaactagatgtagcaacagtattgtcaggattagtgactggtgcaggaggttgctgagatgttgcagcagttgcttcagcacttgctgtgatattagggcctattgcagacaaattgagttcagtatcaggtgtgagagaggaaactgaattaggtgagctaatgtgtgtagcatcagcagtgctctagcagcagtaggctcatgtaagtatgcagcagacatatttgcaccaggattagtaataggcactcaataagctgaaccagagagctcaatagcatgattaggtaaaacagtatgagatccagtaataaaatgcattgtaggatacattggggcttcagaatttacctttgatgaagtagtagaagtcttcgaatcaggaaaagacaactcatcaaagataacatttatagcaataaagattcttccagcagcattttcacacaagtatcctttgtgttttggagagtatcccagaaataaatattcttcaaatatgcactcaagtttgtgatggttatagagtctcaaatgtggatagcaagcacaaccaaatagttttaaaacatgatagtcaggttgttcattgaaaagacactcatagggactaagattttcaagaacaggggtaggcatacgattaatagaatgagtggcacactgaaaagaaaaccaccaataagaaagataaataccagcttgtgctaagagagttaaaccagtttcagttatgtgtcaatgtttcctttcaaccagtccattttgagcatgactatgaggacaaggttgtttgaaaacaatgccttgatcactttaaaaaatttcaaaaggcctatactctcctcccccataagcttgaacagctttgattggtaaattgaactgtttttccacaaggcttttaaacctaatgaaggtttcaaaagcttaagacttcattgttagaggaaaaatccaagagaaacgactataatcatctacaaacactatgtagtatttatatttttctttggatgagacatgggaaggaccccataaattcgtgtgcaccaaagcaagaggttgcttagctctagatttagacaaaggatatggcagcctatgatttttgcctaattggcatgccttacaaaattgcaaatttttaagtgagcaagggatattagctgtgtaaaattttgcttagagtatgagaagatggatgtccaagtttattgtgccaattattaatatcatgagtagtatgtgacagtaaaacagtgggattatggacattagagtagaaaaaagatggctctttattaatttgttcattacaaggagaggtttaagtctcaacattagtacaacagtgattacaacacatagactgactcaacagggacttagactgaatgtcttaagtggcaagatgcacctacagagcagtgtttgaaagacttgagctatcatctccaaggtgatagagcccatctttgattttccctttaagcaaggttgtccccgtttcattgtccttaacaaaacaacaagttttatgaaattccaagaaaacatcattgtcattagttagtttggacacactaacaagatttttagttatagaaggaattttcaagacagaattgagatttaaagagtgagaatttgaagagagagtggttgtaccaatattataaatgagcaatttcttaccattagccacagcaactgtttcttggccagtgaagggggtgacagactcaagattgtctaaagagtgagcaatatggttggttgcaccagaatccacataccatccaacatcatcaccaaaatcatgtacagattgagcaataaaggcctgaggatcataattgagggtctgtttagtaagattggcttgaggttgagcagtagaagcctttgggttgacccaatttctatcaaatcgatagtggcaagtaacaacagtatgcccaaatttcatgcagacttggcataaaggtctgttattttttataagtcgaggtccattgccacggtttgggaatcttgatgagttttcaggaccttgtcccctccctgagccattaaagggtctgtactgaccatttcttgaacctacagtaagatttgctgcatttttgctgagagatccaaggctgctaagtgtctctctagtcttgactcatgagacatcagaaaagcttggacttcttcaagtgaaagagtatcacttcgagaggtaatgctggatacgacagagccgatctcgagaccaagtccattgagaagatgttaaataagatcaaaatcatgaacatgatgaccagcaatagccaaagaatcacaaagatcttatcaacataatctgaaatggacatattacctttctgtagatttgttaattgactcttgagttgaagaagtcttgccttagattgactagcaaatttctgttccaaggctctccagacagaattcgatgtgttatagcaagccacagtagccaatattccttctgtcatagacgatcggagccaagacagcaatagttaatctttacgcctccattgcaagaacaaaggattatcaccaccattgatgagttttactggaggagcatcattactaaaaagtaaatcatcaagatcatgacctataacagtaggtatggcttatgatttctaggagagaaaattcgtgcgatcaagcttcagagtaagagaagctgtcagagagttcaaaaacggattccatggtggtcccgtcgaggaggactgagctggcaccacggcaggatcagaacctccagcttgagacgagtggtcaccgaaagaagtaattgatgcaagtcaagggctttgatattatgaagaaacaaagcagaaaagagaaaagggaagaacatagtatgtagggctgtacagaaattttcgtaaaccgcccaacccgaataacccgactaaaccaaaccgacaaaactgaaaaaaaaatacaaaccgacataacttgacaaaattcta

SEQ ID NO: 24223 - DNA, 3364 bp, Cannabis sativa
aattttacttttatgattaaaaaaaaataaaaatgttaccaaacgctacttgagttaacacttgtattttcttttttttgtttgtctgtgttggtagaaatgactaatgagacttttgttaccgtttccttcattatgaaatggaaattgtttacagggaacaaaatgcaaagtaaaaaagaaaaatactctctaatgaatgacaaatgattgtttgaccttatcaatgtttctcctagatgatgttactttttttttaagacctctataccattaattatgtttaagttaatgaacctcataataatgctaagtaggaaacacctaagagggttacgttattagttaatagtgtaattaagtatcgaatgacacacatttgaatttaataaataatataaaaaactgctaacttctcttgacgcgccaatcagtgttggtgtggtgttaagcacagtgtcaaataagaatgctcttgttaaaataataataataataactgtttgaccgatggagttcatatgacgagtcaaaacacttctgttggtctggtagagtgctatttggcaaacataagaaactgagatttttaaaataattcagccataataacagtaactgatggcagggaagtaaaccttgtaaaatatgccttgggtgatggcagggaagtaaaccttgtaaaatatggcagggaagctataacaagaagaatcttctttccatgcattatctttagtcataacaactaaacaataccaagtcagcatttaccacccatattgttgtttgagtggttttgttatgctcattgtgtttggaaactaacaattgtcaattgacacagtccagtcatatcttaaaatatatatatatatatatatatatggatgtgtgtatgattttttattcttataattacatgtaagtagcgctcttataatatttatcaacttttctaattatacaagtctagtgaaaaggatgtttgaagcagtgcggatgactcgtttatttttttattgtcagtaaatgtaacaaagtctaaactcaatatcaatcccaaatgcatataaaataaacataacaaacgatgacaactatgataaggaagggatttgaaaatttcaaacttcagtagaaatatgaatatcttaattatggacttggttaaagttctagtttgaaaaactctgtttctgcacgttaatgaaaaacttacagtagttctcttactgagaagccagatggaagtgaaaaataaagaccggattgtgtcagtaagtatgttcatactcttcttactcgattccgctagagttttcctatgcaatttctaacataactcaatcagaatcattggctcaaggacagactctaatatcccccagcctaaaattcgagttaggatttttcagtccttatgataagcctaaaaagcaatatgtgggtatttggtacaagggaatttctccacttgcagttgtgtgggtggctaacagagagaatccgcttgcagctacagacacttcagcaactttaaacattgccagaaatggaaacttagagcttttggatggaaaattcaactctatctggtcaaccaatgctgtcgtcccttcaaatagtagttctcttgctattctcttagacaatggaaacttggtcctcagagatggcatatctggagagaatacatgggaaagcttcaaacatcccgggaatactttcttacctggatcagtgctgggctttaatgtcaaaacaggggagaatcttgttttgacctcgtggaaaagtgacagcaatccatcacttgggaatttctcttataaagtttcccaacaggctccaccccaagtcttcatcttgattaatggatcaactccttactggagaagtgggccttgggataaatctaagttcgttggttcacctgacatggattcatcatactctagtgactgtcatctcgtagaagatcttgacatgggaacaacttatttgcattttgtggaccgatacaatggctcagctgtcttgaaagtttccatttcatcacatggtgtgttgacatctgaggtgaaacatagtggaagtaatgtttgggaaactaaatggaaaagaccagaaaatgaatgtggcgtttatggagtttgtggaccttttggggtatgcaaaatatcagaatctcctatttgtaagtgtttgaaaggatttgaaccaaaatcttatgacgaatggagcaagggaaattggacaggagggtgtgtgagacgtactaaattactgtgtctgcaaaacgcgacatcttcatcgtcacaaggaggaaaaacagatggttttcttaagatgggaatgacaaaacttccagatttttatgaatatttagacgttaagggtgttgataattgcctaatatggtgccttgagaattgttcttgcttagcttatgcctatgtcaatggaatagggtgcttggtttggtcaacaaaaagtcctctgcttgatattcaggagttttcctatggtgggcaagatctctttcttcgccttgcaaatgcagaacttggtgagaatgtagataaatttagaaaagaaattcttcaataagataaatgcatgtctttatttctttttccttttctcatacttatctactctgtatgcgttctttcaaataattttttcagatggacaaattactaagaagaaaattatcagccttacaactatttctgctagcgcaatattatttggcatcgtactactggtttgtttttgcagatggagagctaatcaaaatggtaactacagaaataactgttttgaatttctaccattctcaaatctaagattgatttctgacttgaaaatcacagtaagcaaaagtaaggagaccgcaaagcacttgatcaattggattcagtcaccagacaatccaggaaacattgttcaattttcgactcagatgcaagaaccccagcttcctttctatgactttggtagcattttagctgcaaccaacaacttcagcatatcaaacaaactcggagaaggaggatttggtcctgtatataaggtcattacttgcctcttaatttataatgagagaaacaaattcatttcttcaatgacttattttagtgagaaactcgtagggaagaataccagacggaagggaaatcgcagtgaaaagactctcaagtagctcaagacaaggcattgaagagtttaagaatgaaactatactaatctcaaaactccagcacagaaaccttgttagacttgtgggttgctgcattgagaatgaggagaaattactaatttatgagttcatgcccaacaagagcttggatacttt

SEQ ID NO: 24224 - DNA, 3291 bp, Cannabis sativa
ttgacttcaataacacttccttgcttgacctagaaagccacttgccatcccaactttccacccgcttttgcatcttgtctttaagaaaacccaaagtagcacccttgcctcgccccatagtactaggaagacctaaatataagctctgatcaccagctacttgcattccaagaatctctttcactctaacatgtattgtctccgaagtattagtgctaaaaaagatggaagatttaacaacattcacctgttgaccagaagcttgttcaaatgctgccaaaagctccataatcttgactgcctctcattcatttgcacggcaatacagaaaactgtcatcaatgaacaacatgtgggataccagtgggaccctcctgggcaccttatacccatgaaatcacttattcatttcgtatttcctaattaagcagataacccttcagtacacaaaataataaataaggtgaaagaggatcaccttgtctaataccccgagtaggagtaatcggccctagcctttgtcctccatggacaatccaatatctgatagacgtaacactccccataatcaacttcaccaaatacggatggaaatccatttttaaaagaatagcttgaaagaactctcattcaataagattattatagactttactcattttaaagccatataatcgtcatgcccttacttcttcctttttaaatattggagaacctcaaaagagatcaaaatattatctaaaatcagtcgaccaggaataaaagcatttggagcatctgaaatgactctaaaagaaaaccctttagccgaatagccaacactttagtaatgactttacacagaacattacataaggctattggccgaaggtcgcctatgccagtaggattttattcttcagaataagaaccaaattagtatcacttaacccaataggaaaaatagaagaggcaaaaaaatcctaaaccaatgaaatcacatcactcccaacatctaaccagaactgttggtaaaatgtcacggtcataccattaggcccagatttatcaggatgcatttagaacaaagtatctttaccttcttcacctgaaataggcatcaataaaactaaattatgagcaacagtaatagtcataagaatacaatcaataacctcctgccaatgaaccaaagaagctgataaaatattagaaaaataatccaccatcaccatttgggattttagatttcatcgtgtaaaaacgtcattaattttaaacacatgataaaaaaccaaacccaagaattagccctcttcttctccaatcatatttctttctccgatcactacacctccgccctctgcccgagctcacatccggcatccctctctccgatctttccttctccttctgtaagttttatctctctagatatatatataatatctttgtttataattttttttattggatgcttctatggtgtttgtttttcatacttcaaaagaagtctgctcagattcgacgcaattgtttcgatttgatcacacatttctcatttttgcagatccaacaatggatttcatgaagtttttgaccagacagttcgcgaaatatcaatattctcttctcacctttttgattttgcaattattttattttaattattctcgattttcttttttatttctccaatatttgaatgagagttgaattaaacttgattaattttgaaatttgtagaaagagggaggttaatttgaaggttttggagattgaatagaaagtgattcaataaaatacaatcgaatatacatagattatataaatatatttgaaattgttggatagtagtagtataaatatggtgtttactgattttttcttttggattgagttatgatctttttcatttggtttaggtaacattctaattattgatacatgccgtattagatgcaacagacaatgaattttggggtcctctatactaatactctgtttttgagaaagacaagctcatactcttatcaccgtcttgcgaagtgtcaagagtggacaaaaccggcaaggattggggctatgtctataaggtgagggtgtatattttttttattatctcattaattactctcgattcaaaatgtctttgatttccaacttcaatagcaaatcctttcataaatttcaccttattttcttttcaatttcatttaggaatatttttaattgtacttactactttatgaatacgggacttaaaaaatatataactagttataatttagaggttattaattcttatttggtgtgtattcttacaagcattttactttacaaaaaaggcttagcaactgctcctaatgttgtttacagagtgatctgtgtagatggttccgtagtaattttctcaaccctaaattcttaaattttgttataatttattagtttcaaaaaataaagaacaaaaagtaaaactatttctcattcttaacataaattaaaagtttaagttcagtgattgggatatgtagtccacacaaatttaatttgataaatatttgatgtaacaaatattttaactaattatattcatgtaagcaatggtaagcttaggatttaagttgagaggggagcggcatttttttttaagtgaggggggcatttttttttacattatataacatattaaaaattgatacaaaattgtattttttttttgaatgaatacaaaattgtatttagtattaaatatagtataaaattttaaaaaagtaataataaaaatattgagttgaataattaagacactaaatacaagttttcattggtagaggttcaaaaaaataaaattcaaatactaaaataaataacttaacaaaaaaaaaatactaaaataaatatgctcttattgagattagaactcatgacttctactatgtaaatgaaataactttaccattatgttaaagcttgtattatgttcataagtatcacttttatttaaaaatatatgttataactagctaaaatgtatatatatattttttctaattattttttttcaaagaagcgattgccgcacttcgcctctatgtaagtccgtccctgcatgtaagatgaagtcagcttgtgctaaatttttatatgcacaattggagatattaatggcattatcaacaacgtgaataatactattgtaattaaaacccagacaaaaagaacaattacattttttgtaccatttgccatcttaattttttatgggaattttgatcaaatgttggctttactgcttattccatttag

SEQ ID NO: 24225 - DNA, 3468 bp, Cannabis sativa
ttaacggagttaatcttccgtttaatttttcttaaaagaaaaaaaagaaaaatgttacaaaaatcgttaaaccaacaattgccgttagataggcacttttaagatataaagatatgtttctctttataggattattgtacatgttatatatactgctttatatcagaaataaaataacacagaaaaaacatttctttccctaaatctgtcgactatataatttgtttttgcttctcaaggatgaggtgtagcattcgcgggcccccaactgatctcctcgtatttctctaacttttcctttgcatggaaacttgatcacctaatggtaagacgaagcgactgccttcattgcatggatccatggtcggctgaggatggcattataggctgagggacaatccacaattaggaatttggccgacttgtttactccatttgcgtagacaggtagttgaacaaaatttcaggcgacggcgcttttccctgagaatcccactaaggtaacttgtgtctcttgggcctttaggtcttcagtttccatttcttttaaaaccccagcaaataggatattggctgagctcccggtatctaccagcattcacttcatacgaacgtgggcaacatctaaggtaatgataagggcgtcatcatgtgggtgttctagctcggaagcctccccttgattgaatgatattagcacgtcaggtccttcgttatcattactgtcattgccttgatggagtggatccgacgaaagtgggccaatgaggcttggaccgaattcccacttaagtctgatcctcctgagatcacgttcacaatcttcttgatgtatgggggtagggattgattctgacccttatcatgtccttgctgaacatgcagcgttgaatccacagtcaggcagtcctggaagaacccttctctaactagcctgttgatctcaatcttcagttgtctacattcataggtggcatgaccatgctccccatgataggcacagtaccgccttttgtcccttttttcagggtcaatggtcatcttggcgggccaccttgtttccttcattcccctcagtcgcctcattaactcagttagtgtaatggtcatccgaggtaactcctcctcgctccgttgaccacttggttaccttgcttgtcccatactcgtcatcacggccctttggtatttctgtcattagcttgccgcccctcgtttttattgtgtggtcgtgaaaccggcattcaatcttttgtctcgaatatgaatgcatcccccagcattgatgtttcccgtgatacctccttagcatgtcgtttttcttgtaattctaaagccacgtaccctcgtgccatggtcagggcccttgtcagagacagacttggttctactattattgccttttttaactccgagccatgcagtaacccttgcattagtacctttgttgccactgaatcagtgcactttgggatactgacgtattcttcgctgaatctgttgatgaacttttccaaaggctcgtctggtccttgatgtattatcattaaatttatgtctacctttacagtcctgacacttatcacgaagtttgtctgaaaccttaagatcaaatcttgatatgagtttattattcctaatgtcaaattgtggaaccagcgtagagcgggaccccttaatccctcagtgaagttcttgcatttaattgcctcaaggtcctccaataggaccgacacagttaacattttttgctcaaactgacatacatactctgaggggtctcttgtcccgttatattctggtaactttggagccacataatgttgtggagcttctgcacgtaaaatatgatttccaaaaggtgagagggctgatccttccgtccgcgcccactcactgtgtactcccatttgactatttgcttccaagtccagtagtttattccacatcatttcctgcaacttttctgtatctttattcaccatcgatggattttcggtaaccgctggttttgcagttcgctaccagggtgtcgtgcggagtgcttctgcttctgttatctctgccacctcatccctgacccttctctgctggtcctgcggatgtactgaagcttctagtattgctgggttttcttttcccccgagtccttcatgcatgcaccgggtatggttgccagggtgattattgttgtcgttgttttctttctcaacagtttcaccaagttgatggttgtttgtctcttccacatgtgaggggcgctggtatccttcaaggactactttcatctgtctgtttttattttcaagcatttgaatgcgttctttctagagggcaatttctgcttcttgtgttgccattttgccctcttgttgctttagtctttccaaaatctctcgccacggtgggatttggtgcagtgtttcactgttgacgtttttagtgttcatctgggtttcgtgagtgttaaccagatcgtcatgcaaggtgagatcttcttgttcattcgtcatgtctttccacttatttcttcagagaatttcctcctcctttttctttgtctgaatgtgaatcgtgtaatgagaaggtctcctgaaaaagaaacagtgagagttcctacagacggcgccaaactgttttagccaagaacagtcgaaatttttttatgtgagtcctctctttttcagttcctaatcttaccccttttacgtagtctttttctggtttatatagtacattctatgattgcatggatggcctattttttttttatctattctcttcctgacgtgtgtcttttctctctgctctccctactttgccactcgtctagttattaggtaatcactactattctttatcttctccgagtccagctgtgttgtgtctcgttcttggagtgtttatcttaccttttcagtcaacggccttttttcgacggaactcttttaatacctgaggtaaatgaaagatcgcaatgctgatctttattttggtgcctctttccgatagaggcatttgtttgacaatttgaactgctcgcgctctatgttgccttatactttttaggaagtgagtcttctgtcggcgagttagacggaaaactctctttctttaatatatctgtcgtctaggtcttcctctgtcggtctgagacggtaagctctaatccctcatctttcttcatcctaatttctgtcaacatttgtattttttccttatcgtcacaaatcaggagatggtccttactgggtcgtacagcgttgggcctttccttttttttgttaatttatttggattttgggtttccgggtatcgactttattgggcctttgtacttttattttatttcattgggcctttaattctgttcgtaatttttccccaaacagatgttatgacaaaactagttacatttttgtatctgttcgtattaaaaattgtattaaagttggttatattaaaaaa

SEQ ID NO: 24226 - DNA, 2350 bp, Cannabis sativa
  modified_base (1766)..(1771): a, c, t, g, unknown or other
  modified_base (2309)..(2313): a, c, t, g, unknown or other
atcaaaaatagattaaaagtaaaagtaagtttatttatttatttatttatttatttttcactttaaggtagttttgggttggaattcattaactcctccctagcctaccatttctcccaaatgacaaaacgaaaagaacaagttaagtgttcatttatagcctaaagctatactacgactcaacatcagtctttcacggcttggaaaatccacttttacaataatatcttcatttacaaactcacaacacaacacaaacccccaactaaattcttaatttttcttaagccgaatgatttagcaagtttgttatcaagattttcatctttaatttatgttcgttgtacgattaatatagctgcatatagattaacagtacatattattcgagtaaataaacaacttatgtagttaaacgccttatgtggctgcacatgtatagtatggttatttatgatattttgctaagttttgaaaaaattgcaatatttatactacaataaatatagtttagagagtatatttcacacgcgcttaaagtaaaagaggtatgtgctttacgtccaaaatgtgattgttactagtagtagttgtagtatagatcgggccgtcaattccacatgaaggtgattatggacaaaaatattagtagaagaataaaaataaaaaattaataaagagtgacaataataaccaatgagtttgtgatttttatttttggtaataaatattaaaagaaagcaaataaaacgtgtaattaatggtaaagagagaaaggtttcaagagtcatccatatgcttgtttagctattttgtacatttgattcacaaagttgatacaaataatgtaatattaaagttcattatatttttgtgtttacaagttcttacaaataaaataaatgatttaatcttatgtagaacttagaaataacattatatatcaagcaataatgcaataaaagattaaacataaaattaaatataatattatttttactaaatagtaatacataggaagaagaacatgactaattttatatatttttagtaaaaataatgacaaagatatagagatgattgatagtaaaggaaatgaacattgaaatatattttattaatttttaaacacatagagagaacatgactaaattcatatatcatttaacaacaagtaaataaaaatgatcataaaagatagaacaagagaaataccactattactattatcacatataaaaagaacgtgactaagtttatttatacatttagtatataatagtatagatagataaagagcataaaaataaaagtagaataagaatttgtataactcaaataaatattacaacaagtgaattaaagatacaaaataacctcaatttacatatggaatcatctctaaccttccaaagaagattagacaattatgctaatcattctcatgaaatttctaagaagaaaatatgagaagaaaaaatttgttttagtttttctacactaaaagttactgtttaagttatctttcacaactaaaatgagctattatttatagaatctcaaaagaactaaaaaaacaaaatagaaataaactaaggtcttaggtaaaaaataatattaaaaataaaatctaattcattattaactatgttgttggaagatgatatttttttgggttttctcaattttacacttcaaaacagttttttttttttttgtatttttacggaattctacataggaacccctattgcaactagcgctgnnnnnnaaattgcaacaaaaaatcgtacaattaatatatggggtaattcctctattttttttttcaatgccaggctaggcatggcttttggagagatgaagacataagaccttccatgtggcatgttgtgattggaataggaataaggaaaagatgatatacatttatttgcttatttctttctttgtgcataggacaaaacaaaatttcttaagtgatatatattgcaattaatgcatcaagcatgcatgacttcatcacatgatataaagagctatggagaagtggagtacttaagggctgtttggtatgcggtaatgggagaagtgagaatgagaatatgaaagtttactatgtttgattaggtttttaatattttaatgttggctaagtgaaagtagtgggctttagtttgcctgtcaaggaaaacccaatgaaaatattttaatattttaatgctttgcgttaattactttttatgcaagttgcatgctaagtgccttgggaacccatgttggaaatttaattttaccaggatcttagnnnnnctcacaagtatgtttatttaaacaccctaaatatgaa

SEQ ID NO: 24227 - DNA, 2221 bp, Cannabis sativa
  modified_base (198)..(201): a, c, t, g, unknown or other
  modified_base (1808)..(1812): a, c, t, g, unknown or other
  modified_base (1873)..(1878): a, c, t, g, unknown or other
agcccgcctatgcccagggccggccctgtatgtatattcggccataagaataagattcagcccaagtttttattccaagcccatcttatctgaacctagccctatgtgaaatacctatataaagaaagagaagataattgaaaaaccttttttcacttcttcctcttctcttaattttcaaattcaccatgaaatctnnnnaaaaatattattccaaaggtgtttgagtatcatcccactctattgaaggtgatactcatgcctttgtggaagattgtgttgaacacaattgaaagaggagaagatccaagttcagatcttaataatgctcttgtacaaacaggaattaagggctagagttttgaacggaatgagtcatattattctgctgacatcattgtaagattttctacacctttatgtgtttatttatcgttttaggaattttatatttaggatattagattatacaattataatcaacatacatgttagtaaacttagatcattgtaaaataaatttcaaataatacaaatattaccttttgaaaaatcaattttattcaaatgctaattgattgaatctaggtttgcaacttgagtattaaaattgaaagtaaatcaggaacataaaattacaagctttccctgacattggaaacacattctaaccaagtattgcttaggttctcttgaaccgggtaaagtaactttcactatgaaatcaatcgaaatacaatctctaattctgattacaaatcaaagtaaacaaaaatgaattcacacaaaagttaccaatacacttgattcataatcaagtacaaagatctaagtccccttagatctatgaagtcaagatccccttgcttcttctcaactgaaatcccttcaatagattcatctgaactcccttcaaacaatgcagatcatcatttctttttcagctcctaaagatccaatgattaaccacttgtaacaaaaagattaacacgaaatagttttgctttagcagagcaagaatctcaaaagtagattctaacaaagatgaagaagagatagttagaaaaagcttgttaagctttttataacctctacttcggtacaaccgacttaaccaactgaattaccatctcattacaaatgccaatgagctgttccaacaaacacaaatgatctcgatgttgacctgacaaacaataaaaaaaattacagataaacaaaggcatctaacacagtattaaatgatcaatatcaaagccagactagatgcaaataacacccttacagatagaagggtaaccaacatagtagattctaacaaagatgaagaagagttagttagaaaaagcttgttaagctttttataacctctacttcagtacaatcgacttaaccaattgaattaccaaataattacaactagcaatgagttgttccaacaaccacaaaggaactcgatgctgacttgacaaacaataaaaagattacagaaaaacagatgcatctaacaaagtattaaacgatcaattatcaaagccagactagatgcaactaacacccttacaaacagtaggagtgttcatcaaactgctcaaactatacaaaccacccatgccgtaccacaccacataaaaaatgcattttaaaatcttttgaggtgtagttgcggtttgcatttttgccaaaccgcgcagtgcattgcggtttgcggttttgaatttaataactgcagttcaaaccgcaccgcactatatattacaaagtcactaatttttacaatatgattttattctttttttcatataagnnnnnaaatatataatatatgtgtatattactttattttttaaagacaattcaatataatgacttnnnnnntattatacatgttatgatgttaaaactttaataagattttttttttgttttgtattgttaaatctttattagtttgatttttaaattttcattataatatttgataatgatgatagtgtaaactgctcaaaccgcaccacaccacaccgtattttcgcggtgtgggttttacagttttaagatcttacggtgcggtttgaaaaattataaaaaccgcatatgcaatttggttttaaaaaatggctgcaatttgcaccatgaacactcctaacagacagaagggtaaccaacataatattccactgaaaaacacggcacttgcaatctctcccttggcaaatta

SEQ ID NO: 24228 - DNA, 2494 bp, Cannabis sativa
  modified_base (182)..(190): a, c, t, g, unknown or other
aagggggttttgccaccaaaaataaagataagggggttaagtgtataaaaatcaaaacataagggggtttcgccgcaaattgctctagaaaatatgttcaaacttatttatttatttatttatttggctgagtaactataacatctcttgaagcatgatcctcaaaataataataataatannnnnnnnnataataataataataatggtgatgatgataataaaatcgaacttgaagattgagttttgagacattagttagtaaatattgtttcactatcaccataccattaaagaatttacacaagatttaggttgtttttcaaattacatacattacagaaagaccacacaacaagaacacagtcttggatctttcttttttctcattgtttttttgtatttaatacgatgatcttggatcttattttgtacataatcaacctaattattatttctattaaaacataattggtgagtgggggaccctctctaacgcttatgagatacaacccgtcaagctcagtccacatcattcaccacccaaccatggcctactattacttccaaagttgcccaaactcactatgcgacaactgggtatgacgcacaagtcgaaactcctgcatcaaaataatcaatatattatggctgagaaagaattttatcaacattaaacaaacaaaaaaaaaaagataacatccatatatatagttccgtatggaatcttatctgcctttaaatggtcgtttatttataatactttgaatcaaaacccaaaaaaaaaatggacaaaacggttatggggcacaagaagggctaatagcagggtgaactagcttggcagcaaaacatggccaaggaaaacttaccgcacatattctttcccagctccatcttaaagtagccattgtcaccccagcttgctccccaagaattcttgatgagccagtacgggacaccgtcttccactccatacccaactgcgagcacagcatggttcacatcctgcaataatttttagagaattttagtattgtattcatacaataagttgaggtttggttccttggggaatgcaaagatctgcattcgattaaaaaatttgcaagttgatggaccagttcattcggtccccctttaatcaaaactcaactcaccatgggagtgttgccacaagtgtcactggtgaatactccttccttgtaaaaacggaaaggagacactacctcaaatgccacgctcactggcctaacaagtccaacagcttgctttaattcatcttcagcaccctgaaattgtccttatgttacaacaagaaaagaaagagaaaacaaaagctactagatcatttaaaaacaaatatgtagtaaattaaaattcagacggtccttaccagagtaatattaacggagtccaccacttggataccaacattctctgatgagaatttgcaaataccattttgtccggtgtaaggataagcttcttcggtctcaagtccaccattgtacttaatatattcgaaggcttgggatggcaacccaccatggcatccaaaattgttaaaagcaccggcacaatccacgagctgttgctcagacagagagatgtccttcccgaaagcctgtttataggctgcctcaagggcacccgttgtgctgtagaaatcatttgttaaaaactaagcaataaaaatgttcatcgtcagttttgctagatactaagaattttcaaatccaagttcaaactcacctgaatgtccagcaagatccgcagtggccttgatctttaacagggctgactataccttcttgtctccagtctttctgtaaatatgacgaaattcatctatgttacacttaaactaaataaaagtagcatctccagattatcgaaatcacaaagtcattaaaatttagactaaatttaactgaatcactaagatgcaaagtccccggtaacttaaaatggttctgtagcaaattacttggtattggtgtacaagatcactagagttttgaatttaacttgataaaagagccgtacacaagcatatcttatagggaaataaaagagagaataccaactaaacataaggtatcgtgttaaaccagctaaagcttagttggattaaacgtatacttaaaaaaggaataaaattgataggtatagatataccgtttcaggaagaacaacatccgtgagcttgtggtttccctttaaagtggcagagcagttttgagcagctcccaacctgtgtctgttaaactcttcccaggtccaatcggcgaaatctgcgatttcataagagaattaagtacaattgatctaaatttaaattaaagaaaaccaataatcttaacattagaattacgtacgattcacagcaagagtgtaattcaaccccttcttgtttgtggatttaatcagcttcagattctccttaaagatcccaaatcgaagcttcatctcctcaaccgtatcatacttc

SEQ ID NO: 24229 - DNA, 1551 bp, Cannabis sativa
gttggtattatttttaactctcccaatataaagattaggagggttatattttcgtcgtatttttcggtttgtatttttatcgggttatctcaatttagtttgagcatgttatttaggttagacaatttacaaaagtttatgtacagtcctaatctgaggatgagacactgtactcaactttaattttgtgctcatagttctttgtacactttctcaaaacttagaggtcaaaactgaactcctatcaaatacgatggtctttgggacatgtagcctgacaatctctctgacatacaattcatcatacttttttgcattgtagttagtacatactgacagaaaatgtgctgatttagtgagcctcatcataaatttagagagtttgcttctacagaaaaatgaagacttttgataacaaatattggaccaggaagaaaaagaggaaaaaagtaaagtctaagcgcatatggcacgaaaagaaatccaatttcggtataacttataatcttaatgtttgctattctttggtagccattgtattggtgattattgatcatttttgtaagtttgctcattttattctaatcagaattgtttacaagcttatcgagctagttgcctttaattaatgtggacaacatagttcattaggtaccttaaataattttttatgatagagatccttagtttaaatcaagattttagaaagtcttggaacaagctttaggaactaagttgcacttctctctcatcatgctcagataactggacaatatctgagatgatcatacaaactatagatacaagttttgtctttgtattgtggattttgaggtaggtggggggaacacttgtcattggtggaattcacatacaaaaataactaccaagcaagtataggcataactagatgccttatgtgggagaccatgcaaatcgccactttgctgggctgaaccagatgagcatgttggtattggatcccaatttatcacttgtacccttgagaagattaatgttgtttatagttttcacaaaatctatgttgatctcaatcgacgagaatttgagtttgatgttggtgattatgtgctcttaaaaattactcctatgtgtggtgtaatgagatttggagtgaagggtaagctagtcccgagttatgttagacctttcgaggttattgagagagttggagaggtcgcttatcgattaaacttaccaatgttgttgggacatgatcatgatgtgttccatatgtagatgatgaggaagtatatactctagttctgtcacctgtcattgagtatgagtctatccctctttaggaagatatgacttatgaagaacaacttgtcagattcttggcaagatagctaaaagtattaaggaacagagagatttcagtagtcaaggtcttatggcagaaacatgtaaaagaaaaagaggctaacttgaaaattagggtcggagatgtatgagaagttttctcacttgttcaattttcaacttgaggttgcactttgaaattttgggatagtattttcttaagga

SEQ ID NO: 24230 - DNA, 1990 bp, Cannabis sativa
tgaaaaccaagaggagcaataggttatggctttagaatgaggtcatcattgtgtttagtaaaagggagggaaatagcattagaatagtaagtctgatgaaaaattataccattttgctaaactgctgttgctgtggtttttattcctttaagatttcccaagtaaatgagggcttgttatttacctgagcatgtatttgtctcttcgtactttcctcaccttagttgtttttctccatagttttacataattagcttgacaaggcgggttgactaatttgcgatccatctgagcataattgagcctggttgtactctagattactatatctctttcctctcagttagtcagttgtagattaagcctctttgtctctctctctctctctctctctctaacaaaaaccactttgacaatggtttgttgctatggatgatctatcatctaatagattatatacacagttgaaacatggaatttgatgtctacagataactagagaagttaaacaaaaaaaaaaaagttatgccagaagtttggggagtatgcaaatgtggttcggaataattatgtgttattcatttatctctttttcaagagatttattgtgaaaactagttgtgaaaatgtgtccaaacaaaccaagcaagacttgtattgcttttgggttgatatcattatttgtgaggaagttacaatggagtaaattaaaagttttttttttttgtagcttagattgtgatttccttttttgctgaataagattgtgaatcacttaaataactaaggatttatatattctttcttttgtttcctcttaaatggaaaggtagcctacccttacaaattttcagtactaattgtgtgattttctgtgtgcggtttcagtctgagaaaggagacaattcaaataaattggggtgcataccctcattacaaagctcctgaagtgtttgcaccatttatcttggatgatcgacatttgtattatgtgaatgcctttgaaaatgcagctagtacaatggagactagtgctgtggcagctgagaatattgctcgactcatcctgtctagattctttggccaaccacctttcagttcctcaagatcggaatccaactctgatgaaggaactttacgagtagatctgtgagttttctttctatggagaactgtaaaattatacaaattgtactttaaaatggtattaaaagaaatgacttttgtaaataagattttttctctgggattcttggaatggatgaataaccaactacaaaatgataagtttgtacactatttacttgttctccatgaaaataattgcaagtaatgtcaccccaaatttccacacaagttattcttatattatgtcgattttttttttcttgtcaccttttttgtgctgtataactagcccattggactgaataaaactctgccagactacttgaccctgggccgtgcacttcaataataaataaaagtatttcctctataaacactcatttttaaataaacttgtcataatttttttaagaaagaaattccgctaacctttcaaaaattgttttttttttgaaagttagcgaaccattttaaaattgttttagtacaaagtaatccaataataaataattttgtttcccactacaaattattattcttttttaaaaaattaaagaatcttttattcatgtgagcaaagagtaattaaagcattttatttatgagcatgcatgtgaggaaagagtaattaaagcattttgcaagcaataagtagtaaatgacatcgcttggttcaagaggaaattgtcaagaaaaattcacataattcatcaaaattttaaaaaaatttacaaaaatacataacacgattttttatttttattttactctttaaatttatttatgtacaaaaatgtattttcagtaatttttttttggttattttattattttattatagttgtcatgagttgtttttctt

SEQ ID NO: 24231 - DNA, 1473 bp, Cannabis sativa
gctattggtctaaaatctttaacaaaattaggacacttaatcttaggcacaagagtaatgacggtagagtttatttcttttaatatgttactagaatccaagaaggtcaaaacagcttcacatatgtcatctccaatacctcccagttatcttgaaagaagctgctagagaatccatcacggcccggggatttattagcaggtatgttgaaagcagccttttttacatcttctttggtaaactgctgaaggagataatcagcttgagtcgaattcaccataggacctgatgtgagaatgcactgctccacctgccttctatgttcaagtttagagcccagcaggctcttgtaaaattccaggaaagccttagatatgagtgttggatcagtgactctactgccctcttgattctcaatagagaggattcggttttgcctcatcctatgcttaatacaagcatgaaataaggaagtattcgcatccccatgttgaatccaatcaatcttggtcttttgcaaaaggaaggagttataatccttttgaaccctcacaagcttttctcgacattctttttcctggatataaagtaagggatcaagaggctaaagttgtatctggttttggacagcctccaaaccagattcagctatttctacctactgcaataaattgcagaatccttccttgttcagaattcgaagcctattcttgaacagtttcattttggtgacaacctggaacatctttctcccatacatttcgagttccaaacatctttgagttgaacatcatacttaggatgtgattttcacatcctaaagtatttgaaaggcttctttcccctaccattgcaagatgtagagctagaatagctggagaatgatcgaataatcccttattcaaaaatactgcttcagcaaactcatatctattgatccaagattgattggccataatcctatcaatcttggagaatattctatcaggtccaggctgcttgttagtccacgtgaaaaaattcacactagcctttacatcttcaagtttacaaaaatgcacacaattcaaaaagtcagagttcggataagaccttactctatgcccaattctttcttctttggccaatatgtcattgaaatcccccattaggcaccaatcttcgtctgagtacaaatcacgaatgtccttccagagagtcctcctttctccgtgattattagaagcataaacaattgtaagaaagctattaaatccctcaactgttgaaaccctcaaatgcattagttgactagtacatttgatgatgtcaacagtaaaacgaacaggattccaagcaatagcaatcttacctcctgcatgccgagctatattggaagagaaacacaaaccatcaaatacattggagtataaggctccaacaaaaccaccaaaacttttttttaacaaacctattattcatttgatctaaatt

SEQ ID NO: 24232 - DNA, 3121 bp, Cannabis sativa
gtaaggagctggttgttcatagttttccaagtaatgaaacgatgtttccagacactcaatctatgccaaatatctttttgcataaatcactctattagcattaatcaaggtgttgtagaatttctaaattttgaattttccatttggaccagcctttacaagatcttatatatcaatggagtttctaattttgattagtttcttgaagtaccaacttgagtcaatcttcaaaggaactaaccagaaatttcggcctttcaaataaatggaatctatccatttcacccagagattgtcttgtttggacataatcgcccaaatatatttgccatcatcgtaatgttccatttatggccttcacaaaaaccaataccaccaaacttcttgggaaggaaaactttttccaaggaaggaagatgaaatttacttctatttccattagtaccctaaaggaaatctctacatcacttactaatggcagcaaaaatcttctaaggaagaatgatgatacttaccctaaaaattcctaatgcccaataaaatggagtgaataagtttagctctcccagcaaacgaaaaatccttgctcgcctaattatttagatttctctgaattttttcaagaatttcaccacaatccatagctttccatttcgttggccttaagtacactcaaagatacttcaaaggaaaggatccctcttccatgttcataatgttcaaaaatttaatcttaatatcagtcgatatgcctttaaagaaaatatgagatttcaatttgcttaaagaaagaccggtggactcactaaacctctaaatagtcgaatgaataatttgtaaggatttggaattacattttcaaaatataacgagatcataaacaaagcaaaagttgattagttttaaagtcttgcaaagagaatgaaaaccaaaccctttaacagttgagcattgaaggaataattcggtcaattattccattacaataacaaagagaagaggagagataggatcaccttgacgaagacatttttctcctttaaatctaattgtgtaatcgactgttgagcataagagaataagaggtccccctaaacaaatcaaaatccaataaattaaccttgaaggaaaataaaattccttaaggagctctgagacaaagtgccaatcaactatgtcataagctttgctgagatcgattttcataatacttctagccaaaatattttccttgtataaccctttagaaagtcttgaaagatgaggatattatgagcaagcaatcgatttttaacaaaggctccttggttgttatgaataagagaaggaagcacttcagagagtctagcacaaagcattatagagatgcatttatacaaggtattacaataagcaataggcttgtaataaatcaatgtggaataattattcaccttagggataaaacaaatagccatttcattaagacctctagggaggaggccatcttgaaaaaatttgagaattgcttcagtaatttcatctccaatctcacaccataagcccttaaaaaagccagcaccaaagccatccagtctaggacttttattggaatgaacaccaaagattgcatccttcacttcagcatggaaaaggtggtaattctattctctattatccctttttttatgatagcatgaaaaaagtgtgaattttcatctccaaattacaactaattaacattactaagctgatgaacataactagcatatctgagtttcgctaagttaaactcatgaagcttctctttttcctcccattacagctgaacattagtaggatcattggcaagcgcaccttgagctaaattaaaactctctttggcctcaaagaatcttgtaggaatatcccccatctccttccaaaattgcttcttaagaacatgttaaaatctataaagtttagtaactatacctaagagccccttcttagtagtaggtaatctccaattctcaagaacattctctttgtaattttcatggagcatccagcaattgaaaaacctgaaaggttcaatcccaacattactatcatcattgttcttaataacacagtaactatgatcaaataaattatcccatttacaaatcccttctgtactaggaacaaaatcataccaactttcattcaagaagactctacccaacttatagtagattctttcccccggttcatgcttattagaccatgtataaaatgagccagaacaattcaattcagtcatttggtcatgagcaagccaattctgagcatctaagacatcagaagccatgacttgtcttccatcaaatctgtcctgataatcaaacatgaaattaaaatcccccaatacaagccaaaacaggttaagcttcccaataccagcaagcttatcccacaaagtcttcttttcaacactagaattcaatccctaaacaacagtaagataaaattttgagtcatggcctgagattttgatcttacaatgggcgagttgagccttctccaagagaacttaaacttttacaaaacatttctgccacattaataagattctaccagataaaataggactagaatagtaatcccaattgggaaaattattcaaagttaagttggcaaccttctcatgacaaactttagtcttaaaaagagcaccaaagcctatcttattcaaatgacaaatatcaaggatagtgtgctgtttactatctttattcatgccccgaacattccaacctaacaagttatactactctgggattcaaagaactagaattaagacctaactccccatcctcaggctcttaaagcattgtaaaaccattgttaattgaagctgaaacctgttgaggccctacattttttgtacccttccttcttggagtaatccaagtattatcctgatcaaccaaattaccagatgttgaaaccatttttccctcgtctgatcttaattttgcaatcttgttccaaaaggaacaatttcccttgcatcttccctctgaataaaactgttagagaattagctgtatattaggtgtaaaagaattagggtaacttgtatttagtagtttcctattttgttggtagtttcctattt

SEQ ID NO: 24233 - DNA, 3416 bp, Cannabis sativa
  modified_base (29)..(61): a, c, t, g, unknown or other
attaaatgttatttctgatttatattaannnnnnnnnnnnnnnnnnnnnnnnnnnnnnnnntttagggcataaaacacaacaatgattgcctatgttctttttgtggtgaagaggtagaatctgagatacatattttttgcagttgtgcttttgcccgtggcttgtggttccttagtccctggagattaaaactcatagtctaaacttcgagtcctttgaagacttcttcacctagctatgcgatttcaaggacagtaatctcatgatgtttgctgcgtgtttattcgaaggaatttggtcctgcagaaataattgcattttttgtggcacagtccctctgttgggtgtcacgtaggattatatatctaaaagagtagttgagtattctgctattcatttggcaggtgaacctatgattgttcaggagggagagtcgggtacttagggacttgtgtctgattctagtttcgatgctcatttttgtgttgatgcttctgtccttaatggctttgcggggattggaattttctgttgtgctgcagatgtcgataatgttgttacgattcaatctcactgatttgtcaataatgttcttgaaactgaactggtggcgttctacacggctctggaacatgtttaggaggaaaagtgtgcttcagttttaattgagtcggattcgaagactgctattgaggcccttgagttgtgtgagcttcccctagcttggtggtcatttctaatttttaagaaatgtttagctattactgttaatttcagtttggtctcttttaaatttattcctcgtgtggagaactctatgactgattttctggctttccaagctagagttaatcgttgaagccgtttgtcggtggttagggaggcagccccttttatggctgctgtttgactctgtttgttgtttcgatttgtgttcaatgaatgcctcttttaataaaaaaaaaataataataatatgaaggtatttttaattaagtgaatataaaaaagaggtattcctcaacttagtaattttagtgatgtatttcaaagaatagaataaaaaaatactgttgggagtactctatgcaccactgaatattttacttgaaatgccaataagatacatagtaattaaaaacaaatgaaaataaattgaagaagaattaggaatctagaaattacttaaggtgtgtaaaagatcaccaaaatatatgtacattggagaaagcttaatcaacaaaaaaaaacttacttcttgttctagttctagattctaagtacaagacctgatatattgaggtcaatcatttatatttgtatatagcatctatagtgtcttatttacccttaaaaaaaatctccagcaggccaagagatagaaaatgattgcacaagccataagcaacattattaaactgatgatctttgtctatagtatttaatgaaaatggggtcctccattgcctagtctactggtatctatataaatatataaatatataaagagcattgttataaggtactggtggtgtctagtactatctcgacatatcacattgtgattggctagtgatactccctaaaaactatgatattaaattatatagaacccgatacttagttggaccaatagcgatattaacacatagaagagtgttaggcaccactactacttttagcatttctcctatataaatatacatgttatagatagactagggataactgaaaagatttcatatattcagtatatgtaattatataataacccatcatgtcatcatgtagggcagtagatggttaaaatatataaatgcacataactcccccatctcatcccttctatttttttttaacaagtctcagattcaagcaaaagctttgataccttggtcattggcataattatttgtttagggacaaagattccctcacttgggtttggatatgaccattatttatatattaagtataattattttagaataagaaagtgaaaacattgtgttgcgttaacattattggctgaggtgggcctgagagaaagtaataagtaacattttgcatgcaatgtctcctctacccactaactcccaagaggatcatgtatacatatcatattcataatcacacattacatagtcatatgacatatatatatatatatatatatatatgtgtttgcttgtttaagtgggcttcctcttaggaaaatgacacccaattatttataggtcatcttagataatgcatctttgcttatattacaaacaaagcgaaagccttaaaataaacacaacaggatcataatattaataaatctctccttttcgtcgccacttaaattgttcattcttggatatgtcttcatttctaaacaaacaaaagttagggaacaaacaaggcttaaatatacgttattgttgtgttaaggcacatatatatatttattgaaattaaacattaaataggggtatcacttttatttttgttgtaagaatatttattgttttcgttatacataaaaaatataaattaatatttataaatgatggtgtacattagaattataacaaatatctaaataatgttttttgaaattttttgaataattttatatatctatttctaaaaaaagatacaaataattgggtgtttgttcttctttttcttttcaaatatgagtacaattaactattctaatttttgaccttataaattatttaaaattttaaaaaattggtagaatgactacttacaactaatgtatatacgaaaaaaaaaaaaaagataatttctccaaacaaaaacaaaaacaaaaattgtctttacaataaaactaaaagtgttccctacttgaaaagatccattgagatttatttgattaactcacataatgtttataatttttctttgttttaggaacatgagtattagggcataaacaagaatagaactccaaaatcaaaatattactttctttttggggttatatctccattggcaaggtacaaattaagaaagactagtatttttgtggtccttttgagaagtgggggaccatactcataggttatttaaccagcccactagtaagtagtgacaactcacaagtaacaaatattactatgtacatgacagataaaaaaaaataaacaaattaaatgttgttataaacataatttaggggtttcacctcaagtaagaatctcccctattatatatataaaaaaaagggaaatttacacccattactgttttttccattttttttttcgtttgtactgtgacccgatggaatttgcttttgtactgtttcttttttttggcagtatactgcctttgcaaactttaacattcaaggggttgttgctttacacttgtcacgatagggttttgccacgtttttttt

SEQ ID NO: 24234 - DNA, 4080 bp, Cannabis sativa
agatctggctgtgtttgggtaggtgtgatgggagcataggattttagattttttccttagtttaaaccaattttcaaatctcacgaacagtagatctgagctaaggctttgtgggcatcattgccgatcggatatggggtttgtatctatcaacctttggcattaaaattatgaatctagtgaaacagcaagaaagtctccatcttgggttagttttaagctcggaacatggaagattagacaacaaacccttgatgttatggaatgaccggttttcgacaccgtttgatcgctcttatggaatcttgcaaacccttgatgtgtcatcggatcctctccccgcgacaacctcggttgccagaaaggaaacgttcggaggccttcagctcgctaagatcgattccaccgcagaagttgtctccggctccggaaaggacgacgacgttgacggtagggttatggtcgagagatgagagggctctgggaaattcggagaataattccggtgagagagtgttgcgtttcgatggtcgattgagtaagatgtgaaataccaatgaatcttccttgttctataaaattgggatctaatattggggcttgcacctgatgttggagcttacagaaatgcaactgaagatgggatagaatcgagatgccggagctagggaagatgggtggagtggacaatcgtaggggaactggggaagaagaagaaaaaacaaattaattagttttaattatttaaaaaaaaaaagaagagaaaaaaaatgattttttagatttttttaattttaaattattttgaattaaaattatgatttgggccaataaaaaaattgacatgtggcatgttattagtatttaacagatcagttagaaagagggactaacggactcacaactttgtcgaccttaggtactttcaccgccaatttttgaggttgaggactaatctgcatcaagcttaagtttttagggacttttgccgcaattatccctaaattaaaataaagaagaaggaaagaaaatgacaaaattttagtataataagtctctaggtaaaatctatttttttttcaattctatttcgcccctatttatagagactacaatacatcacactgctatttttacatatttattactggtattagtgggctgtaaatgctggaacaagtgaggcacatggttgagtagaagagttgagacaaacatggagttgcatgtaattgtgacttatgctctgcggagttgttgagtgacggaaggaaattgaggataagttgaggaatacctcttttttgtatccaataatcaaaaatacccttatattatatttcattaaaatgtacccacttttgtgagtgggttgcccaatataccctcatcttccacttaagtctaacacatattttttattaacttaaggggcataatagggacatcatccataaaagtaggtatatctcaaaaaatataaaaataaagataaaaattataacatgtaaaataaaatgggtatacaatgtaattttctctagaaattgaccacatatagagttaagtgatgttgattatggtgggcttctctcgtcacttgcaagtgagcagaccaacatgtaaggcccaattacacatcaatactttgaacccattagatatccttattagcttaattaaggtgggatgcaagtccatcaacgagatgcatatggtctgggcctattctcttgaactttgaattttacttttcacacattcttttttaatcacttataacttgctcatttggactttgaacctgaaaaaataacataaattcaaaataaataaaatattttcaattaaaaaatttttacaatttaaaccatgaaaataattaattaaattattttataaacacaattaaacctttaaaatgtacgaatttaaactttaatcatggcctcttgggcaccatatctctcttgccactatattgaatctaagagtttcatccaagcgttggcgcatacatcattttttatgaacacctcatagacattaccagtccttcatacaccatgtgaaggtggtgacaaactcctagcatcttggacttacccttcattgtcatgcattggttgtttgcctgggcatcaagaggtccctttgccagctggttcagtgggtagacactcttcatggtgttccatggtattttcttcattcatggggccaccatagttttcctcctcatagtttgttcgtctcgtactcactatgatggtaagtggtcattaacacttgtattcactgctctcaataaaattaccaaattgttgacacaatttttcatcaatggatctgagaagatcgtaaatgagaaagatgaacacatgcactagttaatcaaagtaaacgagtttgtgaaagacaatttgaaaaagatgaacacttggattttatagtggtacaccccctttcggcagtaatagtctagtccacttagagtgttattgatctcaattcttgaggagagttctcaagagttatgttctctaagagtttaattctcaagtaagttttagaatgatagagtgggagctcaagagaatgatttcgtgagaatcaaaatcggagtcactttacaagtgacttcaatccccttataagggtttttatctagaggactctctttatagcttaaaatctcttaacctcaaaagcaccttcccataactatggccgtgttaggtttaaaatacaaaagtcatatttcaaattagatatctaaaaaatgataaaatattaaaatatcttcaaacttcccttgttgaaatatttccatcacgaggaacataggctaagtccatgttgtcggtagatcgcgagaagaatgcgagatgctcttcattttgggctgagagaacaagcacactgaggctcatcttaggtcgaaattataagagtgtgaggcccctatttgggtcgagatgatgatgagagattgaggttcaaattggtctaagatgagtatcatctccttgagctgagatgaacatcttggagtcttcttgggccaaaatgaaaggacatgttgaaatccaagttgagctaagatgatggttgtgtggaccttcctacctaggttctagatgatggtgtaaattttaggccgagatgaaggtacgatgagtgtggcgatgacagtgagagagtgaggtcaagatgagggcgcatgaagctctgagcaaggtccctaaaatggaatttgagacaacacgaactgtcccgtatccatataaaaaattaataccattagcctttaattttgtaagggataacactatcgaagacaattcaggcaaagacgtaggtcctaaaaacaccaaagacgtacgaggggcctatatcttcatttatttcaaataagagaagacataggccaccaaagacataagtatttatatttatataaaaaaatgatatctataccataaatcgacgccaccatttaatatcgtcaccgccaagcccccaacccaaaaaaccctaaaatcaaaatcattaaacaacattatttttcaatcaccaccatttcatgtcaccaaattttgagcgttgtgcgtgatttttaaaaaatcactgtggatttttcgacaaccgtgatatcgaaaccctatatcacacacactaagcttttggataaaggtgtaagaccttgttcaagtttggtgattctcctattatagatttatggtgtatgtggtgttgagattgctctcacatctattatatgtatatatgctattgatatattgtgtttcatgtgtagcttattgctttgagttgtaattcttctcttcgtctctatattctctattttatgtttatattttgtttagtggtcatgtaaaaatagacactaattttgactagcaagattcaattggaatcgaaaagtgtgtggtcataacaaatcgcttaatctccgtacagggttaaagcatgaattttgagggatgggacctaaactcccttagagttttactcattgatggtaacctatcttaaaactagtaaaaatctagtctt

SEQ ID NO: 24235 - DNA, 2907 bp, Cannabis sativa
  modified_base (68)..(80): a, c, t, g, unknown or other
aataactaaatgctaatagaatacaggcaggacggacccaattgttttaatgtgggggctatagcccnnnnnnnnnnnnntattgtcttttaaaaaattaaattatttttttttaatttgataattatagactaaaataataaaaaagcccctacaaaattaaataaatctagtaaaaatgattataatatatgtacaaatatttttcaataataaaaagcccccacaaagaaaaatttctgggtccgtcactcaatacggattttaggggttttaccgctaaaatttaagttttgatagttatatgtaagtaaaatgaaaaattttaggaattttgcggcaattaacccaatatgaaaagatttatgtccaaataacctttttacaactaaatagtctggtgtcgtctaaacttgagtgtaaaagacaaaaatggatttgagcttaatcaagactgtgaaagttgaaaccatgctcaccatgtttgaggaaggaatcatataaattcttttttaacattattcaatcacaaatcacattagcatatataatcctctgtcacgtgagattgggtacctttttatttttttggtatcaagtaaagaacccccattttttatttattttttattaaaataaaaatattaaagaatcaagttcacctttctgtcatgtttaaacattacaaatcaaaactcatgtctaatgttttatgttttattctaaagtgcccctcactaactaaatattgtgtctgtctatctctccttaacaaattataagtacttaattaaatgaagaaacaaaacgtgacatggggttttgcttgaatcctttatgtctcaacactttctttttttgcttttttttttttttttttgttagcaaacaagaaaaaaaaaattccttctaattagacttggaaaaaataaaaagaactatatgacaaaaataactattctcttgagattaaaaagaaccttagcaaataacaaaagtaggtttttttaaataatcgtattcttttaacaatcgtaattaaaataatatattaaatatacacgatatgtgtttagagagaaaaaaaagaacatataaaattgtcaaatatataatattaatatatctaaaacactaaaaaaaatgcttctttttacaataaaaataaataggagtattttctttttgaaaatacctcaaaaacttcataaaataaactaacaagaaacaaacatttggtgattacacgaggattcacctcccataaattaatgaaaccgaagtaagagttcttcactccccacctaaccaaagcatgggcagaggaattctagactctagaagaaagatgctcaaacaattcaaagaaaagaatagtcaatctctagttagggttgttaaaagataagatgaatgtagttcaagctatttatacaaagaatgtaatgactttttgacctgctcgaaggagaagcgagagcgcttatggctaggttgaaagttttcatccacctcgggtggatagatgcggaggtaattttgaattgtcaagtactgattcaagcttgcataaaaatatgtttgatttattaaaatcaagattgtacataaaggaataaaagttgccattacaatatttgttacgatacttggtttgtatttttaacttttgtaatagaatttcattaattgtaataggcattaagcaattctatgatctcaatattacattctaatttctcatgaatgaagattaaaaaaaaaaaaaaagattaaaatgattactacataataaaaagacaatgttaccatttttctccttcttagtttttctttactaagtttattttaccaaatttactttaccaccacattttaataacattttagaaatataaataaatgataaataaagtaagagtatttttgttaatacaatttttattactttcattacaaaataatattttcatattttcattactattactatttctattatcgttataattatatcatgttaaattaaataccacctaaataaataattgaagggcaattgtcccctatcctttgctaggtccaacaattgtcaaaaatatgtactaattttttcaaaaaaacttagtacaattatcattatttttactacatgtaaataaacagtccatcatatcatattaatgttatgtatgcaatccttggtgtaatgatagagggaaaagaaattgttcctcaaagtgaacaatccaataattccaatagaaaaataaaatcttggaggcttcttcattaggtcacatcacatcacatcacatatttaggaagcattagtcatggcaaaccataatctagtgggacccttcaccaacaaggtgactgtcatatatgagcaaaatcttaatcaaccatgtataatctttattagtttttaatcctcaatagaataatattaaatagggaatagattttgtttattttttaaaagtgaattttgatatgtaatttaagtttttttttaactaaagtttaatgtattctaaattagtttgatctgatgtactttgatttttaataattaaaaatcattataatatttttatgtttattttttaatctcaatagaatagaaagttggtgaagggggcacgttttaccaccgatgcagtaaaaaagaaaaatacaaaaccaaccaaaagactactagacggtcaataattcatataagcaagttgtatttgtttattgttatagattttttatttttttgggttggggaaataagcaagttaattgcagttatcgagcatgggaaattcatataagacaaaattaacgacacttttgtattattgttgcactcaaattttatgtgctacaacacacagcccgtccaagaatgaaaag

SEQ ID NO: 24236 - DNA, 3010 bp, Cannabis sativa
gtaataggtgacgttttaggtaaatgagttgtgacaggagatgattgattttgttgagataactgaatcaacaattcaggtttatatacaaaactaagcgattattaactactgtaattagttaatcaactgaacacttaactaacagaaattaaacactaataatagctaatctaactaaactaattaactatgattatccttaacgaaaataaccataatatttaataacaagagcactttctagctaattgagatgtaataaccgtaacatttcttttgcaagaaatatttatgcatatgtaaaatttagcgaatatagcaataggtagacaaaactagctagcccatatagacttattgcagaagcatttgttttattattcgagtagtttcgtcaaaaaatcttgacgtataatttagtttcaggaaaatatatatacggggcaccacagccttcttttaaatatataattttttatgaacttcttttaaatattatatgcagttaataattacttgtaaaagataaacaaatatatactctatatatgtacaaacagtagtagtagtaaggcaaatcatctggtacagctgtaagtacgcaacaaataaacaaacatgttgttcatgaatcatgatgatccgatcatgatgactcaccaatctctttcattcgtacggtcactactgtagtttatactattcactcattatcatgatgaacccataataatttttacacaacttgaccgcaagtggtgatcatcataaaatgaattttaataatttattttatatataaattataattccatatatgggcattttaatttgccatccgttcatttgtcgggaatctatacaaatatatatttatataatatatatgtatatacacatagtgatcgtgatacagctataactaaaatccacaacaccttgattggtaaattgtcagtctttattttcttctgtcgatgatttatatatatggacaacaccgattaaaatttcagaacattaatttatatacgtttataaataaatatttcaactgataattacagattcggttggctgcagtgtctcgaggagattccattattgatagtaagatctagctagaaaacgacagtgaatatcaaatgaagaaaaactcttcactgataaccacactcaagctaatcatcaaacattttatttatttaattaatttagtttagggattagtttagttttgattaagatctttgacccaaataaatatatgatatgaatatcatgatgtccaacatcatgtgttgtgattatattgtgttctaaatttctggtttgtgcatggtatatctcgagattgttgaaaaatcatgagtttgatcctacaatttaaacctctattatactatgctcgttgaattctatgttttggatcttcagttaaatataccttcgtcatatataaaatagagacacttggcgcacatgcgcatattggccagttgactaagattctatgtgccactcatgcatgcctaggcatatgtacaatatatataatatatatcatagatatcacacagttggaattgttggaattaatatcttccaatcttttaattactatttctttttattaacacagttgttagtagtatatattataattattatttcataatgagtcgtagagatacttttaatatgtctagctagtatttgacttaaaagagttaatatatataaggcatttatataagtatgtatatgtatagttaatgtatttatatataaatatattaattgatcgaattaatatgttgattctaatataagctatatattaatatacaattaagtattatatattactattattaatggtagacacacatatgatggatatgcatgtaatcaataattattaattagtttaaaaatggatcagacccgtgaaacaagttataattaagctcactcttgtgatctatttagacagtagctagctagtagctattttcatttgtatatatagacgtagacagtgcaagtttttgtagagagtgtgatctcgctgatgaatatgaaaatatgatagtgatactgagatagtagtcacccagccaagaagtacacgtgtcatcacatcacatgccaggtattaggactctagccaaagtttgagactagctatacgtgatcaaaaacgataggatatgcatacagtattatacgagtaatatattataatgttttgaatcttttgatatataccagtcctgtccacatattactacttaccatatattattttatatggattgaaatcacacgtggtaatagagaggactcaatactggagatgggattgacttatttgccatttaggagattatttatttgagagagagaagactcttaaaaatggcagcaactgcggtgtgtgactgtggagacgtgagagaatgagagtgagagtgagaaaagggaatctaagttcatatttaataatgagacctacattgggaagctcacaagaaccttctttactcctttgttttatttatataggaatataatataacgctataaaatataaatataaaatttagcagggagaaggatccctttctagctttcatagccgacacccatatattttttaactccttaattattattaattttgttaagttcttttttttccgttaatttaggtaattttgtatacactaacctcaccttaccagttgtgtctgaaaatgaaattttgtattttaatattattaatttattatttaattaatatcttaattaaatgtaaaataataaaattaaagttgaaatagttattctgtagctacaaaaaataattttgtaactccaaaataaactataaaacaaaccgtgcataaacgtaaaaatacataagatttttgtacgtgattttaacaatctcgcccacagataagattcattaaataaatttcaaaaatacaaagtaattgac

SEQ ID NO: 24237 - DNA, 2739 bp, Cannabis sativa
ttgtgatcgaaaatcaaatctgaagctttaagccaatttttgactatgatatgtacgttcactttcaagaaaaatatcttgaaccgttcaattctgagaaatatcaaaaaagttatggcgaaaacaatatcggtcgtcgcaccagaaagcttgtagcccaaaaaccaagtacccggaccgcaacattgaaatggctatgtcgtgacccacctgcttttagaggcctaatagggtttctaaaccctaattttaaaaattaaaaggggggctttggatatgcaactttggaggcaccaaatttagagagaaaaaaagggatttttcaagcataaccattgttcttcatcaattcttctcttctcttctatcttttattttatgtttcctgtttgttattagcaattgtttagaaagacaatgaggagttaaacacctaattagggtttttaatggatatagtttaattctttttttatggtttgatgcaatttttaatttttcttcaatttcttatgtgaatctatttcattcgtgtttaatgtttataactgcttgatccaattattattttatgatttcaatgcaaaatatgaaaatagagtattgattatgctatagtgaaatagacatagatttcgtatttgataaaaacacctgtatggtttgtgtaacaattaggatctttatatttaatgcgaattatatgtgtaatttaccacaaaagtgtagggtttttttttcatatgatttagattctatatttcctaataagaatatatattgaattttaatccgctatcacataaaattaaaagagtaattagattgtatttttccatagaaagttgatgcgaagttaaattttctatatttctaaatcgttgttatttgcttcttttatttatttgtttatttctattatttttgatactttcaacatcaaattatttgtctgacaaatataaacaaaaattcaattatttggtacttagctacagtttttgtgggatcgacttcactcacgcgagtttattacttgaaaacaatacgtatacttgtgcggttgaattttcactatttattgagttaaaaatattttattattatttacttagcttttttatatatacgtgttatattattatattgtattttataaaatgaataaaatatattaaaaatataatatttaaatgatatagagaaaaatagaaaaatcatgatgtaaaaatttaaggtattttaataatgtattttaaaaaataaaatactaaatgtttgcatacactttttttgatgaatttcattttgaaataaaggttcaaaccagagcaaaaaagaaaaaaaaaacaacaacagagagttagatggccacaaaaggggccaactcctcaactgacaagaaactaaaaaaactagaattacaagaggggccataatcccctttcctcgaaagaagcattggggattttagaggaccaaaaagaagtatctagacctccccaatgcttagcctaaaaaactctactccacatagaatcgtccccagtagcaagtttccacccaagctctgtcaccaaagcgagattgacatctttatatcttttgaaattgagacctccaaaatcaaaagggaggtagagtgatttccaatttgtgagagcaaggaagcgatccttctcggcacaccccgtccaccaaaatttgcaaattaccttgtccaactcttgacacaaggatttcagaaacaaaaaaatcgccatagaatagattggagtgcaaagcgcgactgaacaaataagggtagatcaaccagcttgcgaaagcaagttacacctccagtcttcgatgcaagaacagatctgatctttaagaaacttgaaatcacgaatcttgctatttgaccaagccagcagatttcccaaggatttatcctccctattaagctcacggaaccccaagctatccacaattcatggataatattctgcctagcattttttgaacagatgtaggtagatttatggacattcaaactctgtcccgaccacaaacaatacatgttaatgcactccttgataacttctacctccgtcaaatcaaccttgcaaaaataaatgtatcgtctgcatacatcagatgggagatagtcaaactgtgggtgcgaacctagaaaacagagatcaaaccttgctcctcctttctcaacaacatacgggacaaaacctcactaaagaggatgaacaaatatggggagataggatctccttgtcgaagcccctattgagggagaaaatacttaagcggccccccattcagtaggacaaatatagacacaaagttgacacatttcattacaaatttaacaaatttagctccaaagtcaaatgccaccaaagtcttttcaaggaagctccacctaagatttgatcataggcttttaacatgtctaacttgtccaactctcgaccttaagccttttaaaggaatccaaaattttatgaaccataatactattctcggtaattcatttactgtgaacaattgtagattgaaaaggagaaatcaaatctttgaggagcgatcgtaagcaattagctaacaactttgctacaatcttgtaggcgaaatttcacaagctaatagaccaataatcgtcaaaattattagctcctagttccataggaataaagaccacaaaggtttggttcagagctaggggtgttcataaaatagccg

SEQ ID NO: 24238 - DNA, 1247 bp, Cannabis sativa
ttcacagctgccgcactgtttaatctaaaagccatcttgaacctaatgaactgtattttaaaccaagatttttttagcaatatgaagactgtgaggtaccctggttatagattcaacaggatctcttcaactgtttcgattgaaatagtttaatatgtggaaattttcaacaatgacccgatttttacagagctactacatcaatttaaaaattaaaaaagacacttaaactaactagttggtttatagatttgtacaatattcattgatttggacatggaatgatacaaagatttggattttaataagtctcatttctgtaaatatcatcagatgaaccacttatgttgaaaattagaaaaagaaaaaacaatgaacaaccacacaacaatccattccattcggacaattatgacatgaacaaaaaaaacatggcacttacgtcccagagaatgccacgagaccagcactcaaaaggcctccaaactgaaatataagaaccagcttataaaatcatccaacacattcaattgaaaacatatcaaagaaaattagtgataatttaattgaatttaaaagaaaggaactcacaacgtggggtcgtttagtgattggagcagcaagcaaagctgctgtgtgaaccaaatggtaaagagatgcagtatgccaaacctagaggccataacaacaaaattacacataacatacataataataatgaggagaaccacaaattagtgacatagctcaattgggttcatgggttgtgaatgaaattgaaaacaaacctctttgtaagcagcattttggggtttgaaggcgtgggcaccataagctcccaacccaacagcggccacacctgttttccattcaaaagtaataaattatttgctcgaagttttctaattaaacaaatttcatttcatcgaatacaagtgatttagttctaccagaaatggcagctattttgtgccagtgaagaggatccatggtttagtttgctcgaaactacgggtaatacaagttcaagtacagacccaatttcccctacctctattacattccattcaaagaagtggttggcgttgttagaagtcaacattctcaaacgacgtcgtacctgctcaagaaaaatttatatttgttcatgttttaatttattttatttttaattaattagatgttaaagtgaatacataaaattaaataaaagtacacaacaatgattttcaattttatatataaat

SEQ ID NO: 24239 - DNA, 3573 bp, Cannabis sativa
cacaagtaacattttgttgtgataaacgtcacatttagtcacaaaaaatgtgactaaaaaattatcactaagaataacaattttttgtagtgagtaaaacaaattagaacaaaaaaaaaatgtaccatacttttatttatttatttattttttttttttgacaatgcatacctttattttttttaataaatatatatttgattaaattgatttcacaattaaccttttaatttgtgtgatttggagctatcagttgaagcactactatctactattttaatataactaaactagtaaatattactgtaattattatcaccattattatatataccatcatcattaaaacagtacgaacaaaccttagtgggctccgagttgcacagtcaggcttattatatattactatctattaattgattagtaaaaggaaaatattataacagaattaacttgttaatgatgaacctataatacaagatcgatcatatataataagtagtgctcattaattactcaatcatgcatctctaaaatgcgacagtttttaaggaatgataataataagagtaacatattaataatttaatacaacaataatatgtacaaaaaactttaatatatatatttatatcttagtcctaaataaactgcagctatctcgtaatgctgtctcacttaattcttctagctagttttcccttattttatctctctttcttttttaatataattttctttttgttacatatattatttaattaattaattgtgaataggggtttttctcctagctggagaatagtccatctcagcaaggtctacagcttcagaatatggctcgtactgatctgggtgttgatcatcatcaatatcagaagtagtaatagtagtctttaacgaattaacattattattattattattatgacttgaatatttctcttcttctctaccaccattcttctcattattattctgtaaaaaaattaatggataaattttatataatttaattaaatatatcaaaattatgtagaagtttttattattttttgaacaaattaataatatatatttaaattaaaccaaccttagaagtggtggtactagtggaagagggtggtgtagtcacagtagtagtactgaaaagttttctactatttcctgcatggttcgtaaaaatgagaaattaattaaccactacttatttaactttattaattattatatgatatggtcaacaagttgcttcttcacttcagttattacttgctttaattttctaggcacttttttaccatttaagaaaggtaaggaaaaaacagtaaaaagaaaaaactttgcactaaatattaataattaatgcatgttattaattagataataataagttgtaactaggacaaaatactgtttgattacataattttggtaaattaaaacgtgggtttgattcagatttctgaataattaaccacaggttcttatgagactaatttaatcaaagaactagctagctaattagtgtagtcatgataaaaacctagctataattataatagaactaattaggtaagaaaaatgaaagaactatatatatctatatagctaataataaattaatactaattaattataagtaatggttataaatggtgtctggatctgtgcctcctaggtccataataatcttcatgaatacttggggaccaatgtgatgatgatgatgatgatgatttcttggagactttagaagtggtagtagtagtagtaactttcttcatggtattagtacctgaacattcttcatctttgcacataatattattaccctcttcatctttatcattattctttacagctttattacttgatgaagtaataatttccttctcctgaaagaaaagaaaaagaaaaggtaagggctttgaatatgtaatatataagagattaaaaaataaaaaacaagagaaaaaaatatgtatatatatatacttacatgatggattattggtttatgttcttctttattagctccaagcagtgatgacatgaagtcccattttcccaaacgaatccctgaaaaaaataaataaatattgatttagagttaagtattttccataaccaaatcgatcattatatgtatatatatatatatgtaaataatgccaaaatatacttttctgctgcataccttgagcttgctctgaaagtgtaagagacaaaattagaagaagagcgactgtgaaagatggcctcatttttgcaaagtgatcaagaacttaaatatatataataaagattgaagtaagaaattatatgtaggaaagaatatatatagattattttggaggatctttaagttactcaatgaagtaaaaaaaaaatatatatggggttttggtttcttaatgcttctctgctagctctgatgaaaattaaatattttggaataagagagagtagtagctagtagtactgtggtggcctgatgtttttaagttttaagtggttgatgagctatatatatatggctaaggaaagctaatttcccttatatatatatatacaaatattatatctatatacacattatattaatgtgtgagctagagagggtggtggggtggggttccacatttgggttttccaacatgaactagaaaaatgggatttttcttccacttacctttgtttttccttgtctatataatccttgtagtgtaaaataaaataacataaaagggaaaagagacatcacccataattcaatcatcggctgctaattaggtttggaaagttaatttgagtgaggagaccatgatgtaattccattatagctacagacatacttaatcaaatgtttttataaatcaatacaattattaaatgatgtttaattaaccttatttaccttcaaaaaagtaagaacaaaattgtcaatatttacttgccatacatctcttcctgcacattttgaattcttttctcaattttttgtcttattgttgatgatcacatccaaagaacctttggtcttctccactgtatctaccatgtttgcataaattgcagaatacttatttgcaatttactcatggcaaaatctatacatatatatatatacacgctataagataaggaaaattgatttgtcaaggcatgtttaatatgttaattagctagtatatatagtcaactgcctttgcctttttgctatatatatgataaatcagatcatggctctatagtaaagggatactctttttgagtcgattaattaatcccatcaaatgactttagtgatttgtttgtcaagagaaagaaacctatcattttcatggtacgtcacttggctacttatggttgatatggggggctgaatgatagatattggggggttttggaattattttagacttgtattgtatctttattttattatgtcactagttatacattataaatttttagttaaataggtacacagttgtggggaattactccatatacttttttttttaatttacggtttgagtttccaaagtggttgtagcgctagttgca

SEQ ID NO: 24240 - DNA, 1679 bp, Cannabis sativa
aacatgtgcaatgcgggggaatctacttttggctaattgttgcatttgttacttgaattgccagcaaataggttggaaaggagcccccaaagtctagttttgccttttcaacatgctaattgctacatataatgatggtgaatatcccataggtatctacaatttatatcataattagttggacccaattacttatcacactatataataatccaaactcatttcattcatgttttctttttcttaaaagaaaggatttcattcatgtttcaatttcaaaaccacaaattatggcctaataataataattgtataatgaacactttcctcattttcaactattaatctaatgttcagatgacattttgttttgttctcatgtgtttgttgaggggaataaatgaactttatgaaaaatctgcaaaccttattggactaaataacggctaataaattaaagttaggcaatcaactaattaaaataagtgaagttcagatattttgaaagagcctacgttttgagtgagcaaattaaactatttatggtgtgtttacttaggaaaattatggtgtgtttacttgaagttaggtagatatacatatattttcctatgaggataagggggcaaggacttcctcttgaagcggagattctcattctaaatttaaaatttggtggggctagagattcccattctaaatttagaattgagtgagagcgacgattcccattctaaatttaaaattaggtgggggcgaaagtaattttttgttctcaaatgttaatcgagacggtaataggaatagcaataaataggacgaagataatcatggtatgatcattttatttaacgacctaacctatttaaatatcagaattaaatagattcttatatgcttctaagcccatacgtaaactaatataattactgaaatgagcgttctatcatttatcgcgtttagccaagctcaaagaaaatcattattttacttcatataagctatagattctatatctataattaacgctcctactcactttcactactgaattctcaagatctgagtatggactagagctccgggtaaactaataatgaacaaatcaaagaacttgtataatacaattaagctagaacttaattatctcaggattgagatattgacctaaattcaactaagtgacattaacttaaaaaagacataataataagtttatgatatcttttctactatcaatatcggtccaatccgatgtatagttgatacactcgatacaagtttactaataccctgaaaagaacattccacttatacaagtgtaagtaaactgcatcgctaattatcacgttagtataaattcaatgcactaataaattgtgggactaaatagtttgaagcatataatcataattattttccaatgtgtagacaatactataatcatgagtaactatatgtccatgatttaatagaatttatatattaaacatataatcatgaaagcaatcttgtgagccatgcaacataaattgatttcttatttttttttttaattagtaaataaaattatattaaaatgagttttatttatggcataaaatttcagcagttgtaataacaaatttcatgaaaaaaataataatgttgtagtacaaaaaaataaagggtaaatacca

SEQ ID NO: 24241 - DNA, 1699 bp, Cannabis sativa
aattagcatacccatgttcctttatcatacactgactgttagaggctttaggggaacagccacgcctcctcgtactattgatgctttttgatagctcatcattttactgctagtaccattctcctccatctctgtccatttagccttatcatcactgtttactgacatgtgtccctttcccagttcaccgtttccatatgcccttttatttaaaacacattttaaactcttttaattaatttattctcaagtaaaccctttatttaagacaatattattatcatcaagtttttttcgtaaaggaataacatttattatttattttgcgttaggacaacttttgtcttaattttgttttaggtttgagtttgaattcgaaacctaaactcaattatatttatttaactcaaaaataaatttgaaaaaataaatatcgcacaaaactctataattttgtcttaagtatataaaataataaaacttgtttattatttattattaaataattcagataattattattttaaatttggaatttaaatccaaataaatatctcaaaataataattaattatctacaataaataattaatagataatttatagtatgtatactatatatacactataatatatacatatatataatagtgaggtttaaccgggctggggctgacaagcaccatggaccactgtagtcggcggcttgacctacggtggccgtggagagcacgagaggggattcacatgatcacatgtcacaatcaactcgagacccaactgggtctatttttctcgaggtggacggggatgggaccccgtgataagctccaagaggagtcgtgggtttgggatgaatggagaaagacttccagggaggtcgatcagctgtctcacagcaacgaccaaaagggcattcgttgttcacgtgggttaggtgaagaagaaacatatgggtctatgcattgcttacatgcattcatgtgggcatgctacccgaagccactcgggtggttgtccatggctaggaaataattctcgagctcacatgcatgtgaatttgacgtgtatggtttggtttcaagtttagaaactgatttcacatgcaatgagcattacataggtatataatttacatataaattaattttcataaaattaaaataacagaaaaaatttcatatgccccttgatcgcttacattattttctaaaaaataataacaacaaaatttatacccaattataccatataactaacaattcatcacctctcatatattcacaataatttaactatccattcacatacgtattgcaaatatatatatatatatatataaaaaccataaaacccacacaacatttaatgtatacacattcatggaactactctgttataaattgttgatttttatggtactaaattagatacgcagtagaaggatttttgtatttataattatcattgtaccatagctcaataaatctccaaatgtgtgtacattaaattaaaacataaaatagtaagtttataatatatacctcttgaagactatcagcgtatcctcaaaatttctcgtatgttgtatcccttaattcagatgatgaggataatgcaattaaactcacgccagtgtcttctaaaaaaatccactacacaaaaggaatagtaagggctattaggataaagtttataa

SEQ ID NO: 24242 - DNA, 2090 bp, Cannabis sativa
  modified_base (261)..(269): a, c, t, g, unknown or other
cgttgaaataatatttaattatcaagaagaggagtaacgtaacacaaataaatgagtaggaaggagtagcttattatatcaaattttgaattctaaaaaattgtgattataagttaagtgttgattaacatgttcgttttccaatttattaaaattaattaatattaaagtatttgaatttttatcaaagtaaaaattgcttagctaaccattgaaaaattcacattaaaagttagtattgaaaataataataataataannnnnnnnntaataataataataattaacagaggaggacaagtaaattgacttaattgtaaccaagattttctacaacggttcgctgcatatattttgaaatgacacgtgtaaaggagtaagcagatgttatcttggagttaaaagtagtaaaatagaaacggtcacagagtaacataactggcagccaagtcattaactggtgaaggtgatgtgcatgaacgcaaacgtgtcgccacatatactattaattacctttcttcaataatgagaaaaaaaaatatcgtcaatgcaaaaatctttcacatttaatttttatctatgataattactcattattaatttttttacttaactttctttttgtcaggttcaataaggtaactatttatttatttttaaagaataaggtaactactcgatataattcaaaataataaaaaataagtaattgtttggctaagttactgaaaataatttttaaaactcactggttacctttagtaacttagccaaacaaataatgtaaaagtaattttttacccaactaatgcaaaaaataataataataaaatctaaattcattattcaatgtgctaaaataatgttctttattcttatatattaataacttctttttttttttctgaaagtaattaataaaaattttattattaaaagtttaagacaaaattaaattttgttgaaaattaatttaaatttattaattctagttaaatttggataataagaacaagaaccagaattatgaccacgcgcggttaatttccatatatttataaaacagaacattattacttgaattttcaaaaaccgattaaatttaatatttgtttaaaatgatttattttttataaaattacactaaatataatatttattcaattatcaagattttatggggttaaaatgaaaattttcttataattataattaatccgtgaaaatcaagaaatctaatctaataattaagtaaaacgcgcagcatttaatgataatgcgtagaatagctaatgctatattcacaatagcatggtagttatatgtataattttttttttttaaaaaaaactaaactaaaccaaaaacaactcgtaatgtcattaattaaataggtagttagttgctcattataataattaataataataaggctcttctttcttcaggttgatcaattacgataagaaaaatttaatgtattgtacagttaatttcaatgtgattttataaaacagattttataaatgattaaattcaaatttggttcaaatgatattttttttggaactgatcatatagattgagttaacacatcagatgataacattactcgatatttatataatgtctgcaaaattaatataaatatctaatttttcaaaactgataattttttttcagaaaaaagagtaaataactaaaaatggttaatctataggtatatagtcattagtttgcttttgtggcaaatgatttgtataaatccatatttttagtgggataattaagtgtcaaaattcactgatgatgtgaatatcatcctgtcattttacgtatataattggcaaaaattaactatatatatttcatcattatctaaacttcttcataattaggctgcctaattaagttgtatatatttacatctcaaaaaaaaaaaatttaagttgtatatatatataatgatcatgtagatatatatatatatataattgtattttgtttatgttatattttttttttttaaaaaaaaaacccattttgaattgatagatttcaaaaggttatatacatatatatatatata

SEQ ID NO: 24243 - DNA, 1289 bp, Cannabis sativa
caacacatgacagcaccagtactataagcattatccctgaaaatttaattaattcaaaggattattgatttaaacgatatttcaactatatttttttatatatccattactattaatttatcatttactaaacctccttaactaactatatacatttcaagagacactttgtattatgatgtttttttctttgattaattatgtattaataatgtatgaaaataaattgtgatatataagatgaatgaattatttcttccattatcaattaattttaagataaaatcttattcattttatctctaaattctaagagactatcatgtaatttttttttcctgtacttcatttcactccagctaataaatatttaaatcaatatatacatttaaataaagagagagagctcagatttacaaaggaaatgagatagatcacctccctgccgtctctagctagccacattttggaagccaatgctggttgtctttacatatataaatatatatgattaatataacctcattaatttgtttcatttgatttaattaatttaatttacagatagtgcagcattatctgttcttaggtattacctggatataacccacttttattaaaaacaaaaaaaacaaagattcagtaatcgtattagaatcttgcaaagtggtgtttggaccaataatgtatattcagctctttatgcatattctccacatccacatttcaacattataaacatgacgttcaagtcaaaacaaaacaagcaatgcattttattaatatgagcttttgcaaattgacatatatataatattatatattggttggatttatttagtcaatagttaattacgtaatcaattaaattatatatatagtggcggagtgagctacaaatattaaggaggcaaaaaaaaattatatataaataggcactaataaaaaaaaatatattttcatagaaagaaatataaattttatatcaaaaaaataaatatattaaaataaagtgaaaaaaaaaacaaattttatgagaataaatataaaattatgtgaagaaaaaaatgagaaatataaatttataaagggaaaaatatataaaaaaaaaaaaaacaaaactaaaaaaaataaatttatgggagcaaaattgaaaatatataaaagatttcatacaaaaaactaaattattagaaagccctgaaatactattttggaccttgtgttttgcaaaagttacaaattggactctgtattttgttaaatgataaaatggacattgtattttc

SEQ ID NO: 24244 - DNA, 4174 bp, Cannabis sativa
tggaggcttgaagcggggacgttacagaaggactgcttaaagtctgtcacatgcctagtgatgtttcaccctctgaattttgcaagcaaagtcattatttgaatttgttttgtccacctttagcctttccctcctgtgaaagccaaaggttgttgccaccactacaaaattcaacatgactctcacttattgaaacagacctcaacataggatagttgcccacgccaggacgcaggcccagctttccctctgggaaaccaaaagcttgcctatactctcccttatgaggtctatgtcatgaaggaaccatttcgggttagcaacctaactaggttttcacctacaatcccacggcttttccttacggaagctaagagattattgctaaaatttcaagaattcccctccaagtagtcatggagaggaaagacatggcctggatgaatagtacgcttcttggagcaaagaaggaccgcacttagacgtcctcctcgaagattggaaaaggatacgagttaaatttcaagcaaataactgagaatttgagactaaaattcccagctcatttgggaggtatggtgcgcccggttgctgatgactgcaatttcttacatccatttgccaaagttattagctcattgtacatatgcaaccaaaagcaggaaattttttaaccaagtcttcccaagggaaacgcgcttgaattctttcctcaaaggctaaacttaagtatgaattcggggataagatgcgtatttggccagaattcttgaaaagaaaaatccacccaaattccttcttacaaatctttgtggatttcttagaagtttagttcatcgggttgtatagttggctaacatgttaacaaggactgaggtaagaaaatttcttaaaagtctaaggcaattgtgagcattactccaaaactcaatcttgtaaaagaactaaagcctgaagaagatgtgtgaaaaactgaaggctcattttcgcaaaggaaactatctccgagcttaccttaagcaagtggtcttcccaagcgggaggtcaagtagcggggaaaagcactacaacttcggggcaaaagggtaaaacccataaatgatccctgaatcgactaggagatgagtaagattaatgagaaaggttgaaaacactggccgttggaaccagatgtttcaatgacataaccagcccctaaaaagtctaccaaaataaatctccagaaagaaatgccaaaaaaccttatatactattacaaatagccctcgcgaccaaagcaaaataaaattatctttgcgacttgaaatgtgtagcaaaagggatatatattaaaaaaaaaagagagagaaaaacaaacaacaacaacaatttaaaaagcctgctgcaactcaagactgggcgccactagacgggttggaggtttctactccagataaccgctccaccgtctcccgataaaggtcatgaacgaccctcatacctcgaatgaggtgagtctgttgagcgtaattagcctccagcaactaattcacgtttttcaagccttcaatctaaagcttggcctcggtaagctcaactagaaaggtgtctttagtgtggtgcaagtcacggttgttcgccttaacttgctctagttttatcaccagcgtgctggcctccttagcagtcttctcagctagcaaagccacctgtcgtaatgagccaaaatgaaagagccacgtatcagaacaggggtcagagcataacaaaaaaaaaaggagagaaaaagaaagtctcttaaaaaattttccccaaccgcctgttgcttggcagaatgggccagtgtgaagatgtccacgctactgcaggacgcttaagtctccataggcagctctgaagcgttcccgaccacttaatccaaaatttcaatggaaaagagggtggcctctctccctaccttgaaaaccatgtgcttttctaagccctctacttccacggttggcctagcagagggtagggtgtgcaggccatccaaaattttagcctcttgcactaccaagagcagcagcccgtctacgaactagcaccttctttgcctccaagcgctcctttagggccttgttcacttctctctccttctgcatattaagaggattgaaaggaatggttttccttgggaaagtgaacccaacggagggtatttttagaatggcagaagggtagtatgactgaggatggcccagcctcaatggtggatcatgacgctggggtgggcccctatttcaaaagtggttgcctcaggcatttgccttttcctaccagcaacattttcgcataccactttagaggaattggtcctttccatcgtagacctgatatacctgccagaaattggtacaaaggtaaaatgggtcagtacgacacaagaccctagtactctcactccccatgataagggcaccgtgcatcaatatttccagagcaaacaatcgcacacaacatgcactttacaactcccaaagaactctacctcaagtaagtgttgataagggaaacttatcggttgttaaggagaaatgaggtgggtgatcctggtgttgtgtcttggtcgatgcaatgcgtgcctaagaatagagttgctagaacgatcttgcaagacagaggaaaagatggaaccaaatgctagaactctggtacgacagttagtaaaaaatgtaaagtgtgaaatggctgttgaaagtatttattaggccccaggaagaggtaccttccacgagaagcgaacggttagactcattcacctaaaggacgtctgatggttgaatgagtgggaagctaagaaggtgtactgactcctaacggttggcttccaccgttgcatgcatcatgaaaagtgctcagcgaatggaaaacctattcaatccaatcatcgttgtttttagtatcccaccaaacacgcacccaacacgcgcataaaactcaaaagttagcatttaaagccctgacaaaataataaaggagataatacctaatgacagtgacactttggttggaacctgatgacgtgatgtaatgaatagttcatatttccgcacgtgccaggagtcactggggaaaaaatactgcaagctccctgaccatggtacgtctcgaaagcttggggggtaaatgttatctgcgttttcgtaatcgtgacatgtggattttaatcaagaaaggctaggaagtcattagtcaaccaacttcctcaattgatgttctaggaggataaaagccccaactcacgaaaagggcctccatgactaggagtcccctaactaccagtaatgcaaaagggatccgtgagctaaagtcttcccagtcttggaaaacgaagccatctactcccgtgaagagtatgagatttacctagaaggaccaaggcaatttaaagatgcgccaaattgggctacacgtttagcccgcggaggctctgcctatacgtgtcggactacagacccagtaaccaggctttttcaggtacaacgtcagaggttgtctcccacaacacgctattgtacagagcatgcatgtctcatcgtacctgaccaaatgatccaacgactaggaataagtgaaattcaaaaagaaaaagccttgggacgacaggcgtaggaggtccagcctgtacgatctgacacccataaatgccatatggaaaaatgctacttaccaatccaacggtcagatttcacccaaggatgatcaatccatgccaacacatgaagagaagttgacctataaatgcccctgaaaagcataagataaggggggactttttccaaaaagagagaccttttttgtggggcaagactcatccttcaccattctgggcaaacacctctgtattaagccaaacaatattatacctaaaaaactcataaatattcctactaagcttcctcttctttgagaggaagacgggggaaaggagttctagtctattgtatttctatttgcataagcagttactgaccgttgtgcctaataaaatagactcatggaataaggatagttaacgcctgaaccacgtaaaaatctcttatttgttatcctgctatttattttgttgttcctttcttaaggtctaaacactacaaaaaaataggtcaatgtcggcaggcccggccccccgttattgatttatctcggcggg

SEQ ID NO: 24245 - DNA, 2232 bp, Cannabis sativa
  modified_base (1231)..(1242): a, c, t, g, unknown or other
tggcaggtgattccacacagtccgattaaccagagtcccttcgttgccgagggaaaatgaaaactccgatcaagccctagcagagagctcacaaataaggggagtctttcatttagtttattttttccttgatgtaaatgaaagtcaccaatttctgttattacaaagttcagtaaataaataaataagaataaatactacaacaaattttcattctctttaaaacaaacatatcactaatgtattcaaatgtcattccgaacgacttttccactatttaagtaaaaaaaaaaaaactactcaattatcaaaaaagtaaaaaaactacttcatttaaaactaaggggaagaaatatcattttaatataaatatatatatattaaaatttatttcattatagattctcattctcaatgtattcttatttatttctattcctcccaacaatataatcttagttacaattaaatctatattggttacttatattgtattgatgatgaagatttataatatcaataattaatggctaaaagtataagagttaattatcttgtaaacttaatttgctattgacaataacaactctatttaacaatcatatcatgaagacacatttttggacaaatatataatatcttctttactttgtgattgaagtcgatttggcatgaaaaacataaagttgattcatttgccaatgagattaacttttcatgaactgttgcaagtaccataattttgaagtgaatatagagaaataacactttacactttttcttttcaaagcttttaaaaaaataatattatatattttataagattttatactatgtgtgtgaagaaaaatatgttttttttttttcaacagttgttttacgggaaaaataaaaaacctaaagaatatagaaaaaagaaatagtgtagagtaactagttaccctaacagttatcactgatcaactacaaaaaaataactacctttagttaccattttttagtcgcaatataattttttttgtgactaaatatgacttttaatcacaacaaaaagtcacttgtgactgaaatatagtatgtagatacacgttgtcactaatttaattttagtcacaataaatattgtaactaaaaacacatttagtcacaattaattataatttttgtgactaatacctttagttacggatctttatttagtcaataaaagaataataatttataattagtnnnnnnnnnnnnacttttagtcacaaattttattattaccaaaagtaaaatttttacagtaaccatttacattatactattttttccatacattttatttttcccataatatattttttaaaaaacatatgtaaaaatgaaaattccccacttttaaaagagattaatttgcttttgcattaaaaaaaaaaaaaaaaaaaagctaagagagatagaattgatcttgttaaaacttaaaagagaaactataatgagtttatctttgggcttcggtttattgggttttaataaaaagcccattgtactataaattcatatatgctaaatgtacatatatgttccataacacatttttttaccaatctatcttaaatacaaaaacaataaaaaaaattacaaaagtaccatctacagaatttttaacattttataatctacataaaatgtgatctttttatgttgtattattgttattttattgttaactttttattatttgtatattattttttatgttgatttgttgttattttgatatttttgtgttaccttcgtgtgtttttcttatatttttatagaataccataaaaatatatatgtaaaaatgtaaaaattttacaaaaatttaatattttatataattatcccatatattttcctttcattattttcttttttattattatacatataatattggtatgtttttctttaataaaaaaaaaggtaagccttattttggtgtcctaatggcactacaaaaaacaattagttttagtgttaactttttagtcacaacataatttttttttttgtgactaaatgtctacataattttttttgtgactaaatgtgacattcagtcacaacaaaatgttacttgtgactaaaacataacatttatttacaggttgacactaatttagttttagttacaacaagtattgtgactaaaaacacatttagtcacaataaattgtaatttttgtgactaatacattt

SEQ ID NO: 24246 - DNA, 3919 bp, Cannabis sativa
gcaaaaagggactagtacgaaagtacctaggcttaggggaaggaaaaaccaccccagtgattctgtaaaccatgatggtgggactggggaacaatattcctgatgatagttggtccataataaatctctaaaggcatcttgatgccgagtattaaaaggctaagaggaaaaaggagaggccacggggtatgacctcaaaaataatttaaatgacaaggtccatggatgagatctcccagacagtgacaccaagaggctagaggagcaaatcgctgctttgacaaagttggtccagaagcaaagtggggccctcactgaatctaaagatgaggacccagaaccttgcatcaggacgatcacgaaatctccgctcctgaagaaattcaagaagcctaagattgaattgtatgatgggcgaatagatcaaaagacccacttggccaagtacaacaatatgatgcaagtggcaagagtaagtgaatatgataagtgcttgtgcttctccctgaccctcaccaagtttgccaaaacttggtggaaaaggttatctcctagattaattcattcctggaagaaattgatggcaagaggaattgcttgagggtaaatgttatctgtatttctaaacagttgacacatggcgtaaaaggaagagataatctcatgatctcgctaattaaaaccccttcgctaaaccaagtcacggagaagcttcactgacatgagaaaaggtcaagactgaaaagatatgcagagatccaccttgccttacctcagcttcttggaggaagaaaactcgttaccactccaggacccagagttgtccaagataaaaggttgcccaagtgatacccaaatgggtactcaaacggcctatcacggacgctaaccacccaaaaggatcgcaaacgtctaccttggagacaaacccagatcgcctagcgatggttatgcttttttagacacatgatcagatcttatattctgtgtccaaatattgtagtgcgcactcctcatacacctttttgccagacagttattccaaacatttacttttcaaggttaaatcttttggtgacatgcgtccattacgtacagtggtccccttttttccagttgctgcaatgcacgagcactaatccttctaaggggcccaatagttagctctttttgcatgtattttaccccattagttggctttttacagaaaccctaggtggatcatgggcatgtccatatccgccttagagcctataaatatcctattatttccatacgaatcacaacctagatagtcgaagctctgctaatattattctaagctttccttttcttcaagagaaacatagaatacagagttaggatttcctacaaaacactataaaaatatcatatatgccttctaaggctaatagaatgactcctggactaaagttaattaacaccttaatcacgtaaatattttcatttcatttattactacatttttttattatttcttaagctcttaaatatttagtttttgaaaatctttgtaaacaactagctatttttctaagcaagatattagaaattcatatataattaccaccttatatttaaaatatagtataattattaaactgtctaattactattctaataattaattacttggtaattatataattaccgagttacagttatatttagggatgctttttattcactcaaattctatatattatattttactatgtagatagtaataggtgtacctcacacccctatatggcattatgcatacaaatattgtaaaatactttctataaaataaaataacctaagaaaataggaaaaggtggaccatgagagtgcaggttacaaaaaaatcaaaatagcattgttttgactaaatatccgttatcattcataaaaaaaaatcagtcaagactcaagaatttatattttttgggaaccctttacccctattcataattgattcctcctcaacccccaaaccccattttttctctcttgctccctcttctatttatcctcctcttttacccttaggtgtcaatcctataaggtttttttgacatgtgtttattattgtttatgaagtgtcattacattaacatgtgtttattactatttatgaagtgtcatttgacaagtttccttaattaactatgagtcatcttgttagagatatgtgagtcatcccgatcaagatatgtgagtcattccatccgagatatgtgagtcatctcgtcctactgaccgagatatgagagtcatcccgaccaaccgaccaagatatgattgtcatcccaattaaccgaccgagatatgagagtcatcccatctgactgacctagatatgagagtcatctcgtccaagatatgtgactcatcccgttcgatcaatcgagttacgaaagtcatcccgactgaccgatcgagatatgtgaattatctcgtctgattgatcgagatctgtgagtcatcttgattaactcaccaagatataagagtcatctcttctaaccaaccaagacatgagagtcatcccatctgaccgaccaagatatgcgtgtcatcccgtccgattgatcagttatgagagtcatcctgactgatcgaccaagatatgagaatcatcccaaccgagatatgttaattattccgtctgaccgattgagatatgtgagtcatcttgactaactgaccgagatatgaaagttaccctgtctaaccaaatgaggtatgagaatcatcccgactgactgatcgagatatgagagtcatcccaaccgaccgatcgagatatgaggccatcccgaccgaccgaccaagattatgaggccatcccgaccgaccgaccaagatatgagagtcatcccgacctactaaccgagttatgcgagtcatcctgatcgatcgactgagatataagagtcatcccgactgatcgagtgagatatgagagtcatcccgactgaccgactaagatatgtgagtcgagctgattgaaataggctatatctcaaaatgaccgtgataggtcatatctaagactagtccgagataagatagattttagactgattcaagataagaagagtccaggactgaatcgagatagacaccttccgatccgagataatatcctccttgacatgatttgagatgagaattattttagatcgatcataattagacattattttgactcatccaatgcagttaaccacttatttatattcttgtatcttaactcttgatcttgatcttcttaaacttttttattatatttttctaatctttcatgggctttacctgtatttgtttattagacattttctatatttttaatatggacctttcattggcccattgaaatttccccatggagtgtgggttataaaaaaaaaagaaaaaaaaaaagaaagaataatagaatatggaataaagaaagtggtgagtgtaaaccatgaacaatgattggagataagagtggtcatctgatccaatttaatatttttttttgtcattcgatccaatccaattaataattagatttgaaaaattatcacttgatctaatctgattagaccttaaaatctaatccaatctaattaattattaattgaattggatcgatttttattaagatatctaagtacacacctaattttttttatattaacttaaaaatatgaagaaagaaaaaatacgtaaaaaataaatatcacattttatttaagtttaatacttcataaaaatatcattgttacaaatgtaatgcaactaaaactttgaaataagaaaacaataatattatcaaataataaaatagaagggattattttacaaatacacaaaaataataaaaaagttacaaaaatagagttgtacggaattttaaatattt

SEQ ID NO: 24247 - DNA, 3343 bp, Cannabis sativa
  modified_base (32)..(35): a, c, t, g, unknown or other
aaatagaatcctaaactgattttttgtcaaannnnaacttaataataatccaatctagaaatgttatgataaaactgactatattttctgtatctttccgtgttaaaaattgtcttcaagttggttatatttaaaaaaaaaaatgtcgaaaactgagctcatgtaactatttttatcattttggaaaatataggatctattttgtcattaacaaaagataaagttaaatcgataacttttataaaataaagggttcaaaatagtatttatcttattaataataataataatgattttgagtattgtttccatgaaattgcatgcctaagccattttttgtttttttgaaccgtgacaatacatatctgatttaagtatatacatatcatttctataataaataaataattattttgttttcttgttttccaacctacagacaaaatatatatataaatttatataataattctaataagtttatatgaaattagcatttctttttctggtgtaatattattttattttaattttttgtgaaccgtgattataaagattggaatcttattgttgttgcttgcttttttcccattattattactcaaattgtgctgcaaattgcaattcaatgaatcatttttttatatatttttttcttaattaaatgccaaattggcttcctagatagcttatatgctaatttgttctcactgatttcataactgtgaatatttcagaaatcaatatgcaagttgggttaattttagatccaatgacaaaaaatctcttctatagtacaaaacaaacctcttatttataatttctttactctttttgttatattggtattagttattgtttcagcctaaaatttcttgtgagagagaagttcatagacttggttaggctcattaaaattattatagtaacaagatggtgttaaaagaatagataaataaattgttaataaaaagaagggtgtgtacttagcatccaaaaaaatacatgtctttttaataatatctatacgatactttatgtaacgcccgaatttaaaaacttgctaattcaaaattaatcatattatattataagtatataattttatagatcagaatctcgagttttaaaatacagttaaaactacatttactacatataaagtttcataatattttttttacaaacgacaggacaattataaaatataattcaaaatattgaaagaccgaaaccttctaggctgcactgccgcaatatgtacaattcttacgaagctctaactcactgctcctctagcttagctttacttttacctacacaaggtagcaaattgatgagtcgacagactcaataagatatggataaagatatatataggtatcacaaaccggctttatgcttaagccgtcctgagccctattaccaagctcgccaagtggttaagaacgttctcaacggaagtacgactactgtaccatatgcactaaagtaccgacttcgtactcatgttggtaaggctaatattgcactttgaggagttattgaatgttgtaccacatgcacgacgtaccccctggtactcgtgttggtaacactgtaactaccctaaaatcctacactgtactaacacccttaaaactatcacacctcaatattagtactgtgtataattagaacaagcattcaatcatatgtatatactttatgccatcttacctcgttttcgtattcaggtgtgtcggtcagcctgagtggaactatagctcgacgctttacaggatcctaaaccatagtattcgaaaattcgatgagaaacacgctaaaacacttatcggggacttaaaatcaaaactaagaataactctatcgatgaattggatggtaaccttaaagatcacaaaaacaagataaatttgggttccaaaaatgaccccaaccggcagactggctcccaaccggcagtccggttccctggggaccaaccgatccgaactagatggtcgttggacttagcttatattttctcctctgtaggggcactacccataggtaagccggtaataagtccaaactctatccgtctaaatctcatgtcattcttccctacatgaaatcaaaccccatctttcttttcagtatctactttcatttttcgtaagagaaagctgtggacaaaagcgccagagaaagtcaactctccagcttcccagaagtgtctgaaagggctagccttaactgtatcaatcaaatcaagctgagtaaacttggccttgatatatctaaacctatttgtaccccgataggtaagacgtcctgtgaaatgctagaaaactagaagtttaagttcaggagccatctacaaaattgtaagaaattttgctaaaaatcaataaaatgaagaatatcgtaatatatatatcgcaatatgtagctaattatcgtgaaacagaatcccaggtactgctcagtgatatttcacgataagttcgcgacatatatcgtgatacgtcgcaaaatacatcgctaaacaactaacatgtcgagaaaacatcgcccatagaaacaaccaacaacattttaaaatgaaatcgcaaaacgccgcgaacaatgtcttgatatgtcgcaaataaaaaccagaactcaaacgggcgtcaatgaaattcaaacgaaatcataaaaattgaacataaatcaaataaatttctttacaatgaagcataaacaacaaaaaaaacccacttaaaataaaaaaaaaaaatagacaaatacttttttttacgatttcggatgtgggtttggtttggagtttcacgatttggatttgagtttggggtttaatgatatcgtcttcgtctggtggggtttcacgatattgtcttcgtctggtggggttttgcgatttctctttcgtctggtctgggcttcgtgtttcgtcggaggtggtggttttgttgggctcgctgggttttgttgatgggttcggtggggtttcgttgatgggtccggtgggatttcattgggagtgggtttggggagttagagaaagagagagaaacgagagagttagagggagagtgggagtttgaaatggggaaagtattgttgggattaaagatttttagaatgttaaatttttacattattttaagatacatataaaaaatactttatgttttttttaaacatataatgtcaaattttcctatttttattgctataagaataatattgatgtcttatagtaatagcaatgttatatatatataaattaatattaatattaatattatagaagctagtccaataaacactaaggaggcgtttggttgagaggaatgaa

SEQ ID NO: 24248 - DNA, 1423 bp, Cannabis sativa
aataataataataatgccctaattggtggtgatcaacaagggtttggttggggtggtaatattaataatgccactactccatcaaggtcacaattttagtatatgttgtatgtatatatattatgtatatatttatatagtattgtattactatatatgtatatatattattatatatatatatgtacttatttatttttatatattttgagtttggaggatatgatgagagaaggatatataaatggaagttaggtcatcaatatcatcatcaagatcaagaattaatcatcatcagtaagtaaattaattaacagtttttatgtacaaaaaaactttaatttatttatgagatttatatatatattatcaaatatttattatttctttcttctttttattcttcaaaagttaggccttcaacaatttgttaattaattaatgaattttacattaattattagtaattaagtgtgcttctgttgaaattatatataactctttaaatttggggcttgttgtgtttgatttatgtttgttaatttccattttcattttcttccacattgttattattttatattttaaaagaatttggtatgtatatcttggagaatgtagtatatatatataaatatatattggggtgcatgtggggatataggaaaaccctaattcccaaaagctggaaaagatatcgatgaagagtagtctaattaagcttcgaaacttgaaaatatgtaatggaagaaaaagctgtcatgtttggaattttgtgttttctctctcggaagtaaggaacatttttaggttttctcacctcacaaaatggtaaaagatgatgcaccccatattattattaactatgagttttactctttctcctaatgtacgtagtattttatgatactcttgataaatttgtttgaatagctattaacaaatatagttggtggcctggttatccaaattgtattaaaaaatgaatttttggcctaagtgatcatattgattagtgaattctgggctctctgcgccttagatgctttttgttttgacgaaattactacgtatctcttttaatttacgtattttttttaatttgatgcttttaatttttatctttttttaaaaaaaattatcgtgtttattttttttttcaatcattctactaattttactcttattacttcacgatattttttattctactctaattgaaattttgcccaaactttcccataaacctaaacatccatctacaacaaaacaaaaatctattatgtttgaaattatgccttagttatgtgagtgtgtaagaataatttaagtatacaatatacttctaaaaagaggtatatttaaattaaattttatttgaaggtaaatatggttaatgtatataaaaaataggtattcttta

SEQ ID NO: 24249 - DNA, 1409 bp, Cannabis sativa
taggtgatgcttctgcctttggtaagtttcttctctcatggtcccaaatagctcaaaataagcccatgtcatgcacaccaaaccacaagaggaacctctttgcacgtaaccctccaacttatcacccttctttagaccaaaagtttgtcaagtgtaccatggaagaaattacaaacataccaactccaaaagttttgctaaagagactctattatatccacgtgtcgagcattgattggctgcaaagtctcgcaagcaaaggcagtaagaagcagtacacgaaaatagaggcattctcggcctacgtgtggaaaattatggtcaaaactattgacaaaagccatgttatgtgcaagatgggttggttggttgatggacgtgaaagaatgtgtgttggtggaaagaataattcaatgtcaaattacatagggaatgtgctttcagtgggttttggagaagcaagagttgatgagttgaggcatggttccatacaaaccatttctggaaaggtccacgaggccatttcgaaagtgactaacgaggcccatttcagggacttgattgattggatcgagagtcataggcctgggctgatgttatcaagagatgtattgggccagggaggccctgctatagttttatcttcaggaagaaggttcccggttgctgaattggactttgggtttggtagtccagttctgggaacagtgtgttccacagttgagaagattggagttgcttatatgaaccaaaggcccagtgccactggagatggctcgtggactgtgtctgccatcctatggccggaatttgcctctgtcttggagtcggatccaatatttcaaccaatgactagtcttcttcttcacttgttctaaagatatatgtattaatttgtaatatggtatttacccaataaatacctactgtttcgagtttatatattattttttttctttcaacggcataaatactgtttatacctgatgtattaatttgtaatattactatttttgttgtatgttaatattaggagttttttaaatctcaaaaaaaaaaaatatgagattttttttaatcaaagttgtcatgtcattaagtcgttgggctccttgctagtgtgcaaagcatgggatcatttttaattcatttttattttttttgttttgtctttctcacgatcttaaatgtcgacgacgtcgtgcttgaacagagacaaagatgatgacgacttaacaacccttgttccgcgatgacgatcacttgaatgacttagaccatgtttggtattattttttgttttttgttttcaaaattttttttatagaaatgagaacaaaaaatagtttttgaagtttttaaaaataagtcatgtttggttagtgttttttaaatacaatattgaccaa

SEQ ID NO: 24250 - DNA, 3015 bp, Cannabis sativa
ttgttgccgttgctcagttactggattcttaaacaaaaaccactaaaacttatataaaactaatatttacatggctcgccacgtaactctcatctagtatatatatatgcataattctgaattatttaaaagaaatatactgatgcattttttatttgttttagtatttgagataattttttagtttaattttttcttaatcatctacgttgttgttatattaaagacatcttgcataattttgagagatttaaaaaaaattaacacactgaaaataaagtttaaatagtctgtttatacgggagatttttttattttatacacgtgttaaatatgttgtttgaactttatttttaacattttaaattttttcgaatttctcaaaattcgcaagatattctaaataactataacgtaaacgactataaaaataaactaaattaaaaaattctgtcagatgtcgaaacagataagagatgtttatgtaaattttttctatatttatttattgatcacggggagggaataagcttagctatacatactaaagagattgggctttgaaactgtatgtagtagtggtactgatacaattgtctttttatgaataagaataagaaaaagacaattatagataaaaattgagatgtgaagtgtatggttgataaattctatgaattagtttctttgtgtttgttgggttatatttacaaagggaacatgaaaattggtaatttgcatgtgaatgcacatgtgagatggtttcttagctcttctatcactttcactgctaccttttcttcacatgtgttcacagaaacttaacagaaaaacagtttaataataagttatgtttttcagttcatgacaagattcttgcttttacggtttcggggttaaactacccttttcgattggcaggacgtacctactcttgttttgaataaaaatcttctgtttctaaattatacgtctcctctcagtctcgtcacttaaaatataattggtgagacgagaagagacatgtaatttgaaggcaatagctaatttgtcgaatttcaagtagcaatagggtcggttttgagattggatcgaccttagaaaaaagaaaatttactgagccctttattaaaataatatatcttttttttcaaggaaataaatttttctttgagcctctgggttgggtgggctcttggtacagacttaatttgttttaacatagatccgatcctatagagagacaaacaaaaaatgtaatttgtaaataactaatttgtcaaactttaagtagtagaacaaagaggatacttgtaatttaaagacataatcaatatatagctacatcccctcttcttacttaacattgctaattttgtcttcatataatttattttgtaggtgtacataaggacaaagagtagagagtactactattgagttaaaaagcataagagtctcaaaaaggtgataaaatataccatttccatgcatagttaggacaaagtagattacattaaaatcttgagtcacacataataataactttgtgaatgttatatatagagacctcatctcataacatagacacccatccaaaaagcacttttttttattgctctctttttttttcctcttatcttttcaagttttaagtcctaagtacaagaaaattatggcaagagaactaatctcttttcttctacttcttttggttgcaaattataatactcatgtaagctctatagctaacacaacctcaataaaatacacaatattattctcacacttgtttttgactccatgaataaaaattattgttgatttttctttgcaggctactaaaatttctgaggctccatcaccacagcctcaattgaacactacaactggaaaaccttacatggtaagagttgagttttataccattttaatatgtgactaattggtatatataacattacttttattttagtaatgtcattgttttgtgacactaaagtttcttttacttaaaaattcagcatggaatcacagaaggaagccttaaacctgaaggtatgtaattgttaatttacacatataactaatataagagtaattgatatgtgcatttaaaatatggtcaagtttagtttagttcttttggtataatataatgtttatgtataacaaaattactctttgttacatggaagagtatgggtaggtagggttggccttaagtataggtgggctaagctcatgcttaggggcccaaaataaaaataaaaagtcttattagacttttatttaagtaaaattatacatactgtaaacaacaaatgttcataatttagttaattgagttgtattttaatcttatgacactttttattttttttaatatttgtcccaaaatttaaatggcctttagggctatatatgttaagggtcggtcctgagtataggagcttaataataaattattagtagtgtttagtttagtataaatatgtaaagtcatttcacaaatgaaaaggaatgaaatgaacgaaaattggaagttatatatcctattggagtttggcactaactcaaagagtgtgtctcgatactcttaatgaaagtaatgatacaagtattgaaacacactcttctagtcagtgttaaactctaataggataactcaatcctaatgtgttgtgatcatgtgactgtatgtaatgttttgatgtatattttaatgaaaacgaaataattgtgttaaatttttgcagagtgtccacctcggtgtacggcgcgatgttcgaacacgcagtacaagaagccatgcatgttcttctgcaaaaagtgttgtgcaacatgtctgtgtgtgcctcctgggacttatggaaacaagcaagtatgcccttgttacaataattggaagaccaagagaggaggccccaagtgcccttaattaattaattcaaattaactaaaaaaacccttcttcttaattatattacactttctatttttagatgtatatgt

SEQ ID NO: 24251 - DNA, 4423 bp, Cannabis sativa
agggcataaaatcccaacaatatatatatgttaatttaagattgttacaggagcagctgctttcatcaaatcagttcgaccgaaatggaaatcttctatgatcagatcagcactcatgatataacaggtgaaaaaagtgacacaaaatcttcacttaaagctggaactatcttattcaagaacaaaatttaatttatttttctatgttttgatgcagcaagtgaatacaacaacatgggaaaaccattgggaaacaactcaaactccatagtgagtccacatgaaacaggtgtaggagaaatcaacccaatgaaagctcttaaccaagggctagtgtttgaaataacagtgaagactatctgcaacccaagaagaaacaatgagcagaaaaaaaaaaaaaaaaagttttaccctaattcatgcattattatatctgtggggtccatagcattgaataaaatgaaataatgaattaataaaaaagtaattataaaaaattggttagatgatacactatataatggacacgtgggagacaaataacatttttcaattaaatagcaaatgtcaaaaaatagagttgaataaaaaaatattttaatcaatcctagtttaaatatgttgcatttaagacaacggtattacaatgcacttacccaattaaaataaactattaaatgtcctacaaataaggtatttagaaaattccttacagtagaagagtcttatacatatttacaattattttatacttgtaagtagttaacattcatatcaatactttagtagttataaatgacttatttttcttgagtcgttagacattcaacaattacaccaaaaaaagataagatatagtagcttaattagtattatttgtaatgtaatcttatattaaaacttaaaactgaaaaaatgaataaacaaaattagcaaacggacaaagaaaaaaaaagaactataaaatcaaaagtcatgtcgtaatagtattttttggtgtttagaaacatccaaatatatataaaattaaatattataaaccaaatgtcatattataacagtgcttttttggtgcttaaaaacacctaaatatttattctcgttagtttgtcacttttataatttttgaacatttgtattcttgaataaatatttattgcacattttgaataacataatatattataagcataattaactctttttcctttttgtaaataatagaatgtaattataatctgcgcactatatctaaacataacttcatctttacagtcttttagattctcttttatataactattacaacataatgatttatagtttttaaaatgagtaattaacaccgaaacttttttatgttttaacttttatatacttaatttctttattttttttttttttttgtcaaaactcctgtgtacacttgtatatatgtgacagtaaaacttcaaattcaatacaatggtaatttaattgatatttaatggtaatatctaactgatgcctcaaatttacaaagaaaaataaaacataaagaattttgctaaaaaaaaaagaattaagtgtataaaatcaaaacgtaataaatgttgcctccaataatccttttaagaataatgtaaaaagaaaatgtatagaaatatatacataaagttgttatttttttatctttattttgatctataataatatgtgatcttttacaacataacattgatatatgacttttacatacaaattttgattcataatataataagattgtgttaattagttttcatatgctattacattaggctttaatgcaaatgatataatagagaatcttgatattgaccaacactgcaatttgattcaccgaatattattgtagggatacgattttgtcccgtgatgtactttcacgaaatgtattccgtggtacattagatgagtctcagggtacattagatgagtgtcagggtacgaaactattttttaacgctaattatccctagatcaatttcagccctcagattaacggttgccgtacatcacggaaatttccgtgaaaagtacaaggacaaaatcgtgtccctactattataatatataatcgatcaaactaccatgatattcgtttagtgcttgtaatcattgtacggtgataattaattaacttagtttatatgaatgactcacttatgatgaagctttatcatttctaataacattataacaatctgtatagcaacaatcatgttattcattttatgatcataaattttattttgatatatctgaatatatgttatttgatttaattacaaagtaattgatagtaaaactttttcatatagtagattaactccatcgcaagtcaatattaaatcttatttgtccttcgtatcacagatgtaaggagcatttttaacgtctttccagagttaaattcacactcatataaaactataaagtcaaaaaaaaaaattatgaacattttaattttgggtaatattttcatacaaatttaaactagctactctcttatcttaaacttatattcctaatatgactctaactatgacccaaaaaattgttatagatttagtaacagacgacccacatagattcagtatataggacatgatgagtataagacgctaaaaattctaggatgccccatacttgttttgatatcactgttaaatgaagtctaccaaaagtcagtttattttaaaaaaaattcaagaaaataatatcttttttttttttaaaaaaaaaataataataagaggtaatacccatgtgtatgcatgcaagagttggacgttgttgaagtttagtaggcataccaatatgagaaactacattaataagaaacaaaacttcatccatatgtaataaacaacaaataaaaaaattacatgattcaaattaaaataaaaaatggaattaaaaagaggttagaatttagataattatcaacttcaactaccaaataatttaataagaagattaccattggagcaactttagcagaaccactaacaatgtcattgtttggcgtcaacaattttattcttatttaagttgctaaaaccatcttaagtctttttatattctatatatttcaaggcatatataaatatatatatatatatatatatctttacttatatattgataaccttaatagtagtgaaagatctatgttcatttgaagccttgtaaaaatatttttttcaaaaaaaaaagtacaataaagagaaggtaagaacaattgaaagatttatatatgttgaaaaataccttcaatctaacctctggaataataaaaatgaatcttgaccataccaaaatgagtgaataagatttggaattaggtttagacatggattagagatgaaaactgaatgatgaaaagagagaagataattacgtggagagagggtgagcaaaaataaataaataagagttgggtttaaggtttagatatgggttagatattataaatggaaaactgaagaagatgaagaggaaaaatgagaaaatgagagaatattaagggaagatatggatatgtgctgttaggtttaaattaaataaagtttttttaataaaggaaaaattaaatgggagaggagaagagacacataatatctttatatattaaaagtgtctatctaacgatatttcttggtttaacagaatctactttaaaagaatattctgttaaatttaacgatgttaataggtttgactcccgttaacaaataaacccaataattaaacccaaaaaattaaaaaatctttttttaaattaaaaaaaaatcatcttagccacatatctctctaacaaactgtatatccccaaattttaatatttttttgttatttttttaaatttacacgatttttttttatgaattgttattatacgattaggctttaggattacaacttattctattggatacattacaagcggtgctcctttctccattaagcgattaggcaccgaaaccttcgtcaccgtcagtgttggcaagacttttcagatttacaatgtaatttcattctctactttttcattttctacatttaatttacttctcaatattacctactgattaatttttcttcttcttaattttcagtgcgcaaagctcgctttggtgcttgttggtaagttagtttggttttgtataaaatgatttttttttgggttaaaaatcatattttgatgtaaaccgagattttaattttttctcatttgataatgaaaagtcagtaatttttcaatggtattatgttagtttaagaagttgtgttagtaatttcaattggtaattttcttctacaaagtgtttgagattattttgaaatgcaacatattcatgtaaacggatttctatttaggtccacaactgccaaagaa

SEQ ID NO: 24252 - DNA, 1722 bp, Cannabis sativa
ataaactactaatttgcaacctcagtcgtaaagaagttccaagtcaagactctatccccctaagactcaacgtacagttttttcaaactacaattccaccataaaaattcaaaaataaaacaccgtaatgaaattaatagccataaatcaactaaccatataaaattcccagcacgagagcacaaacaatggcggttgtcaccacccatatcaacgcacttttaatcctctttccaacagtcctgatcacaaacaccaccatcagcatttgaaaccataaacacacacattacattttccctattctacaaaatttattatgtacatatatgtatatatgtgtgtacaaacaaaaaagcacctacttgtcctggtccccttcatagtagaacattgcaaagggaatcacgaagaacacaagaaccgcatcgagaatataaatagcaagccacagatctttcatcggcaaggtaagattacaggcaccattgtatatcgcgtgacgacaagcctgccgattcgccacgtccgccggtaacatcagtatagaaatggcggcaacggagagccccaaaacgacgacgaatttgggaaaatacgcctggttagcgtcatcggggtgctgataattaacaagaaggtaaacattgaaaaggaacacaataacgcacacaacaatggcgacgattacgagcgcgagattgaaatcgcccatcctgagctctctctccctcgattcgaatcagctcgaatcgaaaacacctaacctagatcaacaatcctagggtctccttcgtccttcacccaacttcaaattagggtttctcggatctgtaaatggcgaggagagatcgatttgaggagaagaagaggaaaagagagaaattgaagctttggacaaaggcttttttccggtgaggtgggtttgttttgacgtgtggggtgaaattacggtagtacccttggtcaaatggttattttgcgaagagaatttagtaatggaaagagagaaagtggtttaggggtgtaaatgtaaattcagaacaaaaagttcgaacaggctgttgagagctgagacaatggtttgttttcaaacgcgctggaggagagaggagacctttgggaacggctctcgctcgtaagctccgcggcgttttttctttttttctctttaaatttttttgaaattgttttttattattatttttttttggtttttaattgtcttttttttttgatgaattaattgtctttttttagtttattacatttttgtaagaaaaatattttttttttgaacaatgagtaagaaaaatatgatagcttagtaaagaaaaaaataaaaacatttttacttatcagaaaaaccaaaataaaaacattttttatttaaaaaataagattttttttcataaatatatatttttaatattttttttttacaattttatgattttcttttaactccaactaaatatattagcatatttagtcaaactgatagcgggctttgtttggtttttttttaagaaaaaaaacgtttatagattgaatataattagacctcacggtcaataaagtaatatttactactattactagtatagaagtagtctcatggtatcatgagtgatgcatacactatgggcccgtttggtacgcaggactggattggattagacaggctaatttgtccaatccagtgtttgggcatgttagaag

SEQ ID NO: 24253 - DNA, 2565 bp, Cannabis sativa
  modified_base (512)..(523): a, c, t, g, unknown or other
atctataaaatatgtaattctcaacaaaaaaaaaatagtaatatttataaagggtatttcagaattacttaaaaataacagaaaaatttacatttttacagaatatttcttttaaaaattttcaggatttttttttcctacaaactattatttttacattattttgaaaaaatgtttttacattgcgaaaatataatataatgttgcggtaacatgaaaataatactattttcttcttaaaaaaatatgagtaaaaaaataataaaaaaaattctaaaacaaaaaaaaaaagtatgattttaaatattttatgtaaattttctatattaaaatctgcaataactaattgtatatatatattttgtaacggttgaaaatcgcttggttgcttaattgtataaattgattgaaacctgcatattatcataaacaaaaataaaatttatatatatatgaaacattttttaatgggtattacttatcgatggatactaaataaatttaactataannnnnnnnnnnnaaaatattaaactattagattttagtttgataacgaataataaaagagaaatttgaatttttatacttaatatagttacttaattaaagaaaatatcaaaaaatatttctttttatactatatcaaaaatatatttgtatgaactcttaaaaaaaaatatatttgtatgaaaaatatttaaatcaaattcaattttttttaattagtttttttagctgataggataattccagcccatataaaaatgagaaaggtttctaattaaatataaaagttaattataaaaagtaaaaattttctaatattactcatacctctatgtatatatatataaaagacattagtaataatggaaatttagaatttgcaagcattagtaatacttaaaattttccgtacggacagatgatgctattagtacttttttattttaattgggaatattgatcgagatattctagaggagcattgctatcagtggtgtctaccaccttctcgacatgtcgcattgcaattggctaacgatattccttaaaagctattatattaaattatatgggatccaatacttagttaaaccaatagcgatattgacacatgggagggtgataggcaccactggtgccctttaacatttctcattctggagctatatatttatagataaatactaaatggcaccagtggtgcctcgcaccctcctatgtattaatatcgctattggttgggtctcatatttaatataatagcttttagggagtatcgctagccaatcgcaacacgacatatcgagaaaatgctaggcaccgctagtacctaattacaatgctcatatctataatattaaatatataaaaaaatgaagaatatttaaaataacaactttactaaaatagctttggaaatggtagcttgctagcatgcatgaatttcgcaatgccagcatcctcacacttgtaattttaaatttatttcgatcaaagccatgtattatatgcgaattgttgagtactataccacttcttttacggctcatttggtacgttctatgagaatcatattgtattaaataataaataatactatattaagataaagcagtgtattgtaataattattacgaccaaaatttttaatacaatgtatgttgtattatttaatacacaacaaataatctgtattagtttgtattataatatttacaaagatttgggatcaacaccaatctccgacctaaacccggactcaagacccagacccgaacctgaacccaaaactggcacccggaccgggaccgggacccagacccggacccgaacccgtaattagtgttgggtcgagtgtattgaaaatatattataactttacacaattaattaatacaagtcaataccaaatgttgtactgtattaaataatactaagaatacaatataatacaacacaatctaacacaatacaatacaatacgatataccaaacgagcccttaaggatttaatatcgggatgtgcatcattcgatcaaatctaataataatcgattgatctaattataattgattgtcaaatattgaatatataattatgatcggatcagactggatgttatttttcaataacctattagttcggatcagatgttgaatgagatgtctaaaaatccaatacatccaatatccaatcactactagaagaaaggattttggtaacccacattgattgactgtacaagaaatgtcacttttgccagaatatttttgtgctggcaaaagtttggtattgcactggtaaaatagaatttacttctgatgtgttggcaaaaggggttggcaaatctgttgggttttatgccctaaaaaaaactcatttcaatataatcagatttactaattaataaaatatcagaaattctttatgttgcatggcacatgatttatttcataatgatatttaatgtataaattctattaagtccagaacatatatataaatatgtatataattgttcatgattatagtgttgtcagcacaatagaatataa

SEQ ID NO: 24254 - DNA, 5182 bp, Cannabis sativa
aacatcccattccatagtgtcaaattgtaatttcttatattttttacggattctaaacatttaatatgagtgcccctaaagtcgtagacacatgaatacgggcgcatattgtaatcatgattcagcatgccaacatacaactaactaaaatccccaacatttcatttaaatataccattgcactgcatgtttaaactaaaaataatatcttccagctatatttgaaaacttcttcaagatctaatgtaatgaaaatgtaaagttctgaaaagtaacaacattatgcaattaccattttcggaatcaagattcgtattagtgtcttggctatacactttcttagaaacagcccagtcaactgctattggtcttttctgaaacgtctgcccattgaacttttgaattgcctgcaaagaaagagaaaaacaaatgttaacatatgtccgtattattcgactaagaatttgaaatttaagcttagctaaaaagccataccttttctgcctcacttttagaggtaaatttgacaaatgcaaaacccttagaaagcctgcaaaagattatgaaaataaaaagggagagaaagtacttataaaagaactaccaatagatctgaagaaaaaaatatgataattgattattggaatatacccagtgtcagaattttgtggaataaatacatcccagacaaaccctgctggtgagaacatattctttaactcttctgctttcacctgcataagcgtttagtaaaactaattaagagttcaagtttcacccaacaactaagtaatttggggtagcagtgctcagagcaaacctggaaaggaaggttcctaacaataagtttccatttctgagtcttggaaccctggccaataaacacaaacagtaagctattaagatcgatttgcagtgatgtaacaaaaagggagacgaacaacaaagtcaacgtaagctccaaaggacaaaaaaaatagagttgattctctacaaggcaaggaaaaaatttatgaatggaaaaacggaggaaaatgttttccaaccaactcgaaatactacgaacaattcaatatccttgaccttgaactctatttttgtcttgaaaaaaaaaaaaattatttttgagcctcaaacaatttctgtgaagcataaaagagctaaacaaaacttgatatgacagtcggtcagcgtgaaatgcacataataccataggagaaacaataagaataaaagaaataaatggcatactaacaaataaattttaaaaaacttcaaatgtgatgtaaattctataactcctaattaaaattcacttaaattttaatacatatgaaactttacctccccacccagctgacgtgcccaaagaacaccccctctaatctctttttggtgcaactttgcaacagcagcacgagctgatttgacacttgtataaagaactgctgaagcattcactttgcatccatcttgcataagacctgaaaatgtgtcacactttatgctctatagtccaaaaacaaaacaactatacccaacaatatgagcaagaattcaattggcatttcatatttcaagcaagaaagcatcaataacgttaaaggtagcctatattacaaatcaatataatccagatgctggtttcagtgagtttgggcatctttaaccgcaaggtcaatcatacaatacgatctaatcacaccacaaaatctcaaccacaatccctcaaatgtatcagaaaagaaatgaaaaaaaaacaactaaatggatgtaaaagtaattatattccagaagtgcatgatttctggcacaagcatctcaatttgatgattacaaaactaagcattacttgaataattggtcccaaattaaaattaaacggctgaagaaaaacaggcaaacatacatataaaaatagagttgaaaaaatcacttaccatgcttctcaagctcttcttgtggaagcgggaatgctacagaacataccgtaccaaactttctagctttgctgtggacattcgctgcaatcttggcattaggaagaccacctaatataacagtcctagcaacccttcacattgacaaaaatacagtaagtcagaaatccttgtcatgttcaactaaactcaacaaataagagcatgcaaacaagaaggcaagaataaagaggcaaagacaatagcttagtgaaataagacacataataaccaaattgggagtcagaatgaagtgcgagaatctcatactgcagggacagatgaaaggaaactaagcatcaaattaaagtctgtactcaaacacctaaagcatgctgcccgccagaaaacaattcaaacttcaaagcagtagaattttgatcaggatccaagcatcatgcatgcctcttaatctagataatattttaacataataactgatgaactatgataagctacaataaaaaaaatatatacaaatatcttatacatatagcctaattatgatcaaattcatacatgtcacataatctacttggcgtagaatctgtctagattattgcgttatacttcagttttccaatcccataccaattttctttctatgggtacttcaagaaaggaaaacaagtttgtgtaattgagaaaacacaatagcacaaataatcgaaataaaataataatatgaggccctaaatgctaagactttttgtatccacagctttcctctgccataagtgaggttttcaatacatatcggggggaggccaagctaagacaaatggcctctttctcttttcaaaaaaataaaaaaaaaaaataaaacctttttatactttatataaaaagtgagccacctgtaaactctatgcagaggcaaacattttttactacctttgcttctctgaacagccagttttatcctccagatctttatgaagtgttgtagactttccaaccaccaattttttcactggaactttttcaatagcaacaactggaaatagcaaaagaaaatgagatcgcaaaaatataacagaatattacaggtgtaaagcatacataaagtctaacaacctttctcctccaagtttgaagtagctgcttcagactttccaaccaccaattttttctctggaactgttttatcagcaacaactggtaatagcaaaataaaatgagatcgcaaagatataacaaaacattacaagtgcaaggcatatataaggtctaacaacctttctcctccaattttgaagtatcttcttcagatttggaagcagtaacatctttgacatttacttcttctttatcatccgattttggagctatagaagagggaagaaacagaatgtgaaaaaactaagaatgaaataagccaacagcaacaaacaaagcgtatacatgacctttacgcaaagtagaagaaagaatagtatctcaaagttcaaactcaaaagaggcatttcaaccttgacttgtctttgatcgacgctgctcaagggaaggtcggtgcatagcatgtttaacggcaattttccgacctccaacagaagagccattcttcacctcaatagcacggttagcatcttcagtaacagcactgcaaacagaggcaaagtacccagaaagttaatactatgactatgacatgaaatgtaactctttatataatcattatacacatggtatatgactaatgtcatgttcgtaatgactatagtgttggattagataattttatcgtgggttttgttcataaaattaaagaacatattgaaataaaaacttaatacaaccacctaatggatagctcttaaaaatttgtaactttcaatccatcttcaataatgagttttctcttactttattgtttagtaactctccttttatgttctattccctaacattttttaatcttgtccaatgctctatcacatcctacccaccaaacatggttgaccagaataataatctaaaggtcctctcacaactgaacccaatccacacaacaagattaaacttgaaaactactctatcaaaccctagaatttctgtccagcattgaacctgtagtgtttgcaatgaaagcgatttaaataattgatacttatagcaactcgaaagcttgaacacacaactaactctaatggtttaacaatatttaaaaatcagtcatcaatataaacaattgtagttggtagtgtggaaagtgcagttttagttttttttttttactaggctatgcctatgaccatagagtgcagtttaattactatgttagtatgcatacttcaagttcaatgttgactgagcagacaagacttgaaggcagacattcaagcatgtctaatcactgtcttttcttgaaagaaataatattggtcatgtatgaaatggtcaataaataatatttgacatacgaacaaaattatttcaagaaaagacagtaacacatacacaacagaaaaaaaaaatctcatctccgcacagctattataactagataaagagcttcaagaatctctaaaaaatagagtcattacaacatgagtggaaatctagttataccaatttctagaaaaacatttactctgctcacttcagttaagttaacaacactattagtagtgatctaacattattctactcccatggaatcccattatcttgcaaacttcaatccaaaaaaaagaaatttaaataaactttaacttgatagaggaaaaacaatcacaatgagtaaacttacaaatgaacaaaaccaaagccccggtgctcagttgatcctatcaaaaagaaaaaacagagagagaaagattaacaacattccgcatgattgagcacaagtataacaactcttctatacataaaccaatagaggaaacacaacaaagatatagtacattggttaacaccacatttgttaagaatttggaataaaaatatacaatgaagattcattcaccataaacaccaccattaattttcaattcaattcaactcagagcagagttaagcttacccttttgtgtaaccatgaaacaccgccgaaccggaccaacatcgctgaaagtttcctccaactgattaaccaagtcaaaaaataatccaaattagccaaaatctagctccattaagcattcaatactgattaaagccataaaatacagctgtgaatccctaatttcgtatatacataa

SEQ ID NO: 24255 - DNA, 4203 bp, Cannabis sativa
acacactctcccatacccactatagtcacttaaactagccttaaatggttttttctctatatcatttaaataataatatttttaatatatatatatataacacataacaaaacaagaataaaatactatttatatattattaaaatattttcaaaagaataatattgcttctctatatatagaaaagtaccattgcatattttatatggctcttgttgattatagttataaattttgtcattcgggatggtagttattattttggaaagaagttaggggaaatttggtgtccatctagaaagctttgttcgaaaagttgtggccagtctcgatggtcctttcagatagcttgtcctccataaagaaagtcttgtcggatagcttattatgagctcggagacgtacttccagatagcttgttgtcttcaacgtccatctggagtactgtattcattcagatagtctcgtccgaattgactcttgaaagcgcgttactgaagctgacgtggaatatgttgctggaacaagggttgttcatcaaactgctctaactgcccgtaccgcaccgcattgcaaaaaaatgtaatttgaaattttttacggtgcgatcacagttagaatttttcttaaactgcatggtgtggtgcggttttgaattgttaatatgcgattcaaaccgtaccgcaccgcatattataaaaatatcaatttttatatttatttaggtccaatatgtgaaggcccagtccaaagcccactaattattgtaatgttgaaacttaaaaaaatcatatttattttcaagccttatggtatttttgataggtattgctcaagctttgttatatttgtgatagtttaattatttggtgatagtccaaatcgcagaaaccgcaccgcatcgtattattttttacggtgtagatttgacaattttttagtttcgcgatgtgggtgcggtttagaaaattggaaaactgcatgtgcatgttagtttgaaaaaaggtcagaacctgcaccacccgcaccgcgaacagccctaactggagctgactttgagactttaaagcatcattaattagctacaatagaatcgaagctaattttagcaactacacaaacctaaatatagttatcgcctttgtaatccatgtatatcagatcattgaaaggttgagtaaaaaatcatgattgtgtaaggttagagagaaagtccttactagagagagaaagttcgtcttgtaatctctataacagtatgagaggattcttgtagccttgtaaacagatatcaataaagatatggttgttgttgttccaactgagatgtagagcattgcacatggctcgaactcgttaaaccttggtgttatcttcactttgatttactgctttaattcgctatttggttattgtaattctttgatagtattgttcttaattacgtgtttgttgatccagtatacttgcatcgtaagtcattgattggttcacaacaaactggtatcagagcaaggttcataatcatggttgccgccaaatacgatatggaaaagtttaatagttcaaatgatttggattgtggagaatgaagatgaaggccatgttgtttcaccaatgattgtatgaggttctatttggagaaaattctcttcctaattgtatgtttgagaatgacaagaaaaagattcttgcaaaggctcacaatgcgatcatattgaatttttggagataaggttctaaggaagatctgttagttttatggtactaaatcaggtacgcagtaaaataaatttttttgattatcatcataccatatcccaaagatcaccatatgtacatacattaaatttgaaagtaaaatagatgaaaaaataatttacctctcgaagcctatcagggtatccttgagtattttcgtatgttgtatccttggaatggtgacgtcaaactcacaccttgatctttcaaatcttccaccgcacacaatgactagtgtgggctagtaggataaaatgtatatgaaattcttgttagattctcaacacatgagcaagaacaattctataatattcgagagaaaagttttaatcagattaatcatttttaggctttccaaaagttatgttaaaattcttctctctcttagaatttgatttatacggtatatattaaataaatccaataaaatttgtattgaatgaattatttaaattcaaaatatttattaaattatatttaattatttgaataaataatataactaaattatgttatagatatatatttcctataatcgattgagggaatctctcaaccacttgagggaatttctcaactaccttgagagaatatctcaaccatcacaaatatctataattacttttcaaattcaaatttaaataaatatttatcgtttaaattaattgttaggatttatgctctgaaaagcctataaagatatttcttgtttattaataagagttgaacattttgatatatacatgaatgttaaattattaataattaatacttattaatttatatatgaatataaaaaaaattattcatttatgaggttgtgacttgtaattgtgcggagaattaagattacttagccatgaataaaacagtcagcaacatatttattgacgctgaaaagtggcgaacactaggtcgctagattggcgagatgaataatgaatgtaaatatataatttagagagacaaaaaatttatagtagtacactccccatatcgcgatggtaatggagttacgtctactttgattttttatttctcacgagagtgtaattacagaaaaaagctaagtgtttaatctctggttttcggagagagatgctttgaccttgtgagtatttttttgaatatgaaaaatgagctgagagagctttctttttataggtgatgaatgcccacaaaataggaagaaaataaaaattagatgtttttgattgtagatgatgattcaacggtgaaaattagcttttgatggtggtagtcattttttggagcccgacgggactcgctgtaggcaacccggagcttatattcataactcccttaagggtaaaatttggtgtggatagcttcagaattgtgattgaagtgtgagacatgacttgatagaacattgaaatagcttcaaaatgcaagttgaatcgtgttaatcatatcaatattgagtttatggttgttttactgaaggcaattcatgactcagtgcccaggttgatatcgagcgtccaagttgacatctcagcgcctaagttgacaatgacgtcaacctaaacgttgggtaaatgtagaaacatccaagagatgtactttaagatgcatgttgactcagaatctggtcaactgtcagcgaaatcttatttatgattgacaatcaccacgtgcaactaagaaaaataaatagtaaagatgacattgataagagccttttaggctctaagattgttgttttctccatggttagaggatgttgtttcttggtaattgtagtatttttcatcgttttttggattatgcgggctttggaagaaaattgatttttatgagtaaaaattaatggatgtggtgtttttaagactaggtgatgttagcggataaaatgatgcgccaaaatgacatttttctagaattttgaaagtccacgaagactcgaaactcgtggggtgtcgctgctacgaaggttgaaggctcgccgtagcgagcaaaaagaaaataaaataataaaaagcgcctggcaggtcttgctcgccgcggccacacaatggcttgttgcggcgagccatcttgtggtcacatcgaggaggcatttactgggcatacaattgaatttgatctttctttaaaaaaggagatatctcttttttagtgatatattttcaagtattacaaataagacttctagggtacgaattttagtaccttttatctatgaaattgagagagaaattcaatgagagagcaaggaaaagacgaagattgtgacttcgagtgttctacatcctagttctttttcttctccttaaactcttactatttattatgactttgattatgatatctagttccgaggtagtttctttttagttaagagttatttcaaaacccgagacatgagtttttaatttcattgatgaatgttaatttttagtttccattatatcaaat

SEQ ID NO: 24256 - DNA, 2263 bp, Cannabis sativa
caattcccagcctgaagttccattagcataagttggagctgttgatggttgttgatcagctgcaaatattatcacaacgtctttagttttacaaaattcattaaaagcaattataaaaacatccttttgtggaataaaacaagtacaagtttacttgaaaaggactggagttaccaacaaatgcagcattaatttatacacatttcataaaaaaaataaaaaagttagttaagaagacttactgactggcacaatggccaaagccatagcattcttctcatctaattctttaatatctggtacaggatcattcaatccctagtaacagaagaaggaaaaattaagcacctttacaaaggacttcaacaaattgcgaagttaccgtgatagaatagaactattagaaaggacaaacaaacatttgattttaccagcagatctggtggctcagctacaggagcttctactttttctggttctgctggaggtggaggtgggggtggtgatggtgatggtgatggtgagcgtgcctcctctacctctggtttcttgtcctctattgccaacaccttgggggcagcgatatcctgattggttaaatataaagccaagggatactttttcaattgttgaattataaacttaaaaggattattaagcataatagaagaaaaaagaacataacaaaatgtttaatgcatttcaaaagcttcctagtctataaaatcattaagaaagaaaaagaaaaaaaagattatcagaaaggttcaagggtctcaattagtgtactttgtaccaagaaagaaatcaagtcaaactataaatttgagtaatgattacttttctaagcatcagtagcatacaaaacttacaacaatgtcaaagccaaatctagtactctatagtggcattcttgttcaaataggaatcaatgatagctactggttcttggttagaaaataaagtcattgcaattaattttcaaagtaatattcatcggtgataacgaaaatctaaagtgcccctccataaattaaaaattccacagaagaatctggacagaccaagcaggaggtaagtctaccccagattactttgtaaagagacaagccataaatcatgggaaagaagctgcctacaatttgtagatatttagttttcttttcctgattagtagacccacaatgctctgcttgtatgttttatttcttccaatgattgtataaaatctgtgtactgttctaggttttattaatactcaatgaaaaatatagcagtatgctcctttggtatcacacctgatccttgcgaactgttgaaaaccggggagcttctccaacatactcttccatggcttgtaaaaatgatgccgggggctacatcaagaaaatactagctcaataaacctgcttttaaggaattaagaagcccatgcaatgaaatagaagccatgaagaaattgtaagacaactaacctgctcaatcttgatgaacttttctcctcgtccaatatcaagacttttacatatctcgtaaaactctgagagtctctccgcctgaaattgcatacatttttaaacgcaaatatgatacttcttttcgcctaaaccaacagtcagttaaaaactctagatgaacactagacaaatattcctcaaggaattacctgtgggccagccttcctatatatatcaagagccttcacagcattgtggcgttccatctcaaagaactgtcagaaatacagtatcacatgtaagttttatagtacacaagcttcttatcttaaaaggagaatatcatgtctcctaccttgtcaacaagatttactgtgccatcactaatagcttgatatatcctgacactttctgaggcaacctatttagcacattagaagacaatcataagacaatagatcgataatgtccaaatgatagatcatgagtgttaaaaaaacatacataaaagaacagttacaagtgttccctaccattgaaagtgctaactgaatcacaaaattatggattgctgctccttgtggctgtagaaaaatgaaacagcagatactgataatcagtaactcattcaggagctcaggaatagtaaaaaaaaacaatttgaactggctgtgtgcctctgactacttaaaagaaaacttacctgacaaccaagaacacgaaaaagaagctgttgtagagcaggcaattgctcaagcagctcagcagtctccaactccttggttctctgcgccaaaagatactat

SEQ ID NO: 24257 - DNA, 4740 bp, Cannabis sativa
cttcttcgtcttcttcctctagcccgaccccttcctcaccgccaaaaaattggcgggctggagctatggacagtggtccattcttcccgaatacatcttcgttgagcttattcgtttctatggctgcagtggtaggttcgaagaagctgttgatgttttctgtaaaattcccagcttcaggtgtgttccttctgctctttcgcttaattctctgcttttggtactctgtaggagaaatcagggtttgaaattggtcccttgtgttttgatgaagagtagagttttgaatattaggcttgaggaatctagttttgagattttgatcagtgctttgtgtagatttgggaaagttgggtatgctgttgagatactgaattgtatgatatgtgatgggtttgatgtagatatgagaattttctctttgattttgtcttcaatgtgtgaacaaaacaagggttttggttcaggtgattttggggttttgggtttcttggaatcaatcaggaaagttgggttttgtcctggtatgatagattatgctaaagtcattaatgttttggtgaaagagaaaagaggtttggatgctttagacgttttgaatcaaatcaaagcggcacgaatgaagcctgatattgtttgttataccatggttttgaatggggttataatggaaggggaatatgataaggcagatgaactgttcgatgaattgctcgtgttgggtttagttccagatgtttatacttataatgtgtatataaatggcttgtgcaagcagaataatgtgaagggtggtcttgatgtgttattacgtatggaaaaaatggggtgcaagcctaatttgattacttataatgtaattttgaaggctctctgtaagttcgggaagctcgatcaagcgaaggagcttctgagtgaaatgagcttgaatggtgttggggcagacttgcaaacacatagaattatgctggacggtctgttttgtaaaggcgaaatcgatgaagcttgtgtgttgatggaagaaatgttggataaatgtttatgtttttattgttcaacttatgatgacattatatctgggttgtgccaaaggggtttggtatgtaaagcactagacttggtggaaaaaatggcttgcaagaatgtggcacctcggctaaggtcttgggaagcaatagtccttgcctttagtgacaaactttctttaccagaggctgtctggactgatctggtgagctctgccaaaacacagggtggaatgtagccattcattgttttgaattagcccaattagaatggactgatctttccaatttagaggcttacaaggtaaagcatcagtggacctcatatggtttaaccaggtggaaacttgcctagttaagctgctgcaatattggctgtgatttgggatctctatagttgaagatacttggccattttctgtcttggtttggcccagttagcatgggcatatgggctgaagatcccaattagcagaccaagataatgtataactaaaatagcccaaaaaactgtctgctatgatcccacttgctctttaatggacaaactttctaggagaattttcaatgttcaaattcttatttattaggacttagacttacattacaacacttcaactacttaaaagcagacctagtttcctactttccacgtatttcaaagctataacaatgaccttatcaaatgagaattcatcacatttgtgtttttaatttatattgttcactgctcaaacatgtgatctgttttgcatgatctgccaaaaaaatggagacacaaaggaggaacagatcttccctttatggatttagtctgaatttgggatattctgctgttgccatccttttggggattatggagttggacttttacatcaagtgattgtttgatgcagactcattgattcattcaccatcacacattgtggcccaaataaaaggtaactaaggattcctacccttccacttcatgataagattggtaagcactcacatttcctttgacagcaatactgttacccaccactgtgttggattggattccactacacagctatccttgcctagctacctcatcttcttatgaggtccatttcactatttaatgcatatagctaagtaaacatgagacatttgttcatgcttcaatttccaaagctacccacattgtcctattactttatatacaagccccacaacattattccttgctttttttttttattactataactaatcaccatcccttatgtgtttttttatctacacatccttatctctttccagtgaactttaaattgaatgacttggtaggtgggcaatcaaattctcatacaaggtaggatcatattgtgtgttgtgactataccaaaattgtcatcattgtttgattgtgaagaatcagaaacttgttgcagttataacatagttcttatttcattgacaattcacattcatgatcactactactctagttttgtacccagatcacttttatgatcaataatgagatattgaacaacaaagaaactaactagtatgatcaataatgagatattgaacaacaaagaaagtaactagtatatagagaggagttggttctttaaattcaataaacaaccatatttaattagttattattattttgctcagtagtgggggaccattttccatatgtttccatattcagtttggctgtgagaaaaacatgtgctatcacaatatttgtcattatcacatgcagcatatatatatatatatacatacatggctatatggcatatatatgtgtatttatatatattccaccttttgtccttctcatttgaaaatggaattagctaatcttaaatcggcattttctgtcgcggtgacagcaaaaacccattttttatgtgtttaatttttattatttatttattaatctttttatttttactatgctattcgatcatgtcaattgtcaattgttttgtattgtacaaaattaaacgttttcatgtctatgtatttatatagcccagcagtttttcgacttttaaagcttcaaaaatacttttgttgctatttaagtaatttgtggatttcaactttcaattctaagaagttcttttaacaatagttaattttaaactttttcgtgaagagtttcttgaatagctaaaataagaccataagttttggttggttgtgcttttaaaaactactttgaggggcttctgaagttcgaaatacttttgttgttgtttggataatctgtgaatttcaactgtcagttctaaaaagtttttttaaacgtcaactttagtagttttttcatgaaaagtttcttggaaagttaaaattagacgcagaagtctagctatataagaccataaattttggttggctgtccttttaaaaactactttgaggggcttctgaagctccaaaaacacttttgttgttgtttaggtaatctgtgaattttagctttcaactctaaaaagttcttttaacaaaagtcaattttagtagctttctcatgaaaagttttttgaaaagttaaaatcagaagcagaagtctagccaaataagaccatacgttttggttggctatgcttttaaaaactgctttgagaggcttctgaagctctaaaaatacttttgttgttgtttgggtaatctgtgaatttcaactttcagctctaaaaagttctcttaatagaagtcaattttagtaactttctcatgaaaagtttcttgaaaagctaaaattagaagcagaagtctagctgaataagaccataagttttggttggatgtgcttttaaaaacactttgaggggcttctgaagctccaaaaacacttttgttgttgtttgggtaatttgtgaatttcaactttcagctctaaaaaattcttttaacagaagctaatttagtagctttctcatgaaaagtttcttgaaaagctaaaatcagaagcagaactctagccaaataagaccataagttttggttggttgtgcttttaaaaattgctttgaggggctactgaagctctaaaaccacttctcaagtatccagtgagtttatgtttttagctttaaaaaattctttaaacaaaatttaattttagtaactttctcaagaactcaagaagagttctcgggaagtataaagcagaaaatagaaaatagaaactaagctaaacatgaccgtattatataacttttaaaggacaaataaaataaagtgagtcatgtatagggtggaaatgttaaaaaaaattgaaaatttggtaaaactattttgtagcatctcatgacaattacaaatcatctttttttggttattttttacaaaataactttattcatcttcaaattagccatagatattgtcagtgtgaaaagtcattctatgcagtgaatttgtcccaataatttttgtgaacctaaaagaaagataggaaaatgggtttaggtcaaatttagctctaataagaactaactttataaagctctaaacctatttttgggtgtccatataaatatatataaatagttatacagtagaggataggacactaatgataaccaatatctgttgaatgatattcgagtaattcatataataaataaaatattatatattatttttattaaacaagtaataagaatttaaagtgtggtttattacttataatgtgttatatagggtgtttatatag

SEQ ID NO: 24258 - DNA, 2425 bp, Cannabis sativa
atatttttttctaaataagggcctaaactaatttttttttctatggcccactaaaaatcagggccggccttgtgtgtaattaatcaaactgcacaattaaaagtgaagtgattccacttaaaaatataaatgattaatttgttttaaaaaaaatggttaatatttattacactgaataataataagtgtgtacaatttgagtatattaaatgtgggaaccaactctacatatctaaaaacaacatcttttcattgtttttttttatttaaatctctcttatattaaatgtaattatatacaaaaaaaaaagtattgtttctcctatataaaaaaaatattgcaataaaattaaatttattgtgaatatctaagaaaatatatttctaatatttttttttaaaaaaaaataaatatctacaattataataacccaaatatatttttattattatttttcttttatattaaatgtgactatataataacaagtgttattttttaaaaaaacactgcgatttaaatttaaactcactacacatatctaaaaaaaaaaattctattattgttttttaaaaaaaaacaataaatctttctgttatattatacacgagtccatgaaaatctgaaaagaagactacaagcctctaccactattgagtactggaagcttgaggagtaaatgatatatgtgtttcagaagggtgacacgtggcatttctaaagtatgattaatccgggatgacctggataaaagcccttccacgaagataggcccagtctagaaggttgatgggcctgagcccatctaaagcctagaaggctcgcttccgaaggggaggctcgtctggttcaagaatgcctccaaacttcccaaaatgaagtaaatcaagccctccgaatgaacactaggtgcatccgaagagggtatttcaagaggcgccaccaaaagccctttgtagggtgaagtggctgccctttgacacttggtcatcaaatcttgtgttctatgtcagaacattgtagtgcgggcaccaccaaaggaaaaaccacccttttgtctaatgacacgtatctaacaccacaatacataggtgcgacacatgtaggacatttgtcctaaatcgcgtggtccccagctgtacggatacctttgccccacgagccagaatactgtcagcgggcttaagagtcatgtatttcatgtatttagcctaataaaggtccagtttgcacaaaaccctagtgggtcatgtgtattcccgaatccgaatcctagcctataaatatccatttataccttcatgcaagggggacaaataattcacttcacatcttcttaagttttcttgttctctaagccaaaaaaaacctaagtgagaaaatataataagaagttagcgttcttgaacttataagatctcattgtaatacatcaaagccattcagcctaatacattaactcgtggactagggttaattaacacccgaaccacgtaaaaaaaacctcatctccattctatatttacttattaacttcttaagctcttatttaaatttgttttcgaaaatttcagtatacactaatatatactaaaggaagcttctatggtgtacttccaatgcacccttatatattttggcatacaagagaattctttagtttatttttttcatggttttgtatgttttagttatttaagacatcttgtaaattttgagaaatttaaaaaaattgaacgaactggaaataaggtttagacagtctgttgtacttatatctattttattttatacgagtgtgaaacaaacattttgaacaatgctttttatattgtaaattattctgaatttattaaaattttacaagatgtcttaaataattacaacatatatgatcatgacaaaaatgaattaaaaaattatattaaatgccaaattagattggggtgcatcagtgcaccatttctttaatatatattagtatgcaaaatatattaattttgggaagcttctacagaaaagggtgcaccaatatacttatattgttttagtattcaagataaaagttaagtataattttttttatagtgttgtatgttgtagttatttaacacactctacaaaattttgaaaaacactctacaaaattttgaaaaatttaaaataatttacaatataaaagtaaaagaatagtcaaataatctattttactagcgtataaaataaatgagacatgcttgcaattagggatgcacatttctcatatggggatggggtcccgcggggacccgcccctaatggggcgggaattctctgtctaaatgggaaatagtatgcgaacgaggattattttttgtccctaaatgttaaacggggcgggaacggggatcatactattcgtccgacagggacccgtttagtatt

SEQ ID NO: 24259 - DNA, 3204 bp, Cannabis sativa
tttatgatcttgtttggattttaaaagaaagaaaaaaataatgaattttaatttcttatgtttgaattaaatcaataaattaagaacttttttttctacaaagattaaaacttatgtataaatattattttattaaatatatgaaaaatattttctttatattttttctaagaaaatttttcctttctaaatttcaagataaaaataaaataagaatcaacacaagtcaataaggttaccaacaaaattaaaaccgtgttggatattagtctatatgagtagttattgaaaataaaactaaactttttggttacttactagggcaagctacaaaatgttgtagaagaccatcacattcacaatcacaatgtagtgataatataccaaataggcaaataattcagaatcttattagtttttgtagctatcgttgtcctaaagtgagaactttcatagtccaatattggccaaaggataaaaacgttttgagggtctaaaattgtgtatacatcactatcataccatatttcttccacaaaaagataagatctattggctttcgttatcttcttgtgacaaagacaatattaattcaactgtctacaaatatatacatatatatattcagctttcggatatatatagtactatagttatattgcataattgatgacaatatgaaataaacacctcacgttcatttgttctagaggttttatctttgccaacacggcaatacttttgaaattatccttttaaggaaaaagaaaaaagaattaaaaataaaagagtcacagcaaaatctatttatgttttaattttataatattaatttgggatttttttttttttgtgtatgtgacaaaaattttttaacttcactttttttttaaaaaaaaatttaaagtgatagctaaaatctcactattaaatatcaactagatgactaacttgtacacttatgtgtgatatatttttatgaggttttactaatatatgtatacaagtatacacaataacaattaaattatttgtaaaacattataaaaaaattttatagtgtatgaaccaataagcatatttaattagaaaagaaaaataaaaaagtgaccattcatggtggtgaaacaacaatactaccactcataataattcattcatcctagtggtgcataacattagcatattctttcttttcttcaattagaaatatttttttatttcatattgcttcttttatgattacgttgatccaacatgcgtagtctcattcataaaaactgcattattattattatttagttacgacattgaaaaagaaaggttaaagcaatacatgaatagttgaataccatatccctattttagggcataattgaagtaaatcaaccacattaaaaaagttacaaagggacccacatgaacctaaatcaaacactaaatcctaaattttggttcaccattcatatggtcttttaagacttagccgtttaagataaaaactaaacaaaaagtgattagtttacagatcaatattgatggttcatttgtcctttttaaattaaagatttcttgtgtaaaaccttaaaagatcaatcacttcataagaaaatacaacaaatacaaatttagaagtttatataaatcatgtatatatatatggatttgtttaagtggggacatcactagtactttttgtttttgactttttgtcactcaaagaaattataactcaatcttttttatttgacatataatagacatctatttttttttttaaaaaaaaaaaaattacagtaccaaaaataaattttaaacagtgaattagttgcatatgtaattattttttttttctttttttttttttggtattgttttaatatcctaaattattcaaaaatttcaatcaaaatgtgaatatcagtcttaacaacaatatataatatcatgtgaaaaataaatgagtggcaaaagtagtgcacgccgcctaaaaaggatcctataaatataaatttattaacaaatgtcaattggttgtgtgtattaacaaatgttaaaacttccaatgacctaatagtgttacacgtaaacttgtgtaagttatgataatacaaccgagattataataaaacaacaatgacatcaatgacggttgtaattaattgaattcaaagcctattgtatcttaactacgtgacattatattacttgaacgaaaaaactagaaatgtaatcaccaattagattattcctgtttattttgaatttaggcaaagaataagtcattagttagaagaatatatatgtgtaagaattcaaaaattgattttctagccttagtagttgcacaaattttcacagtcaaactcattatttaatatagaaaatcttacttgaaatcccttgtagaaaaatgtagaaggtatgatgagcttcaccaaagtgtcttcttcctatgatcaattaaagacgacagccaagaattaaaaacaaagatattataattctctgttggaattcaaagtgatatatctgaaagttgcatatttcaaatcttatgtactttgcaagagatgcaataacatttatcaaaagggtatgctaggttttgccaaagtatcttgtttgtgggatcattagattgaaaacccataagaaaaaatctaatatgaagactgatttttgtctaacccgtgaaaatctgtactggtaatttagctgtgtatagcttgaaacaatttcatcaattaaatggctttagaattgacttaccagaaaacattcccagcaagtgtaggccaagatgaagctgagtagaaggtgaggtactttgataaatgagagatgatgagcaatgattgaaaatcgaggtaaaacatttgttaaagaaaaaaaaaagccaaataatatatatgataaatatagcatttttacagaacatggttgttagcatgagcaatgcaaaatagacaaaaaaagaggaaaacaaagagagagagagcagcttttagttaaagttaaaaggtcaaattattaatcattatcatcattttcgccgtgattttgaagcagcccatttaaaataaccacaatttgcttcaggattagatgcaggtccctgtagaagaacaaagacagtcctctggttaattcatgtattagtcgagctcttcttaaattagttatataatggagacaaattca

SEQ ID NO: 24260 - DNA, 3301 bp, Cannabis sativa
aatttacctgcttcttactttccttgttttattgtttcctgattttaattttctcttcaaattttatatagccaaataaaagtaaagatttaattttaaagtacttaattataatttttgtgggatcgacctcactcctttgtgggtctataacttgtcaacaatacatatagttgcttgcatgttaaaaatactaaaataattatacataaagcactttttcatatatataattttcgtctctttttttcttttcatttaaatgacaaattatcaatgttctaaattaatttttccacaccaaataaaattggaagaaaatgtcggtgggaaaaatggtggatggaagatataattttgttttattcttctattatatttttatttttatatctataaacattggaaaaatggaggatgattaacacgtgagaatatgtacgttatgagcttggcatgggccaattgataatgatatcttaacggctaataacatatatatatttaaatcatttttctgatctatttacttctcctctccattattatattattattattattaggatttcattttgttatattttggataaatatataaaaaatagaatgtgcattttctttatccaaaaactagttagttcaccaccattaacctcatcttcacccactccctatctcaaagagggtaacattagataaggtacaaaagtttccacattttcttctttttatgacttatatttttatttgtagagaactatattatgtatagagagaaagagagattgagtaagagagattgtgtaaaaacaataaaataagagctatatatataatatatacatattgagaaagaaagaaagaaaaaagacataaattcttatctcccatcctcactccaccataaatatttatatgtatatatttatattcattctttcattctcttgaaatttttatatatatattttttcctctctcacaattatttccattgcatctctcactttgctcttccacaaggtaattccaagatccttatctcccctttattaatatctctactttttcctttctttctctttcattatttttgcctttttcttttataatttggtttcattttttgggctgtaaattgtttggctttatatatataaatatatatatatatatatgtatatatattgggtagagtgatcatatcatcatcatcatcatctcattatagtactccttcctttgtttctcttattgcttctctctcctcatccctctattttcaggttctctcattaaaacgaaattatgtttttttcttcttcttcctcttaattcttcactcttttgtgttcaattttgcaaaaactatatatctttgtaataatttccataattgaaaagaaaataattattattttctggcagaagagctaagatggcagattgcaaccgaggtgaagattatttctcatcccaaaaccaccaggtatatatatatatataagattatatattaattagggagaaaataattaagttaattagtaatgcatggttagactaattcttgggttaaggttggtttaagtagtttagagtgattatatatagaaattgtgaatgtagaatggttagttgggccatatacttaactttaatttgttgtggtggtggtggtgtaataaaggcataacaacaacaaaacccacttgatcgcacatgacaacaacttatattgtcataagtgacatataactagattgtcttctagaagtactatatttatcatatatattatataagagcattggtattgggcaccagtggtacctaacacttttaagatatatcgccttgtgattgactagcgatactctttaaaaattattatattaaactatatggtactcgatacttagttaaaccaataacaatatattaacgcgtaaaatagtactaagcataccttttaacatttctcgttatataactatccaacaaataaaaaatcatccataaaatcttacgctttaccttcccatcaccatgtgtatttattatgtatatgtttggcaactcattattatagagttattgactcttcctaataatgtcaactttttgtatacattttatttataaataaatataaaattacacatagtgacatgggtggactcatgaatttgttcgagaatgaaaaaaattagagaaatcaataaacgtaaaaattaagagatattaaaaattaatttttaaaaaatataatataaaagaaatatacaaagaaagaaagtatgattataaaatatttacaaaattaaaatataaatgtaaaaaatatttaaaaattaactaaattgtaaataaaaaatttaaatattaaaatttcgcataggctacctctaggctctagtcctttattgatttttcaatttatattttgctaaattgatcccgttatttaaataagtaaataaaatatacataatgttttttgatagaatttttttatatatagatatttttgtagatgtatccttactctaaatatataatgattgatgacaaattgtacctttttatgaataaaattaaatcttatagttactcaaaaatgtcggcagagtaaattagtacatatataaactaactatatagtatacaatttctaatgttacttagctgtccaaatgaatcaatatggctattattttttattattattttatatttgtttcaaattcattaaataattttagccataataaaatattagattatatagattgaggacaaggatattaattcattgttcatctccctatttgggacccaaaaagagccgctctattaaatttcaaataaattaaagtttggtttttaatagattgccaaataatatgaaagctttatatttttgaaaactttggccaattgcaataagatgtactatacatattttggccaattactatacatacttttggttccaatcaaaagtgtgggtcttgatcattgacaataccttataataatataaaaatccaattataatgagctgtgttataatatgttataaatatcaataagggaccattctttcttttcttttctttttttgaattatttaatgtgttacaaagacatacagctctagcaatatgaatatgaagcttaattaattatatggttttcttctgtatatagtttctttgatttatatatatatataaatctaaatcatgataattaaagtcctctttaatcgtgtatttattaagattttggatta

SEQ ID NO: 24261 - DNA, 1932 bp, Cannabis sativa
attattattattattatttttttttaaaaaaaaaaaatggaacattaagttaggtttttataaattttgaccgaaaaaaaaaacagccgaagaatatgaatagttaaccaaaaataaagtttaaaatatgaatattttcataaattatagaataaaaattctatgagcgtaaatattatttttaaaccgtgtgttttacaaaaattataagttagacctcctattttgttaaataacaaaacaaactctgtattttcaaaaatgatacaaataggattttgagcacaattttcgataatttttttaatacaacttgaaaacaattcataacacgaacaaatgagaaatcacagttttgtcataatacttcaggttgaattatatattattaagttttattttgacaaaaaatcaattcatggttctatttgtttcattttgtaagatacaagaccaattttgtcatttaacaaaacagggggtccaatttataacttttacaaaaacacatgatctaaaatggtatttacccattctataaacaaacttatctaatcaccacattatttttcatctattttattacatttatatttttcatcaaccaaagaataaataggatcaccaagaaaaattatttcacagaaaaattgtcgaagttatcattaccgccagaaaagtcgttgcaattggcattgccaatgaaaaaatcactagaaaaatataaatggaatcatcatcaccgccaaaatatcatcagagttattatcgtcattggataacactacaataataataggatataggcacgtccaagtgaggcacgacataaagtggtgccaataaaatacttataatgggccgacacacctaatgtcgtgcccattttctcataattttttttttaagttttaggggcacgggggcacgatatcctagacatggggtatgacaggtcatatccccattattttttaagttagaacatcaattcaggcaataattttcccgcatttatagttgggcacgacaatgtcaggccccctgccctgacatggcatgccaattgacataatgggcacgacagtgtcggcatcatgttttccccccctttttttgaaaaaaaaaataggcttgagggagtcatctcgtctaaaccctttacccattcactcgttctctctgtctctctactcataccgccagttccttcttctcaagccctcacactatcggtctttctcttctcaagcccaccccgatgatcttcttcttctcaaaccctcacaccgctaacaatgacaaatcatcagtaagttttttctctttcaggtctctacgggtagctccaaccggccatggcatgggtaacacaaaaagttagtttcttcattttattttcttgagatacattattaatttttaatctacactttgaaaagggaagactaattggttattcataatatacatgttttactcttgaattatttttcatatttgattttgtttcctttctctttgatttggttttctaattaattttcctttctcataggtctctatgatttacagagaagacaaattgattattcattatatataaagacaattaaactactgcaaatatgatgttttgtgtcgattttgatgtaaatgaaattaaaaaatttacgcaattaatttgtggttgaattttgcatcgaatatgtactgatgcaaggtttgtgttagttttgaaggcatttgtgttggttcacaactgatgcaaaaactacactatttgcgtcagttgcgaaccaacgcaacaagctatgttcactcgaagcaacaagttgggattttcatgttacttttgtttatggattcaatttcaataattatattagtttactaaaatatcatttataggtagttaagtgttttaaggat

SEQ ID NO: 24262 - DNA, 7408 bp, Cannabis sativa
  modified_base (6841)..(6844): a, c, t, g, unknown or other
caagggtggctggccagcttctgtgaggaagctagtctgtcacatgatgccccgtttgagtgttagggtccctgttggctgaggtgctaacttggtcttcttgttggtgagttatattgccacatggcactaattttgtccacgtaagcaatgccacatcaggtgggcaaaaattgggatgacatttgcccccaagtccctatgcgaatgtttgtacgaatagggacttaccagttagattggtgcgattggaactgatgtagcctttactgaatagaagttgcttaatttttagccttttgaaatatttttcttgactatctgatctcatatgatgtatcaaactaactgctttatatgtctttttgttgtgtaggtgaaacaagtgaagaaggggtcccacatgtactatataagtgcttttggggggaatgcctcttcactctttacttttcactctctcactaaaaattaacatttgaagagtctcctccttctctttagacggctgaaaccataaagtgtcattctctcgggatttttgtgccgttttgacgatccaagcttcctaccttcttcctcattagtttcttgtagcgggtaagccttatattcccactattttaattaatttagttgattttaccatgaatgcatgaacattgttcttcgctttgaatatcctctaattcctatgttagattgttgtccttttggtattttgatctgtatgatagccttagcatacgtaatgtgcaatttctagatgaaaaagatctgaatttgactttcattgtgattcttggctcgttgagtcacaaagaacatgaagaacacaaagaacgtgtttgagttcttgaaaaatcacatgttcagatctgtacagatcctggctagcaaaggaggtcttgttaaagacctggttgtccaaggatggctatttgggggtctggtcggccaaggggaattccccacaggctggccaacctatgcctggaaattcgatacctagccagccctaggctagatcatggggtctagccgacctctaaggcttagggacctagccatccaaggccatggcagccaattttttaccctctgttgacctcatctagggtcttgtgactgccttggaggcatatacaactgtagtcttatgagtggttccccttgggaactctgtataagactcagtagtaagtccattatagtcaattgtataacttaggacttaccatatgtctaagtaagtgtacttaagacggtacttggtcgataattgaccttgtacattgtgatttacctagaaagtaccctttggtatcgttgattaaaatgtgattgtagctttgtcaggttcctcacgtccccttatctttctctataggtggttttgggtgttggatagggaggtgccaaccgcataggtcccttagtcatcttgtgatcatggcccgaatgaaatagacatgtcgtagggtgccaccatgcgatcctcagatttctagggtgggaacaaggggccgaattagagctatagaggaggctactcagcctcatgttgatgttgatctagaggttaaccaagtagaggtgcttgaagccaaccaaggggctaagagtcttgatactaagtctagtcttgaggagaaggagacacaagacatgtaatgtcctctccaactgtcctttaggtacttatgatgtcaatgaggagcctctaaaaaaatttgtgggccttcattgttaggcttggatcatgtcttagttcagtcttctgagcccgtagttcttgatgccagattacaaggggagaggtgggtctctcctgcctctatcctttctgttgatccttttaccaaggtacttgctggtggtctagtgaggtatgtccattgtgagatacctctgggggatcaactagcgcacatattggccctcaaatagatggcatgatcagaataccacatcaaacagggagcaatgttactacttcatccatacttttgagatattgctgcttcctttgggatgtgtccaacacaaatcactctgaaaagtattaagtacctttcagcaatgtttgttttctacaaggagaaaggctgacctcaacccactccctgtgagatttgatatttttttgatttaatgtctattccgaagcagaactggtctggatacttctactttagccaggtcagacactagtggttgggtgatactaacaacacacttttgtcgaaagttggtgagtatgttgagaattacttcattgcttgggatgtgaaagaatgtcttttttaaaagcattctattcccacattgcaaatgagggctagggcaaaccacatcctatctcttttagttgagaagagaaacatacttaggttgactagtgtggccaacttccagaagcatggtttgtaccctcccgctccttaagttgcaggagctcaaggcccatctatagaaggagcctgtcttggatatggacaagtttctgactcagatgataacgtgcctttgtcgcgtatagctcagaatttgaagaggaaagatagggccctctgccaatgtttagccagtgggggttcaattggtgatgcttctctccagatcaggcttgggggccaaacttttgaggaacctgctcaccctatacatacatctagaggcaaggtcaaggcagttgttgaggcaactgacggttcctcttctaaggatgatggtatttgatagttgatagcaccatcttttacattcttttcttgcattgaatatttatgacttgctttctgactttgctactttctttttctagatatgtcttctaggttgagaagtcttgcaagggagaccttttgatgagccttcaagtcgactgagggccatggtgtcctagaccaatcgtggcacagatgttgttggatcatctctacctcctcctccaccagagcctccactagctgggcagcccatgacagatgatcctcctgctgggtgggaacggcctactgggtggggcaccttgaggcctcgccgagaggtaggctcagccacaaggcagagagctatggaggcggcctatagacgcatagagagagtccatccttttatgaatgaggagcacaaggattagatacctagcatcttttcttcttttcttcattgtatcattcttgccttctagcaaggctccagtttggaggtaggctacaataggtgtcatccatgtcagattgtcatgcaacatgtcgacttcttctgggatggtaatgttgggttcctctaggaactgtattggtaccaaatttgccttgttggtaatggcgctacttgccagacaggctactgcatctgttgtagcgttctgctctctagggatctgcctgattgtgtagcctttgagctaccataataaatctttgattttgctcaagtaggccactattttttcacctcgagctatatacttaactaggacatgattcacgaccagttgagagtcgttgaatatgtctagctggtcatcccgcacttcatgtgccagcttaaggtcggctattaaggcttcgtatttagcctcatcttttgaggctttgaagctaactttatttgtatgtacaatttcttcccctaggagttataaggccaatgcctacactgaacaactagttgttcagtgcagcttccatcaacatggagtttccatgttagttctttaggattttgttgctgctcttgctctcacttcttctctggctcttgcttttctcctgaatcttgagagatttcaagagatgggtttgtgcactcagacacaaagtctgcaagggcttgaccctttatggctgttcttggttcatatgtgatcttgaactagccaagctcaatggcccacttgagtagttggcctgatgcttcaggtgtctataaaacatactacaatggttgattggtgtacacctttatggggtatcactactacaaaaggaagaatttgcgacgttcccaaaaatgatgtttttgaggatcgtcactaaaagaattaagcaattatttaaaacttttgggaaaaattggtattactgacagtttataacactgcctaagagatttggcgacatttttcattaaaaatgcttatacctgactgtttaaaatcatcataaatggtcgggtatagtataaccgaaggtttagatacgtcggctatactatacccaacggttttaaaccattgggtataagcatcctaaaaaaattcacaaatatactccattttccccccatctaacctaattagtgtttacctttttgaaacattaactcacgcacgaacctgcaaaaaacccctaacatacagccgtgccccccacaaactgaaaacccaaacccaccaccgacgccacccacccattgttgccagtccacgaaccttctctctctttctcaagctcacattaccagcgccacccacactctcgtctctctctcaatcggcacccgtattcatcctccatctctcactctggagcttagtacaccactggtgccaccctctctcagtgccaatcctctgacctccctctccttgtctctctctctcttacaccaccagtcggcatccaccactgtagccgtagcactagcgaccacacattaaaggtatatttttagtatttattaaaattaatttatatttattttatatattctgttatatatataaatatacatataaatatatgtataaatttattaatatatattattgattttaattcatattaattatttatttcattttagatttaggtatttagtttagtttaattatttagtattagatttaaataatatatgcaaaaaaaatatatttggttttaattaattgtttgactataagttttaggtaataaaaatattattgggtttagattaattatttaggtattaatttttatattaaaaaatatttatattaattatttaggtattagagtgattttcatttaatttcttattaaattattattaaaaaataattaatttagattatttatttttatttcaaatgttattgaaaaaaattcttagttgtgtaaatattaaaatataatgttttaaagacttttttatttacatttttagtcgttatcaaacttttttatttaggtattttttttatatataagatgataatagttataaaaattaattttttatccacttttactttaatttgatgaatttataaatgtaagcttttaattttatattttaaatattttataagtttcgggttctttgtgttgattgaagattgtacaattgtagctatctttattgtagaaaggtataatcttcaaaaattttaaattctttatttagtggagtttaaatatgttagatattcatccatagtgaagtaggttctgcgattaatagtactgcgatcgaatgggtagaatatgcatgttagaagagtttgaatatccatagtgaagtaggttctgcgaatacatgtactacagtcggatgggtagataattttatattattaatgtggttttattattattgtatttttttgtgtttattaattattctttccatgttttaaaattttagaaatgttcgattacagccattatactgcaaaaattttgatagaattaggataaattttaccaaaatacataaatttcactaaaatatatatatgtgtggtaattaatttaactaattatttactacacatattcaaataaataattgaataaacttttatttttttagaagtttcgtaatggatagaaattggatgagtgcgaatagattatcagctgagtatagtgaaggtgttgaccatttcttagacttttgtcaaaagtatgccaaaaatcctaaattggttccttgtccttgtcttaaatgttgtaacatagagcatatggatattactaggataaaggagcatttatttaggaacagaatagacaagagttataaggtttgggtttaccgtgaggaaaagaatagagttccgggcaagggaacgtctaagtctaacattaatagtgttaatttggactatgaggatgatcacattttagaaatgataggaaatttacaatttgaattaaatgtcgatcctttgaaatttcaaagttttgtagaggatgtcgagaagcctattaaccctacttgtaataagtgtactaaattaccaatacttagataatacaatataaaggccaaacaggggtggtgtggtaagagttttacgaatttactagctttcttagtagagttattaccggaaggtaatgtggtgccttcatcattctatgaggcaaagaagacactttcttccttaggcatgcaatatgaaaaataaatgcatgtcctaatgatttcattctatactgtaagatatttgtggatgaaatatcgtatcccatttgtggtgagtctaggtggcaaaagaaaaagaattctgacgaggtaaaggttggtgtccctgcaaaggtattatggtacttaccccaatacctcatttggttcagttctttcgaaatgtcaatcatgaaaaaatttgatctggcatgccagcgatagaaagttagttggtaagacgagacatccaactgactcacctgcttggaaatcaatagatgctaggtaccctgaatttggcaattaacctaggaatatccgtcttattctttctacggaaaaaatcaatctacataccacccttagaaataagtatagttgttggccagttttgcttgtgatgtataacttgccgccttggttggtaatgaannnnaagttcactatgcttacactattgatatcaggcccttcacctttgcaaggggaacaagtgttagaaaagttgaataaagttcaattccaccttggaaagaaaaaatcaaatccaaagaaaagaaaaggtcaccgtgagaaaagtgacgatgttacaaatgaacctcaagggccatggaagaagaagtcaatattttttgagctcgagtattggaagcatttattattacgtcaaaatcttgatgtgatgcacattgagaaaaatatgttagatagcttgcttaatacaatgttaaatattcctgggcagagcaaagatggaatcagatcctgcctagattcgaaagagttagggatttgagccaatttacacccacaagttattcttcgatgaatgttcttaccaccaccctttcatgctctaactaaagtagaaaaacacaatctttgtgtggttccatatctctcccaggtgaaaaagtctgaagggtactcctcaaatgtctctggttgggtagatatgaataaatttattttgagtggtctgaaatctcacgatcatcat

SEQ ID NO: 24263 - DNA, 2832 bp, Cannabis sativa
agagctgtactgcctaagttttactcgtcggatgttcacccggaatcgtggagagttttctcttcgtgtgggagacggtgcgttttgactgcaaatccgaggattatggtggaagcatttttgaaggagtttcttggagcagacatggttttggggactgagattgagagttacaagggaagggcaactgggtttgttcggcggccgggggtacttgttgggaagaacaaggctgatgctctgaaaaaagcttttggtggggagactaatagacccgaccttgcccttggtgatcggctcactgatgttccttacatgtcactatgcaaggtacataataataataattatgataataacgtatatattttattttatttttacaaaattacggtaaattttcgacaaaaataatgtgaattttttagaatattaaatttacaattcatagtatttgtttctttattttatgcatgtaatttgaataataactttagctttatagattccgaatattttttaaaaaaaaaaaattgtaaaaattgtactatatcatatgaaaaatactaattaaaaatatgccaaatctattactgcaatttatccatatactaaatatactaattaaaatatacttataattataaaattaagcatatatatatattcgattattaaaattgagcatatgtaataattgaattttacacgttacaaactagaaacattcttgtcaacatacttgttttaaagtaaatcttgatgttatcggctaggttataagataactccgataacgtaggaaactcagttaaataataacttaatatatagaaattttgtcgtttttattttaatcaatcattaatgatcgaagatcaatttgagaacaaattaaatgatataccaaaccatgagactatagatttttgataaataaactatttttgacacgtactacaatacaggagggttacatggtcgcagccaagccagatgtgaaagccctgacaagcgataagctccccaaaccagtaatcttccatgacggccgacttgcctgcaagccaacgccacttgtggctctcttgatagtcctatggatccctattggcttcatcctagcctgcttgcgaatggccgctggttccctcctccccatgcgcctggtctactacgctttctgggttctcggagttcgtgtcattgtcaagggcaatcctcctccacctgtcgacaaatcctccgataccaaagaatctggcgtcctcttcatatgctcacacaggacactcttggatccagtattcctatccacagcattgggtaggccaatccccgccgtggtatactccgtctcgcgactatcggaaatcctgtcacccatcagaaccattcgtctaacacgagaccgaattatggacgcttcaatgatcaagaaactacttcaagaaggtgacttgaccctttgcccagaaggaaccacatgtcgtgagccgttccttctcagattctcggcgctttttgccgagttgactgaccatctagttccagtggcaatggtgaatcggatgagcatgtttcatgggaccacggctcggggatggaaagggatggacccattttacttcttcatgaatccgagccccgtttatgaggtgaccttcttgaataagttgcccgaggagttgacttgtgggtcaggaaagtctagtcatgaggtggccaattacatacaaagagtcattgcatctaccctttcttatgagtgcactagttttactcgcaaggacaagtatcgagctcttgcaggaaatgatggaaatgtgactattgtggctaacaaaccttttttccaacccaacaaagttatgggttgctgatgaaatgataatgcttttctccaacacaacccttgatggcttagaattactggtgaccatccaaagtagatgaatcaaaatatattgcatatgtattgtcattgttaagggcaagacaatgggtacaaaatatataatggtgaaagaagtgacaaaaaaaatgtgtattacttgtgtgccaaatttcggaattagaataactaatgatcaacttcatttttattatcatgaaaatactatttctgatttctttcatgtatgtactaccaatgcatcttgttaacattacatttacatttatttgaattcgaataaaagtaaaatgattaaatagaaaataaattaatactgtatctttattattgatatatctctctaggcttctaaaatgccaccacccaaagtctgtaaagaaatgaaaagaagtatgcaacctagttattatgctcctcacctcactcaagtcaatcttgtgcttctagaaagattcaatggtcgccaattctgttatggaaaaaatattgatgattaaatcatagtgtggcatagggatttgcaattttttataccacttgtcatttctattattgtaacggctaaatatgcctttgtccatgttattgattacattgaattttttctataaaaggaaatgaatagctcaacattattgagctgagaattacatcaaatatattactctgttttttaacttgatattagagccaataatttgactagcagccaaaatgttccccaaaatcttagagtgaatactcctgatcaggctacagtcgttgctgcagcatctacaattgtcggtgctaggtcaagtcactatcaactcccgaatctagtctcacaccacttcagtacactcaaccatttcttcttaaagcttgatagatataactacagtctgtgaaagactatgatgtccacaatacta

SEQ ID NO: 24264 - DNA, 2430 bp, Cannabis sativa
gtgcattgttaaaaaaattaaaaatgtaatccaacttaggttgttgaatgtaattaggaaaaaaaagatgtgctcaatctactcaatttttgaaaaggattatgatgaattagttatagctttgttgttttgaagcagcctgttgctcttggtcgtaggttggtgtaagttttgcttgtgattaataaagttattttcttcttgataaaaaaaatcatacaagctgggtcattaaatgaaagtaacatacaattttattgatgaatgaaatcggcaatcatgtcttattagatcgatgagtggcagtatctaccttaaactaagaaaaacttaaaaagaaaagaatcaaaactaataaaaatataactttgcttacatgcatacacatagcataagccgttgctgtagagaaattattattggtaatgttcgtagagatgttggctattccaatatctggctacaaggttcatgtttgaatagtaataacctaacttgtaggtgtcgggaggtacaatctctgtaatctcgtatggaccttcctaattgggccctagtatccctaatgtagggtctttagtattggctaagacccttcgcagtactaagtctcctaccttaaagctcattttcttgactttgaaattaacgtatctggctaccttttattagtatgccaccaatcaaacttggaggcttccctcctaatttctaataagtccagggattcacccatcaataggttagtattgacttgggcaggtctatttcaaccggtatcattgcatcatatctatatgcaagggcaaacggggtatcggtggttgttgttctttctgtcattctatacgaccataggacttcaggtaattattctggctagtttatactttagatcttctagttttttcttcatcgtatccttcaaggttttgtttactgcttctacctacctagtcgactagggtgagaaatttgtgaatatgatactatcaaattgagtatcattatctgacactaacttttggggcaacccaaatttacatatgatgttcttgaccataaagtcgagcaccttcttggaagttatcgtagccagtggcttggcctctgtccatttggtaaaatagtctaccgctaccaccgcatattgcacactcccctttccttttaggtaatcgaccgatctggtcaattccccaaatggcaaaaggccaaggattttgcatttgtgctagttcgttgggtgcatcccttggtattttttgtaaacttttgacatttttcacaccttcaaacatattatagggaatccactctcagggttgaccaaaaaaaaaaaaaccttgtcatagtatcttcttggaaaggcttcgccttagcgtaatttcaacaaaaatatttgtggactttttccatcagtctttgggcttggacatggtgcacgcattgtagtaggggcatgaagaaccctcttcgatacatgacactattgatgatagggctgcacacgggtcaaatttttgggtttttggattttcaggttttggttttcgggcttcgattttggaaatgcacaaccgaacccaatttttgggtgttcaggtgcgtcgggtattgggtcgggctttttcgggttgggcatagtcgggttcgggtcctattgggctgagcccgaatgtttaatatatgggttgaaataaaattaaattgaatatattactttcccatttttctatgttttcaaacacacgacaaccttttaccaaattggtttatcaaataataacccttgttatttatgtgtgtgggtgaaaactggagtcgagtcgactggtgaatacgaataggcaggctgagagcttttgtttgaaattgaatatgattaaaaaaatttcagtttcactattactatttactacagaagaatacgaataggcacgtagaaacctctacagaatacgaatatgcatgatattaaattagtaattaattatttaaagtattaatttttttaataaaaaaatatcattttaatatttcgggttacacgttataacccgaccagaaaaaaaccaattaagcttacctgaacccaaaacccgtttggagtctttttcgggttgaacccgacccgactacatgggtttttaggtgataagtttttttggcagtgaatcggggcgggtggtcagattttttgggtttgcgagtctaaatgtgcagccctagttgatgcttaagtatcagaccttcttccttctcattttccttgcttcgtttctatcggtaggtaagacaccttgatctaagtaagtagttgtaggggtcatccatgactgtgttgtattaagttggagtgactcttctttttgttgatgcttggttcaaacaggtattctatcgaaataaggttagtcttgtctacct

SEQ ID NO: 24265 - DNA, 2396 bp, Cannabis sativa
  modified_base (858)..(858): a, c, t, g, unknown or other
ttatgcattattcttaccttgtctgtgcgtaatgcttcccattcacaagccaatgatcaataacagaaacatcatcctgcaagaaaatgctatcaaaaacttgaaagggtgtaacattaattagtaatatttgatattgaatgaacccatcttaacaatattcgcatgcaataagtaatggaagtttgaaattataaagtacaaactttattagtcactagagaaatttttcattttttccaatgctgccttgcaaaatcgatgtttgaaatagggtatcgaatgtttttgaaaatctatttcgcaaacaattataaaaatgaggctattatgcaaaataattatatgaaatggctatttacaaccccgaactaatctgattttagcacaaattcggtagggtgtgtggcattagcatctcaatgtagtaagaaatgaaattttgagattacgaaagtactatgtgtgtgtatatatatacatatatgatcataatagctcaaatttggtaagttataatatagctgcattagaaatatatatagcgaaaaccatctcaaagtgaattaagaaaagagagatttgatagcaaaatttacctggaaatacaatagtagatttgctgaaggcatagtacctccagtgaagaagtaccttgtaatccaatcatcttcatttacatcctaagttatgccataaaacagtactttaacttaatcaaattaacaaaactagcacaatccaaaactgtaattataaaaagaaaaaaagggtattaaattatgaggagttttaagagcatctccaatgaaaaaatataaatatatttttaacatctattaaattggagtgacaaanaactccaagagaaaacgcctaacaataacatcttttatatcttctttgtttttatgttctttattattattttattataatataagaaaatttaattatttaatatatataattaataaaaataatgtaatattattttaataatttttaaaagtgcttacttttagaacattttaaaataaaaagtgctaaaaataatgtgaaaaagagaaaataaaatataatatttttaagggatttggaggtttttgatacttttcaaatgctaaaaggcactagtggtattttacaccctccccgctattaagccaattaagtatcgttaaccaatcgcaaaacgacatatctaaatgtgctaggcactgttggtacccaataagaatgttttttcaaaaatatcattttttttctctataatagtatattatctttatattttactacttaagctatccacatcatcaaacattctccaaaatgttagatgctcttttttacactctctctaatttgataacaagtgttatttttgagtaagatttattttaacttaataattagatatgtatgatattaatattttattacaattatgccattcatatgtattgtgctttttttttcttctctaatatatatttagcatagtaaatttttaagctaatttattttgtttattgctttaggtagtgggacaaaaacaatatcacacatttttcacaataaatagttaacgttatttattttctttcaaattcatttattattttattaggaatttttttattttttgtattaattttatttaatatatactcatcaaataatttatatatgcaatactaattttattaggtaagataccattttataaatagttggttaacagaaataaaatattttttaaagaaaaatgtaatggaacgttaatgaagaagaaataaagattaattaatattaataataaaaaaaaagcaaattatattgagactagagagtgaaaaaaaaaatacttttggatatggtattggacgtggttggtgggaaaaaattttgtatgggaaaataaaacttatggaagaaaaaaaaagaataatgttaaacagtgattagctttattattaatgtagttttttccctttgtaattatcaacatatatgaattttgatctacttagacagttgcaattttcttctttgttagtatgctcaaagggtcctacatattgtactgtgtaaggattattttgtgtgaagggaatagaatatttttagcattccctttgtcatggtatcagagccaacagtacaatatgacatctaaaacaagtggtgggtctacccattcttcaggggataaccaaacacaaaaccctcaaaaccaaaatgacctacctattaatacacagtcgtctcatacaccacctaccctcccaccttcgtcttccttagtcatcgaacatttttcctctggcttcccttctgtcaaccaaaccatcgtcgttaagcttgatggctccaactatctggtgtggtag

SEQ ID NO: 24266 - DNA, 3867 bp, Cannabis sativa
acacacatacaaatacgaacttcaaatgcttcattattttatctttgtcaaagtgtaactataactatgacccaataatcaaacccaaatatcagaagtgcaatcaccaccaggatatctcatttcatgggcaagagaaggaccataaggctcagctccgaaatccacaaagaaattagggttgatagccaaccctcctttctcgatatcaacattaagttgcaacaagtgagaacctttcttcatgagctcgggatagaattggcgatcccatgtactgaaaagtgagtttgtcacatagagtcgctttccatctaagctcatctgtatcatctgtggtccgcctctcaatttatgtccctgaaaattttattaagaaagaaaaaactaccactttttaatgtcatcatttaattggtagcaagtaaatgtgttgcctaaagatatgatttttacaataaagatgttatggaccaagttatctttagtattttaataaaggcatgtatcatatgccaaacataaattaactatttttctaaggtttttgaaacacaacaaagtacttatgaaaaattaagaattttaataaagaaatttgtaatttatagtaaaagtaacaaattacagatatacaaaaataacattttataacagttctataatagcataaaagctaaaacaatagtatctaaataaacacacctggatttttggaacatcgaattggaaagtttcaccatcttctccctcggctaatactgagcttcccttttgaatttgtcctccaacccaaacttggcctgtcaacttgggattcttaggatcctcaatgttgtactgtctcacatcaccatgaaaccaatttataaagtacaaaaatcgatcatcgattgagattagaaaatcagtaatcattccaggcatttctggaagaatccagttatgcactttcaatgctttcactgatattgcaacctagaaaaacaacaagaagaagatacaatgtcattcttcttacaaataaaatacatattggatcacttagtttgaataaatgaaattttattaagttagttatctcaattgattcttgttagattttaaaataaggtaaggagttctatctcaaaactaattgacaataagaagagcatctcattcatcttgtatatagtattatgtttccacattagcgatatgagacaatttttaatacacccttctcacgtttggatatgaaaagtgtgggtatagtaaacgaactttaagaaaccatatggttgaatgtgacatttgaaaaaaagaatcctactaggccaaatcaaaaaaattgtaagtgtacacactgagaaatttgtaaattttttaaaacaagtcaaagatctcaacactacaaacttgcacacgtagaccgaaaggtcccaaatagagatcaaaggcgaagacgaagcttttaatttcctctaataccatattagaatttaaaataaggtgcatagagttttattttaagaccaattagaaatgaaagtagtagatcattcatcttatatatggtattattttttcacattagccatatgatactatttttaatagttcttgttttggttatgttagtttgtaatctagttagcatatttaaaggctttcattcttatggtgagagagatggagttcatgaaaaatgattggactctctaattggaggaagttagaacctattttctgtatttgaattgtttaaagttttgttcttaagtttttcatgcactattttgtagtttggcatgtttgtttgtggtgtttgaaattggtgttggaaagaatccttcctacaacacaaaaacatctagattttctatgtacaaacctcgtggctccatgagttgtcggggttcttgaaaaatctcaccatgttacttgctaatgcagctccaacaaacccgatatctttggaaggatcatgtagaaaccttatctatcaacgaacataatagctataatgtaactataaaatttatgaatgaaatcaaatatttcgtagttacaaataaaaatatattcggttattataaaatcaagtttatgttgctcaccgccaaaggtaacatccctgtgttaccaagatctaatgtttgttttagctcaccaccaggccaactataaacgtaaagatgtctcccgtagagaccgtcagagacatcttgaaggttaaaacctttggtgaaagtggtaggagcaccccatgatgagctgatcattgtcttgtgtcgaggttggtaccaaaaatcatagccaaaattaggactatgcccttctttttcccacctagacacacacaaaaatttgcttgattcttgtaatagatgtattcatacaacattcaactacacctaacttgttcaaacaaaggaaaagtttaagaaattaagtttaccttcctttcacattaaactccgaatcgagaagaagaaatccatttcctttggcatttccatttttatcaccaaggcacgataccatgacatcaccagaagccaagcaatgagatgtgtgtggatatgccaaaccagtcttctcaacaatctcttcagattcaactactttatgcaatgaaggagctttcgggtttgcctttgtgttgaccacataaattcgaccagaactgtaaaaaaatgttaaaattagcaaaggagaaaaaaatggaaatatcttctctatccaaatgatctcaccatccaccctaaatacatacgcaactaattcattcgtaagtactatttggccgaatgatttgcatgaataaaaaaattagacagtacataaaaaaaaacatgtaaaagagagccttcccaaataacttaggaccgatcctaataatcaaaactcaaataccgaatttagggttaatgattacaatagtccaggtacaataagaaaacatcgatcagcagacggatctccgtggcatgaactacatgaattccatcctgtagcatgcaactcatcacctaaatatggcacaaagagtctgtggatgactttcgaataagtaggagaagttggatcaacgtccaccgttgccaaataatcaggtttttgtgttccagtccctttacaccatcaaaagaaattgtgagcatggtaatctatttaactatataaaagaagattctaaactacattaaaatgggatgttaccatgcaatataggaattccaaaaaatggaagaaaaattgttagaaaattcacattgattgatataatttgtgtaaacataatatcgtcgttatggtagttattttattcattattaattgattttgaaataaaatttacgacacacattaccaatatgacattcaaatggtgatggtagtagcaaatattataaaaaagagaaatattaaaaggtaccagtagtgtttagtactctcttcggtgtcatatagctattgttgcaattaaataacaagtctcatataatttaagataatattttttaaagaattcaactaactaattgtatgacgctactggggcccaataacaatgctctataagaaattctcatttttctttatgggctgactaagttttttttactcttgcattatttaaaattttattgccttaaacacaagtaatcttcctaaatcaaattaatactttattttaaaatttaaagttgttgtgttagtcacatatttttcctatttgtacatattaaaatggagaaacaacacatgttagttggccaagataaaactaagctccatattaggtttattaaaaacatttcatttcaatcatatttattttttataaaatatatatttttaatttatgctagttttttt

SEQ ID NO: 24267 - DNA, 2501 bp, Cannabis sativa
agaaaaattgctgtggtctgatttagctgctcttggttgaagttatgggacttaaagagacattgagttggatcaaaaggaaagacaagtctagtgtgatcttgaaaacgaattgtcttactttagtgcatgattgaagtcgaataatcctatggcatctccatatggggttttaactcaaggttgtaaggcaatgttatttgaacgttttttgtttcaatttattttgtaaaacgatctgcgaatagagtggcacatgctttagcatgttcctctattcatgttgatgattgtattttcagtaggaactctttacctattgaaatttcatccttagctagggatgatttaatttaatgaagatgcatatttctttaaaaaaaaaaaatgaatggataatcaacttcaataatggtgttcgcagtgtgagtggtgcaggttataatttttctttcaacccaaattacatatgaggttttcttaatttttctatctataaccggatttgaacagtttacactatcatcattattaaataatattataatgaaaattcaaaaatcaatctaataaattactaaaaaaaatgttattaaaattttaacatcataacttatatactataaccatcaagttattatattaaactgtatctaaaaaataatattatatatacacatatattacatatatttattcttatatgaaaataaaataaaaatcaaaatgtaaaaattagtaactttataatatatataatgtggtgcgatttgaattacaattattaaattcaaaatcacaaaccgcacagtttagtaaacttacacaccacaactacagcataaaatatttcaaaccacatttctaatatggtgtgatgcagtgcaagcagtttgtacagtgtgaacagtttgacgaacacctgaaacacccctatgagtcatttgaagcattataatttgtgtatgacagttaaggtgtgacattgtaaaatagatgtattatttatttgctgtgaaccacaaccacaaccacaaaagataaaagttaaaaagaaatcggtgcctcttttcttgtgtacaacatattctccagtaaattattagtccttaaagaggtccccatagtcaacttttcacattaaccttttttctttttcagatcattttttaaacacattcattcataccccacaaaaaaaaaaaaaaaaccctttaagaaatggccagtaaaactactcactctactcactacaatctctctatagtctatatgccaaaacaaaatgggctcttcttctgggaacaatgataactttctccaagttgtgctcaagaactttgacattcttgctttgtatgtcttcaactaattacatttctcttctcttattataaggctcttacatgttattttgattctcattaatttgattaatttgcaggccattaatctctcttctttatcctctgtaagtgttaagtgttaatataattaatggcttcttttcttggtttgtttgttgataatatatatgcatatgatttttttggtgttattttaggcatgcttcaatcaaggccatagagactaagtctcgtagtgatgatcaacaatggcttacttattgggttctttattctatgattacactctttgagctcacttttgcaagactcatagaatggtgagctacctaatgttctactatatataaagactttctcataatattagctaattgtgtgtggtgtgttagtaagatgtcttaatttagtcattaaattaataatgtggaataaaaccttataataagaacgaatctatatagttctatgtagttagtacaacttataatatatcaacaactacatgagattttcatatatcaacttcatgtgttttatgtttatatataatgatgagataattttttaattacccttattattaaacatttttttgttctttgagatttcaaaatgtttgaagcatgcccctctcaagttaatttggagttttgggctaaaaaatctaattaagttttttttaatataaaaaaattatagttttatatatatagtagtaaaaatataaaatatagtattttaaaattataattaagctttttttcttaataaaattaactatagtatcttaaaaaaataaattaggtatttttattaaaaaataattatatttttaataaataatacaaattatgatattttaaaatataaatttaagaccttttttgtcaaaagattttttggctctaggtgggggtcttgggtgtggacctcatgatttgaagtgttccccctaaaaatttaaaatttcaagaacatcttaattaaaattaaaatacattgttattggacattagtagtgtctatcacttttagacatatcgtcttgcgattgttagcaatactctctaaaaatgattacattaaactatatgaaactcgatacaattagttagactaataacaatatta

SEQ ID NO: 24268 - DNA, 2920 bp, Cannabis sativa
gttcaatataaaaataaaaaagtaggtggcataaaaaaaaaaaatagtgttattattatttaagtaatactttttcttctgtaatatttatatctcaattatttaaagttgttgtcatcattgtatcttgcatgttgtcatcaccgtatcttacttgtagtcgtttcctactgttctcacaatgtatttctatatgcatatataatctgaattttttaattgtagttgagatatgttcacaattggtgtctggtgacatagctaatttgtttgaagctttttattcctccttgtaaaatagcaccatatattcacttcttttctctatattgcatccaaccttgaactatttgaggatatgagagagaatatgtgaggattatatatatataaatatacatagctaaagttttatatatagatattagaataaataaaatatttcacaaacaatataataaataataatgagatattagtaaaaaaataataaattaataatgaaagaagaagcactcacttgtattgtacattaattaattaaatgtcataatatacattctatatatctcactgagaaaaattaaaatatcacataatatatgaaaaaaataaatatatattctcttatatataatttaatatgcgtgaactatttgatgagtatgacttgcttgaaagaattggaaagaaattgtggaacttttttaatttatacaattagtgatgataagttaaaagtaatgtagaaaacgaatcgttgtaataagaatatacactgaaaaaaatataagcaaaaacactagaatcaatgaaagtagatgacattataaatatacctaagggtataaatcgatatatattagttttataagagatttacaatctaataagagttcaaagaatcaattagttatatttattgttaaatatatatatagtataaaaatataagaaaaacatgtgttgctcaataacataagaagtgtatttcaagccaaacacaagaaaaaataaggcagtgggaaaatataaattaagaaagagaagtctaaataacttaaaaacatccaaataaataaataatggatcagaagagttataaataaaattatatatattatgaattatatatatatgtacatttatctttagtgtatttaaaggttcgaagaagaaaaattaaaataaaaaatcaaattgagattatttagggtttatatttatatttatataataatgattaatttatgttaaatacttttataaaaaatatattaaaataataataaaatattaatttataaatttatgttctcagaaaatattataaaaaaaaaaattaaaacgattttagttaaaatattatgtcactgctttacttttatctttaatatatatacatagcgtacgtgttgtgttgaaacaagtgtggaaataattattttgatagacttaaatatgatatgatgtatatgatatatatgattgaatatcatgtcatcatataatataagatctcaaatacgatatgcataataaataatacatgtattatatatagaaagcagtacacgatatgtaatatataaacaaaattatatgtgaatcgaattcaacctgttattcattatatatatagtattatacgtacgtacataccgaaccagacaagtattaattgtttgacatcttatttattggtttcaaagcgataattaataatgcaaatgcaaatcaaactctgattctgatatgatatgataaattataacaggactggagtaactgatcatggtcagtacgtacgtaacagtcttgagtttatttatatatttctcctcctggtccacttactcattcactatatatgtcaaatatttatatatatatatatatatataaatattatcatgaatttatatatatataaattatatatataattgtacttttaattggtattatcatgaatttggccacataattattgttaaatatttattttagtgcagtaataaagataatttttaagaattttattcattttatcatatattctaaatactattgtataatgtgaaatttttggagaattacctcatgtgcatttattctttaagctttacaataatatgtaccaaatgaagtggtgaaaatttgaatcagttctaaaacgtgtacaagtttctctttaaagccttaattagtcactttcctataataaaacataaaataaacaaataaataaaataagtacatatacattaattaaattcattgtaagaaaataaaatttgtgttgtttgaaaaaatagaaattattaaggaaaagtaataataatgtgtaaatatttcttgagattgttgatcgtactatatttccattcaattatatgcccttttaatagtaagcatatttttgaagatagtatcaacaattgaattatttttattaaatcttgaagaattcaaatatatatataaatacactctggagttctcttgttacgcggctggaaaattaaaacgccaaattacacttaaaaataaatttataaagcaatttagagtaattttaaagtgctacatcattgttttttatacatattaataattaataattacctttgcaataatatcatccttcatgactaaacattggttgaacactcaaaaaagtatgtgtcatataccacattaaaaagcatattaatatttatctcaaaacaacttaattaataggatatatatagtcctcctcttctaactgcatgatgcaaaggaatttcaacatgacgacctaaaaatggttgagaaattagattaggaaaaccaaaaaattacacaaaaaattgaataccgacagttataaggcaacggaaaattagaaagagtaaataataatgtagcttaggat

SEQ ID NO: 24269 - DNA, 3854 bp, Cannabis sativa
aataattataaaaatatcaaaaattagtgctaattgcctttactaatccaaattactaaagcgatcattacactcagggacatgattcaaggcctagctagttcgaagactttagatcttgaactagactggtcaaggggatcaccattcgtggcatacataaatgccttgcccttgctcaaattcaaggtgccgatatggaagatgtataccggacgagaagacccattgtcgcacatcaaatacttagagatgcaacttgatctctagaaggttactggtgatgtgcgatgttgtacattcccagccactttgttagaaatagctccataatggtacttcaatttcaccccaggaagattcaactcttgggctgagttctctcaagaattttacagacaattcttgtcctcaagcttgtacaatcacaactagaatatcttgtcaaagtaaagcatagataaggagaacctttgaaggattacatccagaggttcatggctagcgctacaaaagtcaaaggccttactaaagaaggctgatataggaccatactggggggcatactcccattgagtgacttctagaaggatatccaaatgatctcgaccaaaaacaagaaagagttccatgatagagctgatggctttatcaaactcaaagaagccatatgacaggcctagacggggcatgtcaacaataggcagtcatgagacatccaacagtctcattacctaccaggcgcggaggcaaacatcaataactctgcccaaatctctagtggcaagaacactagaaacaaccgtaacaccaataactctaggaggaatagtggcaaaaagggaagtttaacacttctcctatgccacaaaaaaataaggaggtgaagtatacctacttcaccctcctcatggagaaaattgaggctatcttcatagccactcagggaacagtcccctacagaaagccctttcccatcaaaagggagttgagcaagagggacatgtgaaagttctatcaatttcacaacaaattcgacaatgaaaccattgagtgtcaaaatttgaatagggagattgaatgcctcattaggcgtaacaatggccacctacattgttatgtacaaaacaaccaaacttatgcacaaggtgcctaaaatagagatccaatgccaccacaagtggtaggacacttagggttcatcattggcggaccctaaattacggtgagaccatcgaagcaacaggtgctatgctcgaaaactccgtcataagcctaaaagcaacatccatgttgttgaagacaagggctctaagcaaccaaagcttacaaagcccacaatttctttcaaggaagaacacacaactcaagtcaatttcccacacaacgacccctggtcattgctgcacaaattgggaacatgaccatagcaagatgcatggtggagaatggagcctcctccaacattctttcaagtccacatatgaaaagatggggctcaaactcaatgacctgacaccctataactaggtgatgtatggcttctttggctaaggcattggacatgttgggtatatcagattacccctcacagttggagaaaatctaaccaccaaaactttgatggtgcagttcattgtaattaacgttccatcaaccttcaatgccatgataattcgatctgcccttaatgacctgaaggcggtaacacctttctacccctgatgccttaaattttcaacaaggcatggggtaggatacatgaggggagactaacagtctacccgtcactattacaacttggccttgtccaaagccaagaaagagaagatgcccaccaagggacaagaagacaagcccaacaaagggaaataaagtcgagcccaaagtgaggacactgacatagatccttactttggggatcctgtaggaagcttcagacctatagaagagttggaagatgtggaggttgatccctttttcccaacaagaagactgaagattgggaaaggtttaacaccaaaaattaaatcaacactgataagatttctaggggcaaacctggacctttctgcatggtcacatggagagatggtttgactcaacccctccatgatgacccatgcgctcaacatcgatctaaacatctgacctgtccaacaaaagaggatgttgctagacaaggatcgtgcccaagtgctcaaagatgatgtcgagaggctacgagcccatgacttcataactgaggcattctatccactatgggtgtccagcccagtaaggtgcccaaacccaacaaaaagtggagagtatgcatcgacttcaccaacctaaacaaagcatgtccaaaggactgctttccacttcccaaagcttgtagatgccatagatggccatgaaatcttgagtttcatggacacgtattcaagtttcaatcaaataaagatgcatccgccagaccaggagcacactagattcatgacggacttaagcctgtactgctacaaagccatgcccttcaggctgaaaaatgcaggggccacatatcaaaggctggtgaacatgatgttcaaagatctcattgtccgtaacatggaggtgtttgtagacgacatgtttgtcaagtccaaaaaggctaggggccatgtggaggacctagatgaatgcttcaaaatcctttggatctacatcatgaagcttaaccgtctagaaagcagaacgcaacaacagacacacttgcccgtctagaaagtagcaccattgtcgacaaggaaaatttggtgccaatacagttactagaggaacccaataatacaattccaaaagagtttgacatgttggatgacactccaacattcatgacacctattgcagcttaactccaaaccgaagccttgctaaaagataagaatgaagcaaaaaagataagaagaaaagctgctatgtatctaatcctagacggagtaatgtacagacggtgcttctccatgccactcctaaggtgtgtcaccaaggctgaagccaagcgactaatgatagaagtgcatgaaggcttctgtggtaaccataccagggggtaaagccaatccaataagatactccaatagagatacttttgcccaacaatgattgaggacttgatggactacgtcaaaagatgtgacaagttccaaagattctcaaaacttccaagagctccacccaatcagctcacaatgatgcaatctccttagcccttcgtagtataggggatatacataagtggtcaattcctaaagggaaaaagacaggtatagtttactgtagtcgcagtagactacttcaccaagtgggcagaagctgaacccctgaaaataatcacctccaaaaatgtccttgactttgttgtcaagaatatcatatgtcgattcgaacttccctaaaagattgcgtcagacaatggaaagcagtttgacaatgacatgttcagtgatttctacatcagacatggcatcactaaaagcttctctattgtggcccatcctcaagaaaatgggcatgtagaagctgtcaaaaaaaccctcaaggacaccctaaaaaagcaccttgaggaaaaaaaaggcaactgacctgaattgctcctagaggtcctatggttgcacaagatactgagaagatggccaccacgcaaactctattcgctctagcttatggctatgaggcgatgtttcctgtagagctggtgccagcatcttacaggagaacaacctatgaccaacaaacaaacaacatcctactagcgaaatcccttgataaagtagaagaaagaagttcaacctaaaactacacgcctactagcaaaaggtggcaaggca

SEQ ID NO: 24270 - DNA, 1407 bp, Cannabis sativa
aatttagaagttattcttatttataactggccaaaatcgggacttgatttgtttataacaaattagaggttattcttgaatagaatattattaaatagaggtttcactgtataatctattttaatataaaatgacccggaaagacttaagagatgtggttaatcttgtgttcaatttctaccttaacgatttttcacttttaacatataagtattttaagtttttaatattataatttagattgttttactataattttttatcattaaattatgtgttaataaaatttataagtctatcttgttgagaattttgaggattttcttttatgagtttattaatattattataaagcggctaattcatatttcattatcttcttttattgtgttgaacttaagcgtgttagttgctgtttttataattgtattgtctaaattttacgaagatagtctatcaaaaggacccttatcaaatgatggttcacaattttttgtgtagtttttaatttgactaagcatatcatttggttagacaagagggttacatctcgaaaattcatcagtgattattatgtccaaaaaaaaaatgtgtttttcttaatgaaaatttatggttgaatattattattatatttattggttatttattttccataattgttttaatgttgttggtgctaaggtgcatttatagccaataaggttgagaagggggccttcgaaattcgatgacttctcctgtccacaacagtttcattcttattcttctgcagctttgattgcaaagaagctaaaaccaaaatccacataaaagaaaaacagttaatatttgaatctggctatgtacacaaatactcataaataaattaattaatagaaaactatagatagaaattatatacatcgttttagtgtgacccaaatagcccatcttggtgatagtaaaaaagaacctttaacaagataaatttgtaagcaatttcagcaaaactttaactatgagaaaaaaattcaaagagaaactatatgacaaaaatgactatgccataacagtagagaaaggaaaccatggtgatcaatgttagaattcggaactttaatttaaaaagtaaagtgagaagtatgataattagaagattctatttcaaaattaattagcgatgagtataataatacagaatcttataaaaaatataagtttttacacctatgagatgtagtactctttatcaatattgttccttatttgttctgtgaccctacacttcttcaccaaatttctgagttactcaatcaagcctagatgaaaaaaaaaacttcttaacgggtaatacccattgatgggaactaaaaaaaattaataaggtaataatctaataatttttttatggcaagtttctaaaaa

SEQ ID NO: 24271 - DNA, 2846 bp, Cannabis sativa
ttttgtccataatcaccttcttgtggaatcgaccgcctgatctatactacaaccaccgctagtggaagtcacatttgggcgttaaacagtcacttactcttggattatctattagttcgtttgaatttgatggcttagcattgattttagttttttctctagaagatcttctttttgtaatgagattggctctttattagattatcttgctagtttattgtccaatttttttgaagcatgtctaatatatgttcttcatttggctaatgtggttatacatgaattagcaactcgcacactcataatagataacaaattagtttggatgaataatttttcatcattcctctataattctatgattgtatgaacctatcaatactaagcactatctgaaagcaactgaaacaaaagtctctaaggcttgtaaaggttaagccaatagagaagaacttcctttatttatagagagtgagtatagagaggagtaacaaactaaaagagagtacaattaagaaatacaatcgaattagttggacacttaggtacaaaacagtgacaagtaacataactaattaaccgtagaagttagttgcttgtcatcccccctcaagcggaacgttatgatgcacacttgaagcttggtttttaaatagttgaatctctctttagtggctttgtgagtatgtcagctgtttggtcaattgaaggcacaaaatgtacttcaagttcttccgccaatgtctgatcgcgtacgaaatgcagatctattttaatatgttttgatcaggcgtgaaacactggtttgcagcaagggatgtagccccttaattatcaacccagattataggagcatatggtaaagtgacgtgcaactcagacatagcatatcatagccatttcacctctgctgttgtgttggccaaagctctaaactcactctctgtgccgctcctggcaataatgttttgctttttggctgaccaggaaatgaaatttcccttagaaacactacataagcaccaatagagcgcctgtcatcaagggagcttgcccaatcaacatcagaatatgcatgaagacatagttgtagggcaagtctgagatgaattccttcatgtatcgtgcctttcaggtatcgaaataaccttttacatgcttcccaatgaactactgtgggagcatgactgaattgactaagcttgttcataatgaaagtaatgttaggtctagttagtgttaagtactacaaggcacctactgtactttgatacagggtatgatctgcaaatggttctcaattgtccaatgttaggacatgggcagagcttgtaggatttgaagtaggttggcttcttccatgttcagttttgtaaggagatctgttatgtatttagactgagataaacgcatgccagtggagttttaaagcacctaaactcctagaaagtagtgtagagatcccaaatctttaagagagaattctttgttgagttcttgtatgagttgactgatgctaatcatgttggggcctgtgatcaatatgtcgtcgacataaacaagcaaaattatgagatgggggcctgatccatagacaaacatagaggagtcagctcttgaagctttgaatcctttactgagaagtgtgttttttagtttctcgttctaggccctaggtgtctgttttaagcagtaaatagctttgttcagtttgcaaacataatttggtttcattttatcttcgaaccctggtggttgtttcatgaaaactgtctcagttaaggtgccattgagaaaggcgttagatacatccaactgagtaactttccattggtaggagatagcaagagtgaggataattcgaattgttgctggctttaccactggactgaaggtttcaaagtagcctatgctatgagtttgatgataacctttggccaccaacttggatttgcacttagaaggagtgtcatcagcatttagtttcaccctgtggacccacttgttgcctaccacatgcatatctggtctgtaaggtacaagagtccatgtgccattttgaactaaggcaaaaaattcttcagtcatagcaccatgccacttgggatcttctagagcttatttgagagaggttggttctttgggtagaagtgattctagtagagggtatttgatggtaagatatgctttgtatttatggatgccagacttggctctagtttgcatggagtgagtatcggttgttggttttagttgaagtggctagttttgaggtgtagtatttggtgggagtggggattagttctggaggaggcattgtatggttaggggtaggatgtggttgactgaggttgggggttgggttagggacagggttagatagctggtttttgggatgaggaggaggttgtctgaagtaacaagtaaggataggtgtagaaggtggccttatggtttgttggttgaggctaggtggtgggacaaaggttctatgactgacaccagtagaagtagagcagttggtagtaaccttatttggcatagtaggcaggtgaacaacagattgttcctcattgacgcaaggataagtagcattaggtgttgtattgaaagttgcagaagcaaaaatttgagaatgttgtgagtttacctgtggtgatgttgactttgattaggatggaaactcctcttcattgaacaccacattttgagcaacatagaccttgcctgtttggttttcacacaagtatcatttgtgttgaaatgagcatcccacgaaaatgcattttttagacttcatggtcattttgtgttgctggtatggcctgagatagggaaaataggtg

SEQ ID NO: 24272 - DNA, 2993 bp, Cannabis sativa
cccaaaagcatgtataatactagagctaaaaaaattcatacaagcatgtggtcgaggaagcgaagagcacgcaacctagtatcattccggaaaaatggagaacctacaagatccatcaaagaaagaatcaattaaatacatatctgacatcaataagacatgttccatcacatgctttccaaaaaaaaacgcgctccatcacatcaaatcccgaaaatgagcaagcttttaagttttgatacttgagacgactccattatcaattaaggtgtgtgtgtgtgtgacagagagagcatcgataataatttaaatatattatatttgtacacgacatgttccatccaccacactaattccaagtccaaactactagtacccatttagcatgatgaaaaaaccgagaaataagcaggctttagagtatattgatacttcggaatgaccccattataagattgaccttttacctgtaaaatccattgcagatggcctggaggactcatttgcagaaagcatcctttgcaagtcaggaaccaactctgatggaattgaggagaatgcttcgctggataagtaagtcaaggtgttcatgtactgcataagatggagcaaaagaatttacaattaacattgaatcaccaatacatagtaaaatagatctgcaagagcacttcctccatttacaaattaacaataacaagaggaagaggagagcgcttctagttgctaagcttaacagaagtataatgacactaaatagcaataccaaattgaattgaacatacgaaataatattaaggatcgtcatacagtctttaacaagaggacaatttaacaaaaccaagttgggtcaaactagttagactattgacatgacatcatatgaacaaaataaggggcatagccgcataggtatagctacaagagttatatttgtagaagactgaaaatttaaccaaaaattgtttgcagtaactagacagaaaactaaattaattttaatattttagtgcgcggtcaaatagagatttgtgagtaagtgaaagcaaggaatgtaaagctgataatacagttgaacattcaatattttgacagtaaatagaaagaaagtaaagtagataaattaccattttaacattattgtgacaatcaaataaagatctgtgagtaatcaagtggtaggcaaggcatgcaaaactgaatatatcagacgaccatcgaactatagacgatttgcttctaacaagttctggagcagtgtaatttagtgatggatgaagtggtagtaaagagtcttcaacatcgtattcctgtaaaatttgtgtcagatcaattcaagagagccacaaaagcctcgttcttataatgaagtcttgaattaaaatactgctcacaaaactgaaacttgacattagaaaaagaaagcaccatatgatcaaaaaatggaccttgtctaaaaaaaagcacacaatcccacagccttaaaacctttgaagttattgtgaaaagaactgtttgacaggctagaggaataattaaaacaaacacaagcattgaaaaataagaaagaataatttaaccataacaaaagcttattctaaaaaaaaaaaaaaaatcctacattccataaatttcaatggaggtttcactcacagcataatggaaagcctgagaactagctgcatcgcttgtggcctgatctgtggagattgcaaaaccaaatccagccagcttccaagctccacttgatgtaataagaacattctgaaacacatatacagcatcatgaactaaagtaatcactatattgtgctttcaaaaaaaaaaagtaatcagtattttgtgatctttagcaaaacctacaaagagagtgagcagccaaccagcaatgctatacacaaggaattagttcacaatctaatatttcaacacttttcacttagtaataagatagcttcagccacttgaagctaactcaagtggtcagaacgaagaaacagtgtgtttccgttttcaagtggtcagaagaatcagtgtgtttccgttttcaagtcctcagaaaagtatcttattggtaaaaaaaaatcgcaaaggaaatatagtagcagaagtgcagaaaaataacttgattgttatttgctgtagaatgtgcaacccgtgcatagatagcacaaaatagaaataaggtacaaataatcctgctgtacaatgtatcagagtgtttctatgcattccttgcgtgtatcttgataggattttttttttcacgagggtgtttttgtttctttgggttagtgtttcaataatccaaaaaaattagaaaaatggtataaaacaaagggaacaagttctaacctcgggtgatattgctcgatgtataagccgtgcattactatgtaaaaactccaaggattctgctatctggagcaacccatgcttcacctccaaaagccccataacctgaaaccaaactcttaaaaaattcaaacatatcaaaggacaccctacatataagattattaatattgagcataatgcatagactattgacagttcaggaacaataataattttgaaaacatataaaacaacacaaggttagcacaattctggttcagatccctaacccaaaaatccttttgtctctaatcagcattaccattcagtaacaaagacagctaaatttaacaccagctagctctcactgaagagaaattgagatagtccggcacctaccattcccttaagctccttaggcaccttggtcacattctccacattgccaagcgcattagcaacagacgcgaacaatggctcagtcaccattgccatggcattcttattctcatccagggcctgcaccacatggaccaccccagggtgcctaagccttacaaggcgagcggcatcggcccgaatgatctccagaaacgcatcctcggccgccttggagagaccagcgcggacgcgtgcctcagagagagctttcttgt

SEQ ID NO: 24273 - DNA, 1994 bp, Cannabis sativa
  modified_base (294)..(295): a, c, t, g, unknown or other
taattgatttataacaagcatatatattttcttaaaagttactgaggaattttgtgtggggcatgcaagtttcgttccaattgatagcagtgtttttatttggggacttttttatttttacattttaaaattattttattttattttatttttttgttattttgatgaaactctacatacaaattctatttgtaattagcgctgcaatttaaatcgcaacaaaaaattgtatagcaacccatatagaaactacaggagaaactaatttagaaatccaaactgtaaatttgaaannaaaaataataaaaaaataatatatgggagtaattctccttttatttattatatttgaagaaattataatttgaatcttttatatgaaattgtagtatattatagttatttatggactaactctcactaattttaaaaaataattgaattatataccattctaaaaataaaataatttattttaagcttttattgtatagaataatatgtaaaataacattttatattttaaacattgtaaatttgttgaaaatttcataaatttgtgaggccacctaaaaaaaatatattatttgaggtttattttatatgcgtaaaatttattattttaacatttattttagagatgattaattatttaaaatttcataaaagttgattaaatgcttattttaaccacattctatatttattgtaatatatacataaaaagacagaaattcttcaaatatcaaaaataaattatttgcaccgataaaagacatgcatgccccacgaaagattttttctaaataagtatgatcattaattagatatttattactattattattagtagaccaccacggagctttatttgtacttccaaaaattataaaaacactatatttttattatttttattttatataatatatatttaatatatactagttttttcacccttctcatattcttaaataatatacttataaaataaaaaataaaaatatattttaaaaattaagataaaaaattaaaagaaaaaatttaaaataaatatacatgattttaaaaatttatatgaaaaaaaatactaaaataattattgataattaaaaaaataatatgaactttttgtaaaaattattaaaagtgattttacaaaattaacttaagttaatcttttttaaagattttctaggatatctctatgtatagcttgtaaatactactcctatataaagagcaagatacacatacttaagggggcggagccagaataaaattgtaggggggccaatattaaatgttgtatacaacaattgtgaattttttgtaattttttttttaagtggtgcctcaattgaaaaaatatcatatttatatatattaatactttataagttattcttaaaaaaaatatagaaccaataaaaaataaaatatgagtggtgatataatttgttcaagactcaaattaatactaccagtatttatttgtaatttcttaaaagaatatatatagatatatgtatttttaatagatattactcttgaacgggtaaattttagtttttaagtttaatttttctatctaattagttcaatctcttatttttacattatatgagttggagttgttttattggctgaaaaaattttaaaaaaaaaatcagcaaaaaaaagattaaaaaaaaaactaaatttgacttaaatattttgtatataaacatattttttatatagtgtaaaaaaaatatattttgagggaattaccccatatactatttttttaactttttttcttaaaaaaatttacggtttggatttctaaagtagtttctgcggtagtttctatgtgagttgctatacgatttttagttgtgatttaggttgaatattcgctagctgcaataggaatttctatatagaattctgtaaaaaaaaatgaaaaaaaaaattattttgaaatgtaaaaataaaaaaacccctatatt

SEQ ID NO: 24274 - DNA, 2932 bp, Cannabis sativa
  modified_base (26)..(42): a, c, t, g, unknown or other
aacacagggtccaattggtaactttnnnnnnnnnnnnnnnnnaaaatggtatttaccctaattataatcacataaagaacaacaatagataaattataatcacaacaacaattaaacaaggtagaatcacaatgatattggattaattaataaaactaaactttgcattaaatcataaaattaaaatcataattagaaatctgtctaatcctaacaactaaaaaaaactagtcaaaaataatatgatttattatttcagtttatttaaaattgaaacataaaagggatataaaaaaaaaaagatagaactagtgaaaaatcttcaatgtcgcttcaatctgcttcattgatcactcaatattgtttccttacttccaaattgtatttttctctctcccaactcttatttttgtcattctaggctttttatacgtccaaaatcgattccaagttgaattagagtcaaaaatgtatttagatttagatgtgtttctagaaagagtgattagaacaaaggaatctctctcatggtttactgattaaaaaatgttaaaaggcaccttaatataccaagcaccacaaggttagtgcaattaaatattgactctcacacattttaatttaataaataataaaaaatcgctaatcagacgtaataacacgctaaatcagtgtggtgttgagcgccttaaagtgtccaataacaattctcttactaattaggcattttcaagtgatcctaaatcaaaatgtccaagtttttcttagtttcaagtttagttgtaaagaaaatgttcaatcaatattgttttattctttaacttcaagttgttattataatgcttgagattatcaggccagttgaacatgtattatttaagctcatataggagagctacaaatggattgcttacccaacttgttcagctaatagcagagaagaaattgaagaggtagaggaaacaaatgaaagctgatgagctctacacaaacatgatgcatagtaaaagagcactgctttggttagtgatattgcttaaacgttattttttaaaattatatgggacccgatacttaattgcaccaacctaaaaagttacactagtagtgttttatagcaattttcatagtaaaatgatcatatctccctacattctctcacccataaataactttgattagcaaacatacatgatttcacaaatgtagattgcatgtaggtctatatcattattagtagtacgtacacctagtacaggtcaaatattttgacaaaagtgttatataaggcttccaaagtgaagcccctgaaagcaatttgtaccttataaatatatagcatccatatctgttaagtagatttgttatcctatgtcatgaataatttattgaatttcataatgaagagaaatgtttatatataaatatgtatatatttaatggctgaattaatgatttccttgatgggaaattgataaaattgatatatagtggatttgtaatgaaagtgagtgtgaaatttagtgtgcatgcgcatataatgcagtgtgggtggccttgtgtataactgataaaagtgggttgagttttttgatatgcatatattttgattggaacataaataataaatatgttatagcaattaattgtgaaattataaagtgaaaatgtaatgatcatacgaaaagaaaatgtattgtacaattgacagatccggtgaaactgaaaagtcccaatctcccaatttggtttttcataaatagtcgttacatgacaacatatatattgatatgatagataattatctttcactttattttaaggtgtaatatttagacaacaaagtgactaaatttcactttcaactaagatgtaatacaggctttttttaaaaaaaaaaaaaaaaaaaatctaaagatgtaatattatagtggtaaatatcattttggattttttgttttacaaaattagtcgattggactctttgttttgttaaataacaaattttatatttttttcatatagtacaaaatagatcatgaattcaattttttataatataatcaacctgaagttaatttctagtatacagtgacggactcataatttttctttgtggaggctttttattattaaaaatatatatttatacatatattataattattcttattagatttatttattttgtgggagtttttctactattttagtctataattaacaaattaaaaaaattaaatttaatcttttaaaaggctatatttttgttagtgggggctatagcccccatattaatacaagtgagtccgtccttgctagcatagaccgatgcaaaaaatataatcagttttgtcataacacatttaagtcatattattattaagttttaatttaacaaaaagtaactaaagatttattttgtacaattttaaaaaatacaagatttaaattatcatataacaaaataaaatgttcaatcaataacttttgaaaacaagactcaaaatagcatttacgcaaaaattctcaagttgttctattagagaagtatttctttcccatgctaataaaatatgacaatattttattgaggaaattacattgtatacccactttaatttacttgttttaatacctctattttcatatttttttagatatacccacttttatggatgatattcccattagaccccttaggttatgtaaatttactaaattatatactagacttaagtaaagagtaagggtatattaagcaatccactcaaaaaagaggatattttttattaatgaatataaaaaagaggtatttttcaacttatccctattttatttagggtatgatactctataagcagaatgatattaattagggctaaaatatgggaaaaattattaaggttatgataaatatggcataaaaagt

SEQ ID NO: 24275 - DNA, 3800 bp, Cannabis sativa
ataattatttaaaagtattaaaaaaattagataattttatataaatcttaatttaaatttaaattcgacgttaatttaattaattaatcatattttataacaaatttattagctatattgtttaaaatatctaaacttatttacttattatattgtttaataaaattaattaggtatttttttattaataaatttaaaattaaattaaattttatatatttaaaaaatataattgaattatattaaatttaaatttttattattatttaaattaataattaattaataatacaaagatgcatgtgttactaatactgtatatattttaaagggtgatatgacatgatttagttccattctgatcctatcaattcattagatctcataattctaattcctattcctttatatattattcctatatatctcattattatatttatactttcacttgagttaatttgtaaaaaaaaatgtcaactggatagcagacatgcatggtttcttcaatgcaatttttggagatattaatggaattgactaaataaagaaatccttttattataaagttataatatattatttattaaaaagaaagttatattattaagaataaaaataatgtatatatatagttatatgtgttttaacacttgttaaagaatatatattcttacatcaatatatatatataaattaatgatttttttaatgataacacacatgtatgataagtactattcaattatgaactatatatttgtaatgattaaaactaattaattaaagaatattcttacatcaatatctaaaaactagttattgagttttattatgataaagacacatgcatggtaactatttaaaaatattaaaagaaaggtatgttatgtgtgttaaaaatactactaaaaatataacaacaactttctagctagtgaatatatatattttttaatattattaaatgtaatttttaaccacaacaaaaagttaattctcattaataaaatattatcttgatacaatacttactaatttaatttttgtaacaattttttactttgtaaactttttagtaatagcaagagtttatagtttccaaaaaataaacttattaccaaaaagtttttagcaacaacaaatattttcaatatttttgtgacaaactttttagtttcataaaaaaacaaacttttagtaataacacatatataggcttaatgtttttctttttagtcacaatttttttttactaaaagtaattttttttagtgaataaccaatttagaataatgttatataataacataccttaatgaaggagtatgatcaagtctaatgattttgacattattgttaccataatcttccaagctcaattcataaaggtcttttgggtcatttggtaaatccaccctccatttcctaatagatgccacaagtaccatacccatctttgttaaaggacttcccataggcaattttagcctataaaattttgtaccaaataacaaaataagaactgagaaaccaagtcccacagttggaattccatagccaagtgaccaaccaacattgtcttgtatgtaaaccaaaaatgtacttgaaaataagacaccaactaagatacttgacatccaccaattgaagaatgagagcttttgtgtcttctctttcgactcgaaaacatcgaattgatcggcccccatggtggaaatgttggatcttgtacctccattccctattgctattatgtatagtgataaatagaacatacccacttggaaaaatgaggcttttgggcaattttcttctttgagtagtttttggttactacatgatggtggtcttagagattgtagtgaaactgctaaggttagtagtatcattccctgttgttcaatcaactcaattagtacattattgataatgcttagttaattaaatatcaaaagaaaagaagagtaaattatgttttgggaatatggtcaaaacaaaagttaaaaatttatagaaaaaacaatataaggtaactggttactggttacccgaggtaaccgaccctaaaaggtaactagttagcccctttttaatgttttcataaattttttcctataataacttttggaaaaaaagccatatttttacacatgtacattatataaaaattcatagaatttgcaaaattatcatgaatttaaaactaattaatcaatagtagaataagaaattaagtatatattaccaagagaatgattgatgaagctatgacacttgtccaatatctaccaagatatgaatctgcaatataagctcctaataagggtgtgagccacatagtaccaatccaattggtcacactatttgaagctcttacagtcccttcatgaagctctcttgttaagtacaacactagattagcttgaaccccaacaattgctaatctctcaaacatctcataccctaattaagtacaaaaaccaattaattaattcatataataaaaaaataataaaaaaaataacattatatatatatttatgtacaacactagattagctaattgaaaccccaaattgctatatattgatctctcaaacatctcatatcctaaattataattattaagtacaaaccaattaattcattcatataataaaaaaaatttaaaaaatgtattaatatatatttatgtatacaacaccaaataatgagcttgaacccccacaatctaatttctcaaacatctcatacctaattataattaatttatataataaaaacaattacaaaattaatatatataaatttatgtgcaacactagattggcttgaaattccccacaattgctaatgatctctcaaacatctcatgccctaattataattcaactaattaaatattcatataatgaaaaaaattaattttttattaatatatataatttatgtacaactacaacactatattagcttgaaaccccacttttgctaatctctcaaacatctcatatcctaaattataagtcaactaattaaatattcatataataaaaaaattagaaaaatattattaatatatattttatatatatttatgctacctacctagaatgaaaaagcaagctctccattttccagttttggatcttaaaacaggtcttcctttgagatccacagacccatcttgtgtataatctccttcaattacttgtcccataatatataataattctctttttgatcttatattattattattttttttctatattaagcttaaattattattaagttttctaagcatatatatatatgtttatgtagatatatagtactgttttttgttgtatgtatttgaatttgaaacagtagtagtaataatgattatgattctagctaatatataataaaacttatattctagttttgtataattgcatgtatgacccattagagtggacttttattaatggtagctagctagatagcaataatatatatacatacatatatgtgaatatatattagaatttgtacaacatttatttgtgggtgttactgttgatatatacatttgcacatttattttctgacacatgggattttattctctacactatatacatatatatctatatattatatttataggccatggattcaattcctcaccattttttcttagaccggtcactcacttaatataactcatttatttagtaaattagacttccaggaactaacttattgtgacagtcagtagtcccatgatccgtaaggggaaacaccgggta

SEQ ID NO: 24276 - DNA, 1797 bp, Cannabis sativa
tcattatatcgttatatatttgggggcttttctagagagagggtagtcgtcagaagagagagagagagagagagtgaccttgaagggaagaccaaataggatttagggctagggtttttgagtacagtttgctttgtatttttctgcaatggaagagattacggatggcgtcaacaacatgaatgtcgcagattctcaaaagaggaaccgtattcaggtctccaatacaaagaagcctcttttcttctacgtcaatttggcaaaggtaaaaccctaaacctcaccctggttttttaattcttcatatactcatcaagtttgatttgatttagggtttaggattaacaagtgtttcacattttgtttccaattttcagagatacatgcaacaatacaatgaggtcgagctctcagccttaggaatgggtatggatatcttaaaactaattgctctgtatttttctttttatataatttttaccagtgttggaaatattatcgattatgtggctgaatccaaataagctcaccttgccaatctcaggtcactaattttttggattgaaaaaagttatttgttaacttgaacaacttgtacctacaagctaatgtgacttttgattacttttttaattgatattgtaccaaacttttttgtgtgaagtactatgaaaccttcttaggagctgttaggtaagcctaaaatctgtgatggtcttgactagatattacctgagtacagtccattaaatttgtactagttattactttcaatagaaaggtaaagatggatgggtttttatgacaaataccaagtatggaagatattatagtttattcttttcttggtgttattccgtcttttatttttctatatggctttgaccttggtctgggctgtgtcctaccatgtttgttgttactattttttggattttgaatgaagaaatttcttattacaaaccagaaaagtaaaggtaagagaataatagggatggttttttaatgattctgactgtagaaaaattatataatggaaaggtggtaaatggattgaaccttgtattttctgtttataggtgatttgcggtttatatgtttctgtatatgctattgttttgttagttgctatactttatgtgttttaatttgtttctggttgtaccattgcagctattgctaccgtcgtaacaattgcagaaatcctaaagaacaatgggctggctcttgagaagagtgagactaaaacttcaattttgctcttgctagttatttgaaagaaatgcttttttaagatctcaatttttatgtattcttaaaatcattgcagagattatgacatcgactgttgatataaaggatgattctagagggagacctgtccaaaaagccaaggtgatctttcttgcaaaaccctggagccttttggctacttgagaagtgttcttaatatttgatgtcagttatactaatagtacatttgtggcattctaacttggtttttcactccttactagattgagatattgcttgggaaaacagcaaatttcgatgaattgatggctgctgcccaagaggagaaggaagctagagaggccgccgaggagcagagctgatcaaagatgtgacctcataggaccacaccctttcacattatgcgttctagatcgattaattctctttttttttttttgccatttgtatcatccagcttagattacgttgctactaccttacaccctagtgtacttttcaccatattggaactactttttatttaggggctttttcattttt

SEQ ID NO: 24277 - DNA, 3888 bp, Cannabis sativa
  modified_base (1050)..(1052): a, c, t, g, unknown or other
agtttgtgcttccaagaatttatatgtgctgttgaggacactgcaattgcattacaacggttcaagtcataacaattgcagcagatttcactctcccaagttacaaatacactcacgactcacatgcgaaacattatgagtcaatttcatttgacattgttcatttttccttctttcttcttttgtaggtaaattgatatttattcaataatgctaaagtagaaatagtcaaatagatgtacgagtcttttttcttcaaaccatatcagcattaaacttattctccttatgagttataaagcaacaagaactaccatcactgctgcgcgcaatgtccattgtccaggtttctcagactcgacctacaacgagtcaattaagaatcacaaaatattggatccatttttgtgtacacttttctagtgaggtacaaaaatattgggtatatttttttttttccttaacctttaatattaatattattatagcttttagtatgaaagatactatgttttattagagaacatacttatttgtgtgggcttttatgttattggaatgggaaaatggtaatgttatagtagtacaattacacaatttttgttgtgtgttaaggctgcaatatagcctatatagtctctgtgttgtcactccttgcacaatcagcggttgggttcttggaaaagttgtatggtctctcatcaaaataatctagttggatataaaactgtttttgagttctaaagcttatctaataatatagttggatataaacactttaagtatagtctctcatcaaaataatctatttttaaccctttgtttcgaacctatgctcaattctttttctaataatttttttattcatttaatgttaattagatttatcacttacctgggaagtgggaacaatccgtgccttcctatgctattgtttattaaaatttgagtaatttgcggcataaataccaaaatttaatcccagttgaaaataaatacctaaatttattttttggcggtaataatacctaagttatatttttggaactnnntaggtacctaaccgttaaatattatgtcattatccacgtgttattttcttattggtatatttaacttattttttttttaaaaataaaaatttaatgacttgtaccaatcagaaattgccacgtggcaatttacttaataattaacagtcaggtacctacaaaagtttcagaattataacttaggtattatttccgccaaaaattaaacttaggtatttatttacaactggaagttaaacttaagtatttatgttgcaaattactcttaaaattttaaattttgtataatatatattttgtttaagagcgttgcattaggtaccaattgtccttagcaccatcagaagtggagctttgagatacttcataaaaatattatattaaattatatgagatccgatacttaataatactaatagcgttattgcaccttagaggagactagacactactagtgccatttagcatttaaattttatcaaatttcaaatttaatatatattatatatttttctaaaaaaaataacatgacaaattattccaccaaattttgttaaaaattaatattcaaaaaataattataataattaatttatcgtgcttaatggactaattcaaatgaatcagatagtagtatatgttaaagagcaaattatcaggagagaaatttaatctgatgattgcatacttaaactagtatatacttttgtgaaaaaaatactctgtgtttgcctagaatttaacctgatgacatggataacacttttgacacgtggcaagaagaaaacaatcttaggccccagtcactcggctaatggtggttaatttgggcattgaaaactgtgtcagtgttctggttgacagtagtgggcactcaagtagacactaagatccaatgaaggcatttctagctgtaatctttcgacaaagttcaagtgaacaggtcctagtgactctaaaacgatgaaccatgaggctaatgatgtcacgtggacatcctagggcttaactggggtccaacatcagttcgttgggcgcccaggggacatcctgtgcaccgtctcgcattagattttgttcccatcaactttttatgggcaatctacttagccattatcctaacatacatgagagacatgccccaaccaagtttcagactttagagatgagtctacatgtaatggtacttgggcacctggaagccctaatgggtgcccaggttaacatatagtcgatctgggcgcaccgtgactagagtttaggtttttagggacatacttggaccccaatttttcaaatccattaaggaacattgaaaggacatggtatttcatcaatgacatttcaaaggagcccatataaaattatgggcgccgaggttgacatttcaaccttggcaccaatttcattttaccaaggtttgccagtgaaaatttaacaaaactaaaatttgttgagcacttttcatctaaaataagattgaacatcaacaaaaccaatttcaaagatgtaaaaccctacatgggaaaacagttcatgcccctaggccatagtgggtgcccaagttgacgtatctccatcgagggcactctaggacttttttctagagaaattgcctgcgtatttcccttattttcatccacgaggaagatacaagtgctttcgagaaggaaaaaaatccatctagcccccaaatgaaaagctaggcacctaggttgacatcaccctagtcactgggtgcctaggttgacgtagccacacttctggtggtttcatcaatctgattgcgattctatctcaggaatttttcttgttttgctctaaaatcaagatatgagacttggaattaggagaaaatatcgttcgagttgcaagttaagcccccaagcatcaccaggcgctagtgtggaagcacattaggtgcctaggtcgacattggtctggggctcagtgttctgtccttcaaataacaattttcttcaggcatcagtcttattttgcccttaaaataagattggaacaccatgaacacaagaaatgttgcagctaccagtctcagtaacacttaagaaaaaggctagcttatgaactaattgatttgttgctgacaaatacagctttgctgtagcattattgtgtagcattatttgcccaaaagtacatattagggggattagtaactctagctttgcacctatcttgatctatcattaccttatttgtttaatattatttaaagtttatttacattcatttcttttcaattatcaaaaaaactcaaactctaaattatttgtgttttacattgtattgctttcatgtcaaatttttaagtgtttaatttttgcaatactttctcgaacaatccttgaggtgaaaataatattactttcattatattattttctagcaattgtgtacacttgcacatcataagaaattcacaacccttcgcatctgcaccataaatggcgagggacatgttcagatccgcttgccaaatggactaagcaacagtctcgaaggcataatataagcctatctctgcctctttcatttgcaatccggcgttgtcttgctcatcaagagcctcctccaattcagtcttcaactccctatttttaagagtcaaggtctgttccaccgctaaggcacgatctcgctctacaattgcagtccaaacatcctcttcaagagaccttatttggataagtttaaagtcaatgtcttcttgaattgccttaaactaattgtgcagatttcaaattctcccccgtttccttgtatttgccttaataggtgatcattttataatgggcttcgaagtgcttgattt

SEQ ID NO: 24278 - DNA, 2022 bp, Cannabis sativa
ttaaataacatacttgttagtaaatctaagatcttggtaaaataattccaacacctatgtggttttcctggtgacagcgttgcgagcttgggcatcatcgagcttccattgactatgggagaaccacccttatcagcgacacaaatgcatgaatttttggttgttaacatcccttctttttataatgtgctaatgggttgaccaaccctaattgtactgggggcagtaagttcaataaaacacttatccttgaaatttccaacatagtcaggggtgggagtactcagatgcgaccagttattggctcgagaatgttatcatatagaacttttgaataggagagccagtcaccaattaatggtaatcctaattgagaaaaatgagagggaagcaaaagatttggatccaagatgaaaataaccagttcaaaccgattgaagagttggaagaagttattttagattcaaataatccaaaaaaatgtgtttacattaagaaaaatttggagaaagaactaaactaacaattaattgtttttctaaaggaaaactaggatcaattcgcttggagccactcagatatggtagaaataaatccaaaggtaatttgtcatcatttgaatatcaaccccaactatctagcaaagcgacaaaaacgacgaccattagattttgagagacaaggcgcactcaaagaagaagttgacaatttgttaactaatgactttatacctgaggccttttatccctcgtggatttcaagttcagttcttgtcccaaaactaaacgacacttggagaacttgtatagatttttcagatttgaacaaggcatgtcccaaagattgttttccactacccaggatcgactagttagtgggtgtaatagcaggacacgatttgatgacttttatggatgcatactctagatataactagataaaaatgcatgtccctgattaagagcatacgagctttgtaacaaacatggaactttattgctataaagtcatgccatttggattaaaaaatacttgagcgacacaccagcgtcttgtgaatggtatgttcgagaataagattggacggaatatggaggtcaatgtcaacgatatgctggtaaagtcgataaaaagtaaagatcacacaaaggacctcgcagaatgctttgatatactcaagaagtacgacatgaagcttaagccaaagaaaagttcttttggggttttttcaagaaaatctctgggcttcatagtgaatgcaagaggaattgaacccaaccttgaaaaaataaaggccttaatcgagatgccctcgccaacaaagccaaacgaagttcaggctttgacaggaagaatggcagcacttaacagattcattttgaagtcaacagataaatgccttccattttttaatgttttgcgaggcaataagaaattcgaatggacaaaagaatgcgaggaagcatttaagggcacaaagaagcatttgtcaacacccctgttttggccaaaccaacaactggagaaactttatacctttatctaattgtctcagagcatgccattagtacaattttagtgcgagaagagcgtaagcactaacaacctatttactatgtcagtaaaaggttactaagggtagagtcgagatacccacctctggaaaaacttgtactatgcttaattcatgcatctcgcaagttacgaccatatttctagacacatccaattaaagtcttaacaaagcagccattaagataagttttatcaaaacctaatgcttcaggaagattgataaaatagtcgattgagttggaacaatttgacataacttacaacctgagagtgtcaatcaaaagacaagctttggctgattttctaatagaaggaatatactcagaagaagaccctgattttgagcgtgagacagaaacatggaaactattgtggatggggcttcaaatgagaatggctcggggcaggagttataatgatgtcgctagataacttcaagttccacta

SEQ ID NO: 24279 - DNA, 1932 bp, Cannabis sativa
  modified_base (390)..(400): a, c, t, g, unknown or other
tctcccataaatgagtattaatcttttttgtaacaactatattatcatagttttgaatttcttaaatcaaattgtgtaataacccttttattacactagtgtgatcaacacaagagttacaggtgacaacaaatcgtaactcctctccaagttacaacatgtaggttaaaatcataagttacacatttatttaccatacacttagcactacaaaaaatcttacttttaatgacaacaaaactaattgtgactaaaagtaaaaaaattgtgactaattataaattactattcctatatgttgtgactaaaaggtccgtggttaaaagtattagtcacaaaaattaaaatttgttgtgactatatgtatttttagtcacaatacttgttgtnnnnnnnnnnnaattagtgacaacttgtaactataaatactatgttttagtcataagtaatactttgttgcgactaaaaattacatttagtcataaaaaaattatgttgtaactaaaaaattgtcactaatatacttattatattataaaataatataacatatacaatgtgaaaaaagagaaaatcctccccttatttttggtacgaaaattgttgatttggaggcgtgtaacatacattaatcattagtattaattatgtgtaaagacgtcaccaaaagatgttcatgcatgcatgcatgcatatataattaagcatgttgaagattatatgtataagaagttaacaagagtcgggtagatttgaaagtcggcagatttgaggccctaattataaattaagctctgtggagtacttgaaatgagtaaggtagtacacttgtctattcatcatatcataaagatcatatattatagtgattaccctttaaccctaaacttgacaaaaggacaaagtaaattaataatattaattaagttgaaattcaaagattgtgactaatacacatttttcacaatcacaatcacaatcacaatcatactcacaaatcccttcaaatcataaaagagatgcacgtatgtatttatatttcgttggaaacatctatatatatataatactaatatttatttttataataagggattcattcatctgtaacttattttccaaggagaataataatgcagctacctactatagtaacttgggaaaggttgtgtcaaatcgtttcttttctaaccccacgtccttctcatcacccctattcaaaataaataaataaataaataaaatattttgaaattgatctttcggagtggccattttaatatctggtctttcaacaagagcaataatttagatgtagaatataataaccttcgactacagtcccttaaattatatgaatttaacgaagtagtccttaaattataaaatttaataattaaaattatagcaatataactgaaattataacattatatattctagagcattgatttttttttaaaaaaaaagttctagagcattgatctttagctattttcaaataacttgcagctaaaagagttgcacatttctaattttaaatgggtttcagctcataataaaattctaacaaatctctataaaaccctaatgaaatacaactgcctcagttgtaaggaaacccgaaaaactctaaagaaattctcttcactacaaaaaatagttatttttagtgataactatttagtcacaacataaattttttgtaactaaatgtgacttttagtcacaataaaaaattacttataactaaaacatcgtaattagatacaagttgtcactaatttagttttagtcacaacaagcattgtgactaaaaatatatttaggctcaataaattgtatttcttgtgactaatacttctaaccacggaccttttagtcacaacataggaatggtaatttatcattagtcacaacttctttactttt

SEQ ID NO: 24280 - DNA, 3341 bp, Cannabis sativa
  modified_base (776)..(781): a, c, t, g, unknown or other
  modified_base (2400)..(2402): a, c, t, g, unknown or other
ttcgatgcagatatccgcaaactgtccaggaacctcctcgaactaggatagctcatcgtctaaccaaatgacgtgcttgtcaaaccatgaactgctaaagtaagcgagcaacatgagataaattgtccctatagatatatatatatatataaaagttattcatttagtcaaattcacactattttactcagggtcgaccctaggcataggcgggctaggccaaaaaaaaatatttatctttaaaaatataatttttaagaatatcatttatctttatagtaaggacccagaaaaattattttgcctatgacttatttcaactcagggtcggccctgatttttctttatagtgtatatgattcgcgctaagtgcagtcttttttttacatttttacgaaaattcacatataacaaccaacggagcaacctaaattgcaactcaaatttatatagcaactcacataaaaacactggagcaacccaaaccgtaaaaatattaatttcgattttgctatgtattgagcaaaccaaataatctttatttggcaggtattgaagactatattgtgatcttggtcctttttggaaagtttctcgttctggtgtagcagaatctgaacttgatgctgcaaatcaaagatttttttaaaaaagtcttgtacagctttgaaagcgtgtttgtgactatctctagggtttttatgttacctagagagcacccaaacgcttctcacttcttctagtttcattttttatattttcatctttgtgaggannnnnntcatttgtaaaaacctagagtgtttagctaggtttttaatttttttttttaaaaaaaatatttacatggaccaattatattgtgccacgtgtacactgggtccacgttagctgaactgaactgagccacgttggcaaataacggagtcaagggaacaaaagtgtatttttgctaacagaatgctggtttgggaattaattgcaattaaaatgaaactattgagggttttaccgcaatcaaccctttgaaaatttaattcatatgttacaagtctatttcatattgtaactcctctatgttacaactttttgtgatttattacactatatataatgtaacattttttatatcaatgtgtaatttacatcatatatattttttactcaataatatatttatatatcacaatttaattttaatattatattatttatttaatttataaataatataacacaattgtacaagtgtatattttatatttttcaatccaattcaacagtacacatgagaattcacagtttgcagatttgattagatttaattgtatgaattagattgaattagatattgtacatagagtcgtatcgtatgttagaccttttgtttaagcttacattaatttttataggttttaataaaatataagttgattggatagttctctaatgtattagcctatatttttagtgaaaaatagttaatgagcttagaatctatgtgtgtaaagtctggttaaagtagaagtgtagatttttttagttaactgaagtattttgatgagtaagtccaatccaactagggttatgtaattaagtctcctttccaactatatacatacatattatctcatcataattgtatactttttgataatcagataaaataaaaatatttctgatttagagatctaagaaagaagagttagttgatagtattacactatcgaattgagataattactataaatcaataaaatatgtatacattgaataattattattgtgttttagattatatacaaatttgtatattgagttttcttgattttctaacatggtagggtcttgaagatgacaaaataaataatataaaactatttggaagatgccaatctagttgtatcttcacaatggacaaaactatgtaaagacatttgtgggcaatgtagatttacattactaaatttttgttacttagacttccaaaattcattagtgggaaatgtggcattttcttttcttttttctttttcctttctatattgttaagtaaaacaaaatcatacagaaatataggaaggagtgtggaaagagaggaagaattaaaatatttcatttggcaagaataagaggagaaagagaccaataaatggagtaaaagaaaatttcatcataccccaactctcaaagattataaatttgaattctacctccaccaatgtaaaaaaaaacaaaatctatattttctaaatcttccttgtactattattaaattaactgaaaattatattagttaggatcgttactttaggaacattttttgttgtttttattatattataacttaatttattttttatacaacttatcatttcatatactatttttttaactttnnnttttttaaaaaaaattacaattttaatttttaaaatggtttctccggtagtttctatgtgggttgcttttggttgcaatttaagttactccgctagttgcaattggagttttatgtagaatttcgaaaaaatacaaaaaaaaaaaaaaaaacggttttgaaatgtaaaaatgaaaaaattcctatattattttattacaagatagttgctcttcaaaaattataaataattttagtaccaaaaattaaaatataatttaaacagtaaattacatgattaatattttcacagatacaacttactattttatttttaactatacataccattatatattaaataaaattataattttatgttgtgatgaaagttcataactattcacgcaaaagctgtagcattaataataacgttaaattgattattgagactgagttttttcttttaattatattaagttaaatcgtttaaatttaattttttgcatattttataagattctcattttgtaatgattaggctttttgtattttgggtttttgtgaaacgctcctaattcaagtttgtcatacgattagagtaaaaaaaatgtgtccgagaatatttttaatataattagaaaaatgagcatagaaaatcttacattgtgttatttccattacttttactacactatacaacaatcagcttattcataaaaagaatacaacgatgagcttgggtaaataggttttggtggtttaattcacaaacaacaattttttgggggggaattttcaaaaatactattatttttatattttatttataattttaacctaaatttttaattacaaaaatattcttgtaaaattttaagattacaaaagtacactttacctagcaaaagttaaaaaataatgagaaatcaacctcacaacaattataattcgggtaaat

SEQ ID NO: 24281 - DNA, 4888 bp, Cannabis sativa
  modified_base (89)..(90): a, c, t, g, unknown or other
aagatgaatgggctactcctcccattgccaattggttttgagatgaaaccacattaatcttatccctaaattctaacatggtatcaganncacttgtgatccgttgtgagcctaaagtgccaccgatccaaaaagccacttgttatccgttgtgagccaaagtgctgccagtccaaaaaagatacttccgctgtctccccttgaacctccatttgggaccttctggccaatgtgtgccaatttccagtgttggagtctttggcctgtttcaaaatccacaaatttcccgacgtacatccataaatttcccaatatttggccttaagggattctttcaaatgtcatgtttggtcctgtggtctcttaaaggtcgttcgttatacccacactttccaggcccaaacgtgaggagggtgtattaagatttagtcccacattgctaatgtgtggaaataaaatgtgatatataagatgaatgggctactcctctcattgctaattggttttaagatggatcaagacttcccaaacattgtagaattcgtaataggaatgataagcctaaatttttttggatgcctaaggctcaaggaaaaatagttgagattactaatgaggttgtcgaaaagctacaaatgtcaaaacatacagtttaagtgaaagcaactcagaacactcgagcagggtgtaaggagttttctcttagactaggaccctctcaaacaaattttaatttagataggcataaaacagggttaccgactcctactaaaaattctttccaagtgctgaacgacttaaatgataagaagattaaagttggtcaagttctatgtgatttaggggcaaataagggcgaatggggagatcctctagcccctaatggatagaatcatcacatggaattttaggggatcaatagtcgctcaaaacaacaagaagtaaggaggtttttctaaagagtgcgggtttagttggtctccttgaaagcaatgtgaaatctcctatattcggagatttatacttgaatgtatttccagtgtggtgtttgaaaacaaatcttttctataatcctaatataacaatagttttatcttggaaagctactacttttcatgtggatattgtgaaggatacaactcagttaattcattgttagattgctccaattcattgaataattttttgatagacttttgtttacgcttttaatgaagcagcgggaagagtagtcatctaggaatatttaagagttatttcaaccatcagaaaaggtccatggattatcctaggtgattttaatgttgtttgtaatcctaaagaacgattaaaattcaatgggcttactaaagactataaggttttgaagaaacatatggaatattgccaagtaatagatgtcaagcttaatggtaattctcatacattgaacaataagaaagaagggaaggctagagtctatgcgaagcttgatagagtcaatgcaaatcaatcgtggctagataagtacacaagtgttgaagttaccttcttccctaaaggtgattttgaccatagctcaagtgtcctaattgtgtatcctattaatcctagaggtaagaagccttttggatctttaatttgtggagttatcatgctgattttttctggaaagtggaggctatttggtaagaaccttaccatgggattgagatgttctgtgttgttcataaccttaaaaagttaaaaaaaaaacatgctaaaggattttaatacaaataaataaattggtaacattcatgatacatactacagttctcttcaagagatgaagaattttcaagaggcattacagacaaaattgaggttgtcaaaaaagcctttgttgatttctaagctgatttacttggctctaaaatgtcaaatgggaaaattattaatgttaagattgtccaataggggagcaatgtaatagagagataggagactcctatttttgagtaggccttatactaaataggaagtcagaatggtcgtgttttcttttttggattcaaaatccctgagaccgaatcgtttgaataatacattctttaagagaacatggagcattggttttaaggattcactgcagctataatttctttttaaaatacaaaagagctattgaaagaaataaacaacgttactttgccattggtgccgaaggttaaatgctctgacactgttgcatatttctggcccatttcatgttgcaatgtactgtataaaaatacaacaaaggtaatctattctagacttataattattcttcttcccttaatcacttagagtcaaggattgtttgttcatgggagattcattccgcacaacataatagtttgtcaagacattgtcaaacattataggaggaagaattgtaggccttcttgcataaagaaaatggacataaaggaagcctatgatactattgactggagatttatcgaagagatgctaagggccttgaaatttgaagaacagtttattaagttggtgatgatggtttgtattcaaacacctaagctttccatattcttcaatggatatttacatggttactttgattctaagcgtggttgaatacaaggtgatctgatatcctccttttgtttgtattgggtatggaataattaggtagactactggctaaactagcaacatggaataatttttaatttcagcataggtgtggaggattgaagttaacaaatatttgtttcactgatgacatattgctttctatcatggtaatgtcaaatcctttatgctacttctccaaagttttaaatggttctcaattacattagtgctacacgaaaatgcaattaaaaccgtggtatactatataggaatggtctaccaagatgtccaatatattctcgtttcttccagtttcagtcatagtaagttgccatttaaatgtttgggagttcctatttgtgttaagaggacatctaatgctaaatataaggtgttggttgagaagatggtagcctgaatttgtctctggagcacaaagcatctgtcatgagcaggaatagttgttcatgtcaactcaattcttatgggtattcacacctattgggcccaagatatgattcttccaaaagaaaggtttcacaagtcatagataaaatttgtagagagtttttataggaatggggcaggggtataaagctactagaataaaagcttggaacgtagtctgtaaatcaaaaagttagggtggtttgagttttaggtgtttagaggactagaatattggagtaatagggaaacatgtgtggaccttagctcagaagaaagataatctatagccgaagtgggctcatgaagtgtatatgaaagatcaaaaatactggtgggagtatactctccaacaagacaacaactagtattgtgcgaaaataatataggtgagagatgtactcaagaacttctacactaaacaccaactagaaaggcaacagtactccatacaacaaatatgtgatgttattgcacaaagatcaacagagtaattggttttttgtcaagatatggaataggtatagtattctaaaacatagaatggtgacttggttggcagcttggaacaacttgaaaataggggatacgctgctacagcatggggtccaagacccagcagcttgcttggaacggagcaggaaacacatgagcatctcttctctagatgcacctacaataaatagtgtgtttctaagctattaacaaaggttggaattggctccaatcagcttcaattcaaatgtgttttgaattggatctaaaggtgtaaataaagcaagttgaggaaaggaattcttgtcatggtttttaatgcttatatatcttattcggagagtgaagaacaaggctttatgggataatgaagttcaaacaataggaagtttcatctaatgggtaaagtatacagtaagtttaagaattacatgtttaaaaattgtacatataagtgatatgtatagaagatggcctgacaaaaatgttaaatttttttgttttgtggtgtgtgatttttgtcctattgagggaactccttcaattgagtattaaactaatgtaattatacaaacttttgaaggaatacaattgacttatttaccaaaaaaaatgaaatttcaataaaatgtgacattatgtataaacactatttttattcgtattctcggatgagatatatgttacaattgtggaagagtgccacgttgaattatgcatggttagtatataacctctacccctcggcatcacgaaaaatgttatataccagaacctatctagaggctcttcctattagtaaaggtgaaacagactccaggattctcattagtaaaactattataaaggaccataagttataggcgctccaagatggtagcatgttagcctagtccaggaaagctttagccagatgttcctagaactcactcgcgtgtgtcctattttgagctaaatatgacggttgtataccttttgacaccaaatcacatcttttcctctgcgtcagactatggtagtgtgcgtacatgctttatagcttctctttgtccaatggcttgtctagacaccaactttgtaaggtaaaatctttgggcgacacgtgtccttagtcccatcaaatgggttgcagcaaccgtacaccacacaatgaggagactcacatcccaccaacggtaagatcaccatgttgtacacaatagccatagaaacgtgctttgtacgaaactctaggtgggtggatggtatgccctcatccacacatgttcatataaatagccctatttttcatgtgcaaagagtgaacaatttttacttacaaaatctctgtcgaaattcctatgag

SEQ ID NO: 24282 - DNA, 2900 bp, Cannabis sativa
gagatttattgattatggttacaagaaacaattagtaggaccttacatgtattaatatgttgcattagattagcaaatccgatcaatttaatatcatacagacaacatatttcgtcattcaaaatacaaaaaataactcaccattgttgagtgagttcttgagttcttaaacacaattaacacgtaaatgttagattatttttagcctattatttatgtcacttttagagttaattttcttttttattgtcactttttgaaataaaattacgcttgttttttttaatttcaagtttcgacacttgaaatgtataaattgatcaaattaaaaaaaaaatgatctataaaatagagaaaattttgtaagaaaataaactaaaacttcaagcctaaattagactatattttgatcagattttagagaaagttaaaatataaaagttctagatctctcttttaactttttggaatcttgaatcgtccaattcaaagtaatatcaagagaattatggccaaaatactattagtaatcgcaacagaaaaatttctaaaaataaaaaagataaaaggatagtcttctctagtggagttgcggctaagcatgagttttatctttttttcaatttaacatttaaatctttttagtatcttttaagtaattttgttagcctatataaacacattattattagtatttttaagagattttcagagctcaaaaaattcagaaactcttaattagcaagcaatcagaggggacaaaaattaaagagctgaagtaaccgagaacgctttttcgacggagtgtgaaaattaaagatgtggccaatctagatggttctcatgtgaagcttgtcttccgtaaatgtagtgtcttccagataacttgtcattaatctgaagatgcacttcttgatagtttactgtcaatcaaggatgttcatccggaatgagagcttgtccatattaaagcatatggcttgtctcaaatgaaagtgcgatctcaaagttgtcgtgaattattattgttgttgatgagctagaatatttaagacggtataaatgtgccacgataattttagagctattttaggcaacaatgcaaatttataagtagctatcaatctttgtaatttgtaggtgaatcaaaccataattacttgaatgaaaattgtgataatgtaaggttgagagatagagtgtaaactagtgagagaaactttttctcgtaatgtatgagagtttgtagaggattcttgtaaccttgatatcactgatattaataaagatatgattgttgttgttccaactgagacgtagagcattacacaaggctcgaactcgttaaatctggtgttattcttctctgttttactgctttaattcattacttggttcttgtgatctcttgatatattgttcttaattgtgttgcatgtttgttagtccggtatactaaatcgtaagtaattgattgttttcgtttcgtacaacacatttaatacacccgcataagagggtagaatgaaataaaatgatgtgatagaaagtaagtatttatatagggctattagcggcgaaacttttttgttttaattttatacacttaacctcttaatattttttttgggtggcaaaattctttaatacttttctttataaatttgaggcgctagttaaatctcactgttaaataccaaatgtattgccactgtgtacacttgtgtgtgtatgtgacatattttcattaacttcgaggttgtaatgtcatgtatatacgggtgtacacaatggtcatcctacttagcatttaacagtgaattttaaatgacactttaaaatcataaaaaatatgagaaggttaagtgcataaaaattaaaatcatttaggaatttcgctgacaattatctatttatatattacaacaactataattactacaagagtaatttgcagagtaaatacctaagtttaactcatgattacaaataaataccaaagtttaattttttacaataataatatctaagtcatatctctaaaacttccgtaggtgcctggtcgttaagtgttcaacatgtcattttcttattggtatatttaaatagttttttagatacaaaataaaaaatttaatgacttggaccaattaaagactatcatgtggccactggcttaacagttaacagtaaggtatttaaggaatttctagaaatataacttaagtattattgccgttaaaaattaaacttaggtatttatatgtaactaaaaataaaatttaagtatttacgccacaaactacccttacactagtaagacatcaatttaactattaacactcatgagctcccaccatcttgggctattttttttttttttgttattattacttaaaacataacttcataataataattaagactaggaaaaaaaagatttaatagatatctttcaagactaggcaagaaaagatattttgataagcaatagcattgttgtcattacctattttattatctccccatataagatgaaacaaaagcaaagtttctttgtgtaggtggaaagttctctatatatatttcaagttaagtgatggtgcatggatgcactaattccattttggtaacaacaaatgtaagaaattaagaaaggtgagatgtgttagtgttcatatatatagtgatcttcaaaaggctatggatgagattgagacacccataccaattttgccaaccccaaatcattttacatggcatctctctcaatttttatttttttttattttttttcaaatcaagcatgatcatcataaatttctagtgaaaaaaaaaaaagaactatgcacatgcattgatttatataactattttgtcggttacaaatatagtctata

SEQ ID NO: 24283 - DNA, 3756 bp, Cannabis sativa
  modified_base (1758)..(1758): a, c, t, g, unknown or other
  modified_base (1971)..(1981): a, c, t, g, unknown or other
aaaatctaagctcttaccttagtcaatgttcttgtaattcttgtgatcaataaaacttgaattatacatagctccattactgttgcaatacggggagtgaattattataaatattgtgtgtctctctttaatatttacttaactcattatttatctcgccaatctagcgagacagtattggccaggtgtaataccttaaggtttaataataggattagcaaccctaactaggttaaatatgtattaatgagaaattatattattatatgatttaatatgtgaaactattatgatttattgcatttaaagaccctgttggtgtgtcaggggtatttttataattttgacccgagacaggtaaaattgaaattttatggtatactgtgtttatggactatattattatatggtatgtttattctatctttctcttggcattttttgaaaaatcggcgcggtatagtcacaatcaggcattttggtccgaaccgggttcggggcccaaaatacatttttgggatttatttatagcatttatgggataaatgagaaaatgtgatttatgtgatgtgtgtgtgagtggaaataaccaacttacccttttgtatgtttatgcccatatgtgtgccttaggggcattttggtcttttggccaattaagttaatattcaacaaaaattagatttttggcaaattgaaaactattttctggttgcttctcccaaaactgaactctctctccctctctctattgtatatttcttacccaattttgaagaaaagagcttggatttggcgtgtgttgtgaatactcttgcttgaggactttgggtaaattgctttaatccattttacttgatttaatttttgaattttaagcttgtttataatgtttgtggatgttcttggtgttcgtgtgattttagtgatgcatgttgttgagattgaggaaaattataatgttctatatgtgattgtgttattagggttgtgttgtatgcatctagattgatttgggaggttcttggcttgaattttgatgtttaaattttgggaattcactttgaatttctgggtattgctttgaaagtttgaatgcttgggtttcaagcttgtataatagtgtgctagtgtgttgtttttgttgacatgcttaatttatgattttagtttttgattttgagatttgtttggagctcaattgatctacaacgttagatgaatttagtgtcgattagaatctttgtttatgcatgattattggatgtattttggtgtataaatgcttcgaaaaaacctcaatttgattcggaagcttgttggcaagttagggtatttttgggttaagtttgggtacctaaaggtgactttttttttagtttttaacctaggatccgcgacatggtctttgagtatcgcggccaactagggggtttttagggcagaatgtgttaaaatttattttgaccataacttttgactccaaactccgttttagatattcttggtatcgttggaaagctcgttttaggttctatatgttaatctgtaaatggaattcaaattatgtggtatatgtgaaaatgaatttggtattaaccctatttgtgaaatctcaagaatgtgtgactaggattaccagcgcttgctcaggaacacccgaggatttggaatctccacatacttagattaccagataagacagtaaaatagcacatagagtttagcgcagtggcgctcatgtatgttattatgtgnatgttatgtgagaaaccgagattagggttattaccctaaatttagcgattatgtgatctaggattattactctagaatttaagtgattatgaatacagtaatgtgttgtatacattgatatcaagaattatgcacttaaggcataattaggttagactcggtaatcaaaaccgagataaactattttaaggccttattgtaaatagacgtttnnnnnnnnnnngtaggtctatgtcaaatagacaatagatgcagtggcatcaatgctaagtgattttaaaatttatattcatattgttatttatactatcttgctaggccttggctcacaagtgctctattgtgcaagaaatggtaaatctgttgttgatcagtcaagaggtcgagggcttttgcagtgtattgtacatgttcaggccaagctagaccacgagagttgggtctactaggggaaaatgttgtaatctccacttttgccgcttaggtcggtgtgtattgataacttgtaatattttgaaaaagtttttacgggatcccgaaacaaaaatgtaatcatgtggatgtttgtaaagtttaataatgacaagttattatttttgttctgtatttgttttaaagtttaatttctgctcttagctctagtaaatctcgctttagtaggattaacatatgtttagtcgcagttcgtggttttcctattgttagggcattacaatttggtatcaaagcgccaaggtttttaaacttcctatagactggctgaacatgtataatcatcgttaaagacaagcttaacttgtggtgtagtaagtattgagagtaaatgcttaactacttttgtgattaaatgtttaccgctttctgttataggcagcatatgagcatctagaaaatgaaatgttatatgaaaagcatgattagtaattaaattgataaatattttttaaaaaaataatatgtgtgagttagggttaaggcattaagtgcgtaagagtggtttttgatgcctcacttgccggggttgttgattttagggctatttgagagaaaatggaccccaatcaatcagctagaccacagggtgagtttttagagcctagtaatgaccaaaccaatccattggcactacttgtgcctccacagaatctgggggataatgcagggaataataatgctaatccacctggcgactggcagcaaatgttcctcgaaatgcaaagcattatactttgtcaggaagatgagttgcatcgatttaggcaactggcccagtcagctccagttgaacaagtgttaccaccagctcctgttccagtggatttatactgccacatcgagactcgatttttgagcattttgtcaagctgcaacctttgacattttttggaggtacttatatcattgaggcagagaagtggatgagcactgttattcgcatcctggataacatgggagtaacgagaactgaacgagttaattgtgttgcattcatgtttcaagagcatgcccgtgtctggtgggatattgtgggacagactcgagatgttagtatcatgtcttgggatgaattcaagagtctatttgaggaaaaattttataatattgctatcagaacctcacacatggaagattttgtaaaattgactcaagggaagagaatatcaggtgagtatacactggaatttgatcgtttatccaagttcgctggcgatctagtgccaacagacttcactcagaaacaaaaatatgtaagggaattgaatgccactatcagtcgggacttgaaaattaccaccaatcacgatacattatacaagaaagtggtcaagttagcgttaattgctgaagaggtagaataacatgtgatcaaagaacatgctattaaggatgtcatcacgacatcgagccctagtgtgggtggtagtgtcagtaaggggaccgatggtggcaactcagaccataagcgaaaggctgaagcttccaaaacaccaataagta

SEQ ID NO: 24284 - DNA, 2181 bp, Cannabis sativa
attttaagctgtcccgaatgagatttgattcgtagaacgctttcaccactgagctctacagagagttttcgtcctctagacagataccttcccaactaaagggattggttaaaatgaaaccaaggctagacagtcgttgaaagactatatccaaaggtttatgactgaagccataaaggtcaaagccctaactatagaagggtaatatacaattataattggaggtatcctacctctatgtgaactttagagggacattaggaaaaaaagtcaaccaacaatatgagagagttttcagatcacgctgatagtttcataaaacttgaagaagctgtccggcaggtgtagattggcgggtagacacgtgccattgtgtcttacaaaaaaccccttccgatgaaaaaagacattagtaagagggatccctccatgttctgcaaatttcctaaagatttcggaacgcgacactaataagtgtaagaacttgaaggaagagatcgagtgcctaataagaaggaactatcctcacctatgtttgtctgtccaagctgaccaaaaccaggaacaggtccaaaagaacaacgactcgttgccaccacccattgctggccatttacaggccatcatcggtggatcgcacattattggggattcaaacaatgcattggacaaatatgattggactctttgtcatggataaataagtgaagtcctgattgtagaggaaagaagtctaaagcaaccaaagctggaagagcctgcaatcaccttcaccgaagatgttgctgcccatgcatgcaaacaggtccacccaagaaacacgatagacaaaggctaacagaacttggttaattacatgtgaccaagagaccataagacaagcatagtaataatacttaagaaaaaaaattaaaaaaaaaaggtaatgcaaaaaattgaaagccaagtatgttaaaaagtggctttgttaaacataaaaggaaattagttcaggataaaaggctccccaaccaaccatatctcttaacaaaaaataaagctaggattaaaaatcgtctgaccagccatatgtcttaaatttaatggcctttatggttgtgcagaaaaataaaagataagaaaaataagatcctcaaagcattggaatgtcaaaaggagttggtggactcatgctataaccaacctggtcctaaacggtaggttcagaagatggcttaagaggaggatccactaaatcaacaagttagtcggcagcatcagtaggatgcctagtagaaacaacatcatgggcggaagtatttcccagggagtttagatgcctgcaattccttgccccgacctattagggattcgagaaatttaagcttcatgtatctgtaatcaccccagggttctgtttccaaaacacggttaaggtttcaatggttaggttgccacactcttccttctccacagcccgcgtctgctctaattccaccagttttgcttctaacttggtcttctccattgccaactgtccagtaatcttcccatctcgagaaactagaagccaacccaaggaatattttggtccatcaactccctaacccgcttttcagactcttcccagtccttctcaagttgagcggtagatggcatgtcctcaatctactacttgagttccttcacatgattgttgtcaacaagtagctgtttgttcacctctccgagctgggcctctaagtcctcaatcttctttttggtagcaacacctgaccctttgaggcgggcataggtatgcccaaacttcagggacatctagtaataaaagattacaagtcagaacaaaagtttcacatgaggaagataaatctttgaaagagtgaagataatttaccaaaacattatcctttagaaggtaaccttcactcactttaaaaccttcccaggcttagctggctttgtgttatctgtgtcttatagctacttgtcaacgtgaaccaaacacatgtccagatagttatggacaccctttttggatttctctaccccgactagatttttgggactccttccttactcaacctcctgctaggaggacaacgtcctaccaaatttcccaccaggctaaaggagcatatgaaggaggtagaggaagaccttattgggtaaaacttgacccctccttttgagcaacctttg

SEQ ID NO: 24285 - DNA, 6778 bp, Cannabis sativa
atcaatattgctgatgtggcagtgtagatcctctgtgatgagatacagagtaatagagtatagatcatcaattcttaacaccacccctcaaacgaaagggtgaggcagtcacaccgagtttggaaataagagattggaaccgtgagtgagacaaggctttggttagacaatctgcaatctgatctgccgaagggatgtatctcacttcaagttctttcttcaaaattttgtctcgcacgaagtgaatgtcgagttcaatgtgcttggttcgagcatgatacacaggattagaggcaagagcactagcacttaagttgtcacaccaagttacaggagtgctgggcagtgggaagtttaattccttcagcagagattctatccatgtaatctctgcagtgacaaaagctaaggctctatattcggactcggtgctggatcgtgagactacagcttgctttttagatgaccaagaaacgagtgtgtctccaagatacacacagtatccaccaaccgatcttctatcgtcaacacaacatgcccaatcggcatctgaaaaaccagcaatgcttaacttgtcactatagctgatgtgaaggccatggtctaatgttcccttgagatatctcaagattcttttcgctgctccccaatggactgttgttggtgctttcagatattggcttagcttgtttacagcaaagcaaatatcgggtctggtgttgcacaagtactgaagtccccctattagacttcgatagaccgtaggattgtctagcttctctccatcattaatggacatgttcttccctgttgcaaatggtgttgggcacggtttgaggctttccatattgtttttcctcaaaagttcttcaatgtattttctttgagtgagatatagaccagtaccatcccgaaccacttcaatgccaagaaaataatgaagttgtcccaagtccttgagagcaaagagtttgttgagttgttgagtgaagctttggagttttgagctgtcatttcctgtaacaataatgtcatcaacataaataaggactaggataataatcttgccatgtttgtaatgaaatagagaagtgtcagccctggaatttttgaaattccattccaacagtgtgttctttagtttgtcaaaccaagctcgaggagcttgttttaacccatagagcgacttatgcaacttgcatacatggttaggctttgtggggtcaacaaaaccctctggttgatgcatgtagacatcttcttcgagatgcccgtttaggaaggcattattaatgtccagctgacgaacttcccaattatttgagatggcaatggtgagaacaattcggatggtagatgctttgacaacagggctgaaggtttcgctgaagtcaagtcctggcctttgatgatatccttttgcaacgagtcgtgctttaaatctctgagtagaaccatcagcatttctttttattttatacacccacttgcaacctacaacattgtaagcatcagaatatggaaccaaggtgtaggtcttcttggctttgagagcaccaacttcagtattcatggctctattccaaccgggatgactaagagcttcagctactgttctgggttcttctctttctggatcccaatttgtcttgttgaaataaactttgggcttgaaaataccactcttggaacgagttatcataggatgtgtgggctgtggagctatttggatactcgggctggcagcagagtttaattctgtagtagtgtttatttctgcagcaggaatgttggccgtgggtgtagaaatagttgattcacctggtgtaggagctgctaacacagtatcaatactgtcagtgttcaaaggtgaatgaagagagtgacttacctgatttttatttgatgaggacatagatgaagccgtaggtgctgctgctgggatttcgtgcttttgagtggttctatctgtgccatttgactcattattggtaaacaaatgcatgtttgggagttgagtccaagtagagttatgaataattacagactgctcaggagcatagttgttaagaaaaccatttttaaatgggaattcttgttcattaaagacaacatgtctagaaatataaactctacctgttgaacttaagcatttgtaacctttaaatgactcactaaacccgagattgacacacttgagagagtgaaattggaacttgtgggtttgatatggtcttaagcaaggaaaacatgctgctccaaaggttttcagcatgttgtaatcaggtttcttcccatagacaacctcaaaaggtgatttgtgttgaagtattggtgttggaagtctatttatgagatagaccgaagtttggaaggcatcaacccaatatttcaagggcatacttgcttgggcaagcaaagttagatccatttccacaatgtgacggtgttttctctcagcccttccgttttgggctgaggtatgaggacaagagtgttggaaatggattccatgttctttaaccaaactctcaaaagcttgatattccccaccatagtcacttctcacagatttaattttggtttcaaattggttttcagcatagtttttgaactgcacaaaagcttgaagtgcatcggatttgtgttttagaggatatagccaagtgaatctgctgtggtcatcaataaaatgaatatagaacttgaagttagtgttagacgatattggggatggaccccatatatcggtatggattaagtctagcattttgacagccctattgttggaatttttaaaaggcaaagcatgagattttccatattgacaagcatcacaaaagtttgtttttaattcaggagagacagttacattactagactttaacactaacttaagtactctaagagatggatgaccgagacgcctatgccacacatcattcttggaatttaaggctaaactatgctgaataacattaaccgatttcacatgactgtgagacacacatgtaggctgactttgatgataaaaggacttggaaaaagttggggagagttgatagagcccatctttaagcatccctttgagcagcaccttctttgtggctttgtccttcacaaaacaaaattcagagtcaaactcaataagtatatcattgtcagtaacaagtttggatacacttataagatttttagcaatctccggaacaagcaaaacatcttttaaaattaaggatttatcagctgtaggtatatgactagaaccaatatgagaaatagttatttgatgaccatcacccacaatcaacttatccttaccaccatagtcagttttctgacttatgttacttccatccgctgtaacatgactgctagccccgctatctgcataccaaacatcgctgtccacaacttctggagtagcagtaaaggcagacggtgggttcttaggctgagattggttggcatttgggtcagaacccatgtatgcatcattgtatctgttgtagcagatggcagccgagtgtccaaacttcccacaaacttggcaggtgggtctattactgctgctattagaccgtcctctgcctcttccacggtgaccagtgccacggttgctgccagaaaagtttgaacgcccagagttctggttttgtggagtgttgttgccacggctccttccagtattgtcagatctattggccaaattggctgttggtgcagcagcaagtttggagttctcatttaggatatttagccgctcaatcttgctatcaaagcttagtaaaagctcctgcaattcttgccaagtggtacttggcctagcctcaatttgcaatacaataggtaaataactagcatcaagaccagacaacacattagaaatcaaatgagcttcggggtagggatcccctgctagagtaagtacatcagaccatgctttcttttggcgaagatagtcaaccatagaggtgttaccttttcttgttgtctgaatagctgtgcgggtatcgtccattttggacttggaatgagctccatacaagttttcaagagctttccaaagagcagcagctgttgtacaccccatcacttcggttgctatggcttccgtcattgagctgtataaccaacccattaagagttggtcacttacgatccactgctcgtagtgaggattgagttgaaacccaaatccgacttgtccttctggtgcttcagcagggagaaactccggtggacacacacgggtgccttgaatgaacccatccaatcgatgtccccttattattgtcgagaccattgttttccaaagggaatagttgtttctgtcgagtttgaggggaaagggctggtttagtgtgctgaagggttgtgtatagtttgctacatagctcgactgagcttgtgcgaaattagttgtgacacctgcttggcttgacccaggggtagggctgttgttggcagcattgtttgctgctgtaggagtctgaggtaggccggttgacattggcgtttgcctatggatggctctgataccaagataaagtttagaattgcagggaaataggaaaactcagctcaaatgatggctgaggtatttcattcattatataggtagggctacatatgtttagacactatgattgggccaagtggcaccatacagcaggagagacaaataacagaaaagatcttcaatgattacaatgataagaaaataacagaaagggaatatccttgattctctatcaatattgctgatgtggcagtgtagatcctctgtgatgagatacagagtaatagagtatagatcatcaattcttaacacacggcacaactcatatttttcgtgacactgaacaacatgactcatttttcgaaaaacacaaataaatacaaatcgggccaacacaacatatacgaacttacagcactactcacaaccatgccaaaataataataataataataataataatgataataaccacacttaagatcacaccaaaataatcaaatcccttttagatctcgttctcgatcccctatatgtgttctgtttcggatcaagattgggatgaaaacatatgtgggagctcattggtaatatctggaatggttaagatctaagaaaaagtaagaaaaagaaagataagatgaagatggaaggtgcttcaaatctggaatagaagaaaaaaagaagaagaaggaagttgaaacaggtgggtagagagagaaaagtggtttttagttatttttatttatttgattttatatattttataactttatattaatttaaagaatgttatttgacattagtagtgtccaatactttctataggtgacgctttacgattagttagtgatattttgtaaaaattattttcttaagttatataagactcgatacttaattacactaataacagtatgacatgtcgaggagaatagtagacaccaataatacattttagccaatatatatctaatttaaacggatttttatgtgagttaaaataaattttgaaaatattaatttgtgaactaataagaaatatttgacacatgtcattttgacatgcaataaaatagaatctaaatgaaagactacaattaagtaattgttatattgagaaatgttaaaaaatactaatggtgtctagtattttctaatgtattaatattgttattagtataattaagtatcgagtctattataattttatataataactttttaaaagtatagtaaatcaatctcaatgagacatttagaaatattaagtaccgttcgcaatatagtaagaaaaattataaataacgggcaacatcttagggtcataagtcattaatagcgctaatttaaatgaaaatatatcatctaaaaaaacagaaaagctgtaataaacattaattatatatttatatgtaccttcatcggggtgcaataatggcaaactttgtggtaatactccaaaacaagttatagtccagcaaaagaggcaccaaagtagataccaccgagagatagagaaagcaagcatgatgttttgagtttcttttctttctttctgaactttttatttcagagtagaatatataggactgatatcagtttttattatgacaatgcttttgtatgaaaatgcatttcccaacttaaaatgacactattttcagtttgacaaggtctaccaattaaaattcaaaacttagaaaaagcagacaaaatagaagtgaatagtgtactgtgatgaaattaagtacaatttcactttcatttttatactaacaaatggctgagctgatcaacttggttgaatgggacccactccagtccatgtccatgcaagtcgtccgacaatttcagaaaactactgtacaatatctacaaaagtccacctccatttatttcattcaaacatatttgtttatctggattttgattaatgtaatgaaatgtaataaaatcatatttaagacagataaatgttagagtttaggtcttaaaaagtttgaaagatacttctctttataaataagaattgaatattgtcgtaggagaaagtttcaatagttacattaaattaaatgtgtaatcatcattttgaatattgtcataggagaaggtttcaatagttacattaagtatgtaaccatcattgttacatgacattagattatcattgaatgtttgtgattaatttagaaattaaataaaaaaataataattaacttataacgtagtagtcacctaataatttatttc

SEQ ID NO: 24286 - DNA, 4046 bp, Cannabis sativa
tttctttcttttaactaaattggtaattattcgtaattttgatctcgagacaggatgcatgagagtcatctcaactaggttgtttacatctttattttggaatatttttgtttgcttattattattattattattattattattattattttagaaaatacccaaaatttgttgatgattagaattcaaattataaaaagtacattggtgatattgtcaaaaaaaaaaaaaagtacattggtgataatacaatgatgaattttattttacaactaactaacttcatttttttttttagataaaaatgttataataaaacaaaagtgataataccataggcattaagggatgaggcatttcctccaattaagagcaaatagagtttacggaaagaggataatttgctaaaacatgagcagcaatattcgtacatttatatacatgaaaaatctgtactccagagaaattggacgaaatattccttaacaaacaatgaaaattagaaacagaggcttgtgaagacagcaatcttttaaccactatgagagaatttgtctcaatatagtgaacatgtaagtgtatatccttaagccattgcagattgtacattaagaccattgcttccatgacttccgatcgaaaattccctttgaaaggcattgacattgccacaatggtatcaccattgttgtttcgtataatatgacaccaaagccgaaagtgtgattaaatttgtcaactgcagcatccgtattcagcttcagcctacttgaaggtgggtttaactaaggaacatttttagttgcagaagccgaacctgggacagatgtggcaccagcagatggtttggtagattgagcagaatgatactcttcaaggtagctgattgcgaagtataaaagaacatcaggaggttttggttttgttccatgtctctccttgtttctctcactctaaatactccataaaattgtggcaaaatgttccaattatagatcagaccatgtaaccgagacatggagcagcagttccttcaggctcatttgtcttaaaaatatatcaccaagagagaaagaggatgatttctctccctactttcattaactcatttttctgttagttagttaatacagttaactaactgctatggctataaatagtgagttcagtagaatgactaggtactttgatattcagtttcttaaaactccaagattggaggctcatgaatctttgatattttggtctacaatcggaaaagagtctttgtagtacttactaaattaaattattaacctataaaaatattttacttgcaacccaatttaaaatttatttacacatttttaactaaataaataaataatttgcataataattgaacatttacatgacacattttatatctatgctagttcatctttacttcaaaggagcatcatttaggaatacgatgaagatggtactgcaacttctcatctttctgaatacatcccttcttgtattgtttctcaagagccataatagtattactagtaaaaaactttcccataaactccttaacttacaacaatcggtgcaaattagcgcgacacttgacttgacaaatttaagaatgtgtctattcgaacccattcgtgatcattccagcccgcaatgaaatctataaaagtcaccaattagggaaaaagatgatcaccaaattaatagtagatgatcattattgctcaaaaaaattgatctgaaaagtattcacctagttctaagttgaccaattacataaatttgaataaaatggagaatttgttactatgaaccaacacttgttactatccactttaactgccaaatccaagagtacacaactcctattgtgctatatatagagattaacatcagaggtataaaaggaaacttgtcaccaagaaccaaagggtgcacaaattgaccccaaatttcaacaattataatgccaatcaaatagcttttctcaagtaagccaatactaaaccctccctcctcctccatagctaatgtactagaactacttgtctttacttccttccttgttttcacagttctaccactttgatatagtgcagaaaatcctaaccacatcagaatggagtgtagtagcaacaatacaacttttattgggtactcctgactttcatagagaagtgggaatagggaatagcaggacactattgatagaatgaagtaatgctttgcatcatccatatccatactctgcactgctacaatggcaagaggaataacaaaatgaagtgaagccttttcatgcacatgccaaccgaacaagaacccacacatataggcgtaagctacccatcttgtaatcttctttggctgtggatttctccaaacttgaattagacaaggacataaagcaaggagaaccataaggaaagttgtcaatggagtgatccgaggtaagacagcaaaaggtgaagaatccccaacaaccccaccagtgaaagaagctgtaggtgtttgaatattgaaaccaagttttctaagaaagaatgccaaccctttatctagtataatataaagcacccaaaaatttggtgcccaatatgcatgacaaagtcccctaccaaagggaaacatgcggctgatgacttgttgtatctgcaaatatagaaaagaacaaaactgtaatatctcaattggtacttgtttgttcatgctctgtaacatgaagattcaaatcaatccaatatgcatatacattaaatcataaagaccaaggcaacaaaataaacattttccagtgtattaccaagctatagataaacgtggtcacttttcataacataaggaaaacaaagcatacaaagcaatgataaatagggataattgtgaccaaaacttcgagtttataagcggtataacctcaatgattatttttagcagcataagtactcaatgttagaaaaactatagatttcgtctaatttgattggtacagccctatttaagacacttgtattgatgaaactaaacgaaaatcacagttttataaacattagttactttatgcagcttacaacctgaaaactttgactatttactctaaatattaaacattacaagaagggataattacctgcccataatacaaaaatggtccaaatgctgctacaaaaactgccacaaccacggtccccatagccgaaagctgcctaaaaccccttaaaaaccctctcttccaacaataatgcctcaacaagtagacaaagtaaacaggtgcagccacagcaaagagatgcttaaaacataacaagacagcaaaaccaaaaccacccatcaaatcatttccttcctcaacataagaaagtgaaatcaatagaatcccaatgagaaacccattatactgaaaatgcaaatggtctacaatcataagcattggggaccaaataaccaatacccatatcgattttcgcttctttgaatccaaatttcttgtcaatcttaaaaccccataaacaagacacaaatctgatacaatcacagtaattctttgaaaataaattacagtatttgagttatagttcaaacccttttggagatcgacaatttggggatcgatgagtttggcgaagattgagaggaagcgttcgaagtaagcgaagaaaggtggatagtccagcgtccaagggctggtttcgtctgagtaccattgcgaaattggtagagagtttgtgatagcgagccaattgcgatggacctcaaagtctgtgctgtggtaggatgggatcagaaggagcttcaggcaggtggctatggcgaagaaccaccaaatccctgaaatggggttcctttggttgctctgttcttccatggacctaaagtctttatgaaatggagatcaaaggctccattttttatatttttagtttaatatttcaagttaatgtaaaaaatttacacacttttttttaaggaaatttcacaaatttaatatagggttaatttcacaaatgcacaaaaataataaaaatacggtttcacggaatttt

SEQ ID NO: 24287 - DNA, 1933 bp, Cannabis sativa
agggaaatcaacgtgaacaaatctatgcgattgaatacgatgagttttaaactttaaaggtaagtttttctttttcacttttactataaaagtaaaataagaaattcctgctagtacacaatacctctaacatgactggaaaacatccagtaaaattaattacattttatagcattcatctcttcaccaaaagccacttgattcagtatggacaataccttctcatttgaagaaatttcgcaacccggtaaagagttttagacctttcaattcaccacttctaatatcccttaacctcctccgtagtatctgaaaacaaccaaataatacacacacgaaaaatggattagggagtgactaaaagttacaatgcagatccaatgctgcaagggattaaatcaaagagctctcaaagttcgttttatactcaaaacaaagaagttttaaaaaaaaaaattctaatggattgcctacctttagcagtgaagtaatgttcaaggaagataatgagtgtttaatttaccgaataaaagtacttgcaacagaaaaattattcctctgattgatcttaagcagaatattgaagttatcgacacaaaaaaaaactctttaaaagataataatcagctaaaagagtaggtgaaatcttacatattgggcacggaacaatatccttcgctcgcttgtacatagatctacagctagctgttttagaaacaaccttcggttaagttgcttaggtgatgtcacgtctaaatccaatgatccactttgctgttacaatgaaaaattgccactgtttttgttactcaaaactacttgtaaatgaaatcactttctatgcaaagtaaacatataacaaaatcctcatgcaaattactcttattacctgtaagaatttgttgtactttgatatgctagattcacaactatccaatataaattgaagggcttcttcctctatatcagggtatcttaattccttgttggtattaattttgtttgatgctgccgcagccatctgagacagccatatatttgggatggttattcaatatattgagaaaatgtaaccaataagcaagagaaaaagatgttcaacctcttcaaattggccgctcatagatggaggactgacagctaaataagcatatgccatcaattccaaaggccagccagtgactcgtataggataacattgagatctgccaaaaacaataaatcaaaagcttctcctgatttgcattcgatttagaccacaaaaagggaagaaatatgtatctactctactcaactcgcaccaagaacttgaaaaagctgaaaaaataggaaagataggattggagagtgacaaatgaaatcaggtacttacgcttgcaatccatgtttcctgagagcttccaatttctgtttataacattcatctgattttgagagtgacactgacaactcaactgaatcaccaggattggttccctcctttggaacaaacccataggatagcagcagctctccattagatttcttgccatatgagatgaaaacctgaacaagtaatttaaaattcaacaattcacttcaacagtataacacactatagattattagcaccacagataatatgtttcactcgtgagttcattctaaattttcagaggtgaaaatgtttagcgtttacctgctcacctggctgataaggccggtctgttgtgaaaacaactccctgagatgatttatcatagtctagaaatgtctccacctaccagcaaaatccatgtgattaaacagctaaacttttgcaggtgatttcacttcaaacatttgttttaggatgagtaatcaacttacctggcaactgtggttcatcatatctgcccatggaaccaatgcaaacttatcacccattgaaggtaaccggacctgtgcaaaccat

SEQ ID NO: 24288 - DNA, 1222 bp, Cannabis sativa
acataatttaaagttgccttgttagaaaccatattaggaaaatcaagtgggtcaaaacctgaactaagagaaaaagagtacaacatgaatatgtatttccctcatgcccatatgatgtcgataggtggcatgcatgtgtcgcctctgcgtactgtagctttcagattagtagtcgtcagacaaagggtatgttccctttagtggtatgagcactcttatggactgacgcaggggacaaagtactgacattgtgggattcagtgtcagaggatcaccacaacagccttggcttctgggacatctcttgaaatgcccctctagaattaccctaatggctcattcaaagggcctctgttatttcttcttttctgggcatgataccttcccgaagctggagaggtcccgatcgagatgtaagcggcctatattcaagatggtttttcggcccatctcttcatgtggattcggcctgttacctcaattaggcccgtgtttgggcttcagttgactatcttttacttggatatgccacgtgtccctctttcgaaaataccgataacatttacccccaagcttttgaaacttgacagttgcaaaggcttgtagtcttccttccagatcattataggcacgcgtgaaatttaaaaagagggggtgacctttttgacttctttactctttagttatggacaactatgagccttgtggtttcaccgagtggatcacaagtggctttagcttcttaatccatgaacttcatgcatgctaggaaagcatgtgatgcctagattagcataatgacatctgaatcatgtcaacgtgcgtactgaggaaaattttatcattgaaacctcttcgatccaatgctcattatttcatgcagaccttttcgttctcgaactgttggatttgattttttgttttcttagatgtaatgtgagccaccaattcaatggcacacgaatcattatttttttcttataaatagagcgtaaaacctccattcaccacctttgctcatattttatttagaatttgaactttttaggagagagaagaggaaaattatttctggtgaatgtcccattacttcaacaagtgtctttgccttcttcatttgattcaggcacgagaaaatctaggagcatcatccccagttcttaccattgatccctcaaagccgtcaaaaccattggatctttaattaaaggttgaaccactc

SEQ ID NO: 24289 - DNA, 5855 bp, Cannabis sativa
gtcgaatgacatggttggtctgttttgatttttatgttgctctggtttctctggtttgtttaagttgattggtttggtggttttctgtgatttcttttgtcttcactgtctggtggtccttcgagttctttattgatcagaatggaagagcaatatgaggcatttacgatacatgatgatgatgaggaggggcttattttcgaagcaggggctgatggcttagcagagatcgatgatcgctggctactggtaggacgttttctcaccaatcgggctatcgactttcaggcgatgcaaaataaaattgccaccctttggcagccaggtagaggtttgtatgtgaaggaactagatccaaatctctttctatttcaattttgccatgaagttgatatagaacgagttatcgaggggagtccgtggacgtttgatcgtgcaccattgatttttgaacgagtgaaacagggagagaatcccaggcatataccacttgtgaaacttgatctatgggtacaattgcataacatgacagtcggtttcatgtccggcaggattttacaaggggtaggcaattacattggtacttttattaaatctgaccaaaacaatttctcaggtgtttggcgggattatttacgtatctgcgtgaagatcagagtggacatgccactgaaaaaaagaagaagcttgaaatagtgggaggtccgacatgccatgtattgtttaaatatgaggatttgccaaccttttgcttcctttgtggtgttcttggacactccgagaagttttgcgaaaagctctttgacacaccaaaagatccacttgttcaagaatatagccttgaattgaaagcggcgccgagaagaagaaattatgctgatggttcacggtggctgaaatcgggtttggcagtcaagaatcactcaggagcaagcagttcacaaggtggtggccggagcaattaaattccaccaatcagggagaataaagagagaactatgaatcagggatgttcattaatatcccatgattttcgtgctgacattgaaaattttgttttggaaaaatccctatctttaaggaaggataattggaatgaggtggtggcgccaactgatataagtttgaattcagggttgacttttattgataataaaagaagaaggatgggcttggaaaaagaagttgggcttgctgagacacatgacaaggagttgggccgtggagtgactaatcatagtcaaggaataaaaaatatggatatttctaatccaaaagacaatgatactacaacccacaatgaagtttcaaaaaacttgctcgaggcgggtgctggtttccaggcccgccaagaattatgaatgtgttgagttggaattgccgggggcttgggaaccaacggactattcaattccttaaggaaactatttttcaaaagagacccgattttatttttttgtgtgaaactaagtgtcataaatcaaaagtggtgggcttggtccaatctttaaactttgaaggtgtctttgtggttgatgctattagggcttcgggtggcattgctcttctttggaaaaataaggatgatggtactttgttgggttactctaataatcacattgatctacaaatatccatatcctccacaactccgagttggcgactcaccgaattttatgaagaattgaatcgtaatagaataagtgattcttgggcactccttcaaagcttaaaagaccgttctcccctcccttggtgtgttataggggatatcaataatattgttcgtcaagaggacaagaggggtgagcgtccttacccccagtggctgttaacggggttccaacaaactttgttgcattgtgggttggaagatcttgagctgcaaggtcatcaattcacttgggaaaaaggtagagccacaaatgcatggattgaggtacgtcttgatatagcattagtttccatttcctggagttaagtttttcattcggccgtgctttctaacttgggttttgctacttcggaccattctcctttgttccttgaacctgttgcgattaataattttgctcctaatcaaagatttcggtttgaaaattcttggttaaaggagcctctttgtttggaaattgttcgtgatgtttggtctcaagaacaaaatgacagcatctctaataaactcaaactttgtgccgagagactatttacttggggaaaggggttaacgggttctcttaatcagcgaatcaagcgttacaaggctgacttgaagaaactccagggcttacgggactccaattcggttcagagatatgctgaaattaaaaagaaactttatgaagcatttgatcaaagggagagttattggaaacaatgagctaaacaattttggttgagggagggtgatcaaaacaacaattattttcataaggctgctagtaatagaaagaagaataatcagctgaatcaactacgagatgttaatggaaactgggtttcatgggattctggtttgccatcagttgtagctgactacttcaatgatttattcacagcttcgggtagtgtttgtgaagaagttgtcgattgtgtgccaactgcagtgtcggatgttgtgaatatggagctttgtcaagctgtatcggaagaggaggttcgaaaagcggtattccaaatgcaccctgacaagagcccgggacctgacgggatgactcctgctttctttcaaaagtgctggccgatcgtgggagatgaagttgtggaaaatgtgcattgtttctttgaacatggaattcttgctgatcattgtggggatgctaatgttgttcttattccaaagacgagaaacccagagcgtatgtctgatcttcggcctatcgccttatgtaatgccttgttcaagatcataacaaaagtcatggttaatagaatgaaaccgttcatggattccattatatctgaaaatcaaagtgcctttatcccaggtagattgatctctgacaacattcttgtttcttttgagattttacactatctaaagaggaaacgtaagggtaaggatggttttatggctttaaagcttgacatgagtaaagcgtatgattgaattgaatgggattttcttaaggcaatgcttcgaaagctaggctttgttgagaattgtattcagcttgttatgaagtgtgtgaaatcggccagctattgtgtgactcatggcaataatgaagttggcccaatcatccctacaagaggtataaggcagggtgatcctttatcactgtacttatttattctttgtgctgaaggttttacagctttgctgcggaaatatgaacaaaaaggatggcttcatgggtgtaaagtggctaatggtgctactagagtatcccatatgctttttgcagatgatagctacctatactgtaaggctactgaagttgaggctcatcggattcttgaagtgttatccaagtttgcacatgcctcaggacagaaggtgaacctaactaaatcttctatcttttatagtgctaatactttgaattccatgaaagatagaatcaataccaccttgggtatggttacggctactgaaggaagtttgtacttgggtttacctagttctatgggaagaaacaagtcggttgctctgggtttgttgaaaaataaagtgaagaatagactcctgggttatggtacaaagttcctttcaagggcagggaaagaaatattgattaaaacggttgcacaagctcttccaagctatgccatgagtgtatttttgatctcgcaagaggtcacacgagatatggaaagtttgatgtccaagttctggtggcaatcatcgaacaattctcccacaggtactcattggatgtcctggaaaaagctttgcaaacacaaaactaaaggaggcatgggctttcggaacttgagaagttttaatttggctctattgggaaagcaagggtggggtcttctcacaaaaccgaaaacgcttgtttcaagaatttttaaagcaaggtattatccacgtggtacttttttcactgctgaaattggaaataatcccaattatgtttggcgtagtgttcttgaagctcgtcaacttttgactcatggcgtttattggtccattggtaatggcacttctatttcggttcttggtgaaccgtggctccctgacactcaaaacccatttgtttcctcttcacatcctgctcttataggtgccaaagtttgtaacttaatggctatggatggcttgggttgggaagaagaaatagttgcagatttgtttcttgagcgtgatcaacatctgattctgtccattcctcttcagcatggtcatggccgagataatattacttggaagggtgagatttctgggtggtacacagttaaaagtgcctatagacttgctcaagaaattaatgggaaagacgatcaagatggtgctgctgctgctactttttggaaaaaattctgggcgatgaaatcacctcggaagatgaaaaacatggtgtggaaggcctgccaaggttgtcttccaaccatgagtcagctgagattgaagcgtgtggatgtgtctctggtttgccccgtctgtaacaaccaggaggagacgatttatcatgctctcgtgacttgcccagctgctgcactctgctggaacagagttggcatcggtacagtggtgcaccagcagtaggagagtttttttggctggtgctcttcgaattttctggtgttagatgcagatcagagaaagcttttggttgctctttgttggtctctttggaatgcaaggaatgacaaagtttgaaatgacaaatcggcgagtgtggaaagtatagtgttgtcggctagaacttaccttaatcaatggcaaactgctcatagttcaaatgttatcttcctgagtcctggtttaataccaggggacggagctgagcagtggcagccaccacatggagatagcgttaaggttaatgttgacgccgctatatttgcaaatacaaatcagtttggggtcggctatgttgttcgtaattcacaaggcctatttgtggaaggagttaccaaacgcttcaatggttcggctacaccagaatttgtggaagctttgggagtcaaggaagctttaagttggataaagcgaaatcaaccaggtcaagctatcctcgaaaccgattgcttagtgtttattcaagccttgcgtaatgatttccttgtttggttaagtggtacttaatgattgtaaggcattacttaaagaacttcaaaatatttctatcttttttattaggcgatcaactaataaagtggctcataactttgctagagcttctttattctatcatgattgcaccttcaatttggggtctgtcccaattgatttgttacctactttagtagcggattttaatggttaataaaatgttgattttccattaaaaaaaattattataattaaatatatcacttgaaagaaagaaagaaattaaggatgatacaaagtcaaaaatatcatataaatgtactatcatccttaaatttaataaagaaacaaacaagattaaaggttaaaataaacaaaaggcgtagataaatgagtggtgtactcttggcatttagcattgtttgaatgaattatggagttgaaatttccaagtgtatactgtggcaaaatgacatcctaaaaaagtaacattacgtatgcagttcacatgcatgcatgcctagacctttcgtcatcaactctttctacaattctgattttgcaaagactggactcatcaatggtagtctcttcttaaacatgatattcaacgtttctataaacatgatat

SEQ ID NO: 24290 - DNA, 2228 bp, Cannabis sativa
ttatgtaaattttactttgctttattggttgctatatgagttattattttgatttttgtaaaaatgcaaaaaaaaaaaaaaaaaaaaaaaatactactttaaagtgtaaagtaattataaattagttgtgactaaaagttccgtgactaaaatattagtcacaaagtttacaatttattgtgactaaaaaatacatttaataacaaattatttatattgtgattaaaaaattattactataaatatattatttttttttacagaaaaggatccaaaaggtataaaaataaaacaaaagaagccaaaatagaatataaacaatttgtttttttactttattgtactcctcacttagagattattattgcaacattttataatgacgttgttcttcttctttttttttttttttaatatatatatatattttcttatctcttctcaatatttcatatttgagaagattaaaaaaaatgatatatacaaaaagataaagtagaaaaaccaatgtaagtaagagtttaatataatattaaatatagaaaattcatcactttttcaaaaaaatatatagataaataattgagtttcgataatatattttaaagaataaaataaaaaaattaatggaacggtagatgttattattatttaataactattggctttatttaggtaattagaggtttgtttatttatttaataatatttaccctaaaatactataaaagagtctcgtgtttattttctcgaaagataaaaatgtaaccgtattagaaaaaaattagaaaataacgctttcaataattaagatataaaaaaacaaattatcattattgtgcatatttcttcctttttcaaatttgctaaacggtcaaagtatcttttctaagaaagaaaaatgtttttcatcctaaccaaaataatctatcgagtcacgtgaaattactcgtagtgtggatgaatagcatgattctaaaacaaaaaagtgttgaaatacaaaatgtccaaattaagtctaaattaaatccgagtaaagtcttaaatacctaaaactgaaattaagtctaaggtccaaaccaagtttgaattaagtccgaccttgacaacattgaaatcacaatttattaaaaaaaaaatccaacatcttagcattggttttgttttttccttcaaaattttcaaccaagaatagtgtgaaccttaaatttaaaccgttatattacacacccataacaaacaatccacacacattatcaaatctaaatgtttctttcaattttcacaaatatttgctttaacttttgggagagagctttgaaaattccaatcctttggatatggcctttcaaaattcggataaagagaggttacattctatgaatgcaaaggtgtggtgtgtatgggtactttcaaccttttaaattggtctaaaattactccaaaaatattatttgcatcccaaaattttataaagatatttggtattttatttttatcttgtcataaatctagtattaaaatttataatcatttaacaaaaattccttcttaccttctaaaaaaatacataattaaaataaacactaatatattttaaatattaagccaactaattgaaatgaagaatacacaaaaatcttataataataataataataataatacattgttaagagaaattgaaaacaaaatcaaaataaattataaataaacactaaataaagaaaaaaaaatgaaaattaaactattaagagtaaactttataaattaatttaattttttttatacaaataatattaaagtgtatatatattataattttttggaatgccaatttggtccttacaatttttttgggagtaagtaagtaagaattttattgctcactaaaataccaattgcaacttacaaccaagtacaactaactagtgatactcaaattatctgaccaaatactattctctatactaattttttctttataaaaaatgagaaaatctcaaataaatttctctttaaattttatgagcaataaacttagctattccataaacaattattacaagtctcccaaatagtatacatctgaaaatgtgttttagaccttttggtacacatctatctctttcatcattaatgagatttttttagtatatttttttttccttttataattttgtatgttatagtgttttaacactacatgttaatttttagaaaatttt

SEQ ID NO: 24291 - DNA, 2754 bp, Cannabis sativa
  modified_base (1107)..(1107): a, c, t, g, unknown or other
tcaccaaactaccctcagggaggaacacctcttgggatgagtttgaagggttattccatacctaattcttttaagcccgacaactgccgacagagctgtgcgacttagttgtcattaagcaaaggcccaacgagtcactaaaagactatatccaacgcttcatgcatgaagccaccaaggtaaagaacctaagtgacaacggaaagcgagtcgccaatcaccataatggagggcatcacaatgggaggtcggcaagcgagctgccataatagaaaagaattcaccaacaatatcaagcatttcaaaaatatcagttctcaaaaaatacttaagtgcatataactaatgtttatttttatttatgtttgttctttttcattttataattatgttgttttattttatttagtattaatattttttttttgttattttgtattttttaatatgttagtattttaaattaattattttgtaataaattttaacttgaggattaaaatgtaagcttattttttaaaataaaataaaataagaatattagaatatgaagaatttttttacaccaaattggtatagattcaaaattcaatatcattaatggtgtagaatttagtgtacaccaatttagtgcataatttggtatgtcattagagtaaaatagtgtgaagattccacaccaatttagtgtaataatgtaccattagggattctctaataataaactgagggcccacaataccttcaatctaatttaaacttaaataagttttccaacgccactactaagagtccgtttggcacaacttttgaaaaaactaaaagttgcttttcaaaaaagctgtgacaaaaaagtgtttggtaagtagttaaaagttaatttattgaagaatttatagaaaaactacagctaaaagctaaagctggtacaatccgacttttagaaaaagttgatttgattaaaagactttataataaattattttttatatattacaaaaaaataaaatatttttttgaaggaaaaactatttaaaataaataataaataatatttaaatttttaattttttattatttttttaaaaatattttatatttatattnttattattaacaaataatatcaacctaagttttttataaactataattttttcttttacaagtgataaaaatataatttaaaatattaaaaattatttttattaaatgcatataaatttatactatgaaaaaaaattaattaaaaatatatagaaaataaaaattttacataccatatttatacatatatttgtgattataataaaatagattaaaatattatcactattataatagaatctttacaatactttaaaatttataatttgctaaacacttagctcagtttttttccataattctactataacttttttttccccatctacatctgtttttccccatttttaattcaaaatattgaagaatatctgacataaattgagtttgaattctgaacatcatattttaatctaaacggttgaccatttgatcctgctggggacaaaaaatacatgcccctattgaaggcttttctatatagcatgttttaaaatgttaattcatgttcaagcatacaaattttcttcatatattgtcgatattatttttgtcattaaatttggcatagttcgttcattatatttaacaaaaagaaaatcaagtagttaattttgtaataaaagattaaaatattatcctgcaattacaaaaatgacaatagagctagaaaagtcatccaccttccaccatatatgaagattatgattcaaagaagtgctaatttccgtgtctcaagagcagagctagctatactctatttttgtgtttttaggacaataattaaacaccacttctcaaagaaagcatgtaaattatacaatatcccaataaactacacacaccagtggacgaaaacttagctgcctttttgtgaagctttactacactcaatatttaaacagtccgaatccaccttaacttaacttgattaaaaccaagtcttcaatggaacaatattacacctagctactaacgagtatttcttatgtgagttgaacttagataaagtagagttaaaagagtgtttaaattaagaaaatatgaaactccattgttagaaggaattaacattaacattaattaatttgaatcgtaggtgtggttataggtgtagtttagtagttccacacttcttcttagatgaagttctaaatttgaatcccctcttctccaaagtcaaaaagaaaaattgaatttttaatatttaattattttaataatatgtgataatttaaatttgtcaaatataaattaatttaataaaacaataaaaatataataatatttgctattaaaataaattaagcaaatagtagagagttacttatatttagaaaattatctatctattgagctatgttttttttgtatagttgaaacttattttttaaaatttactccttattttagcttgagaagtgttttaaataatatagttagagatgctcttagttatttaaatttactttacacataaattaagcttgatatatccattcccaccaagtttaaccatcgtatcaaatgcctattcgagttctaaatttacttgcatagccgaagccacgaatgcaaatgctgagaccaactctgtttccactgctatttgccattgacaatataccattttaagaaatatagatt

SEQ ID NO: 24292 - DNA, 2176 bp, Cannabis sativa
tgagcggtctttacagagagagatacgaaaagagagaaaaacatagtgaagagagatatgggaaatctagaccaagactaatgttcttggagcttaaactcaaactgattgttaggggttctttctggaattttttttttaccgtgcactcaacaactcaagcttctaattcatcacattaatggagaagataatttagggaagtaataggacgtaggtccttagtttggccgaacttttataaaaagaattgtgtctcaaatctttatttttctacatttttaatctttgcttattttctggtttaaattacttgtttgttaatcttcttgtgattggttttaacttgtttgaatgttctttgacttgaatctgtgtagtatgattacaacagttgtatcagtgcaatgaattttgaggaggagaactcaatcttgacaagctatcaagattcaagaaccattcaaaaatagtttcatcttttgcaagattcgatcttgagaggtgtgatggatcaggagactttagtctatgtaaggagaagatgatggtcatattgatataccagaaacttgactcaacacttgaagaaagtgttgagaaatcaaaaaaggaatatttgatgcaaccaagaagaaagaaatcaatactatgatgaatcaagcttgatctgtaataataatgaaccttgcagacaatgtgttgagacaagctattggagagaagactgctctggaaattcggagcatgctcgatcaactctacatggccaagaccactgccacaaagatattcttgaaaggggagttttatggttttaagaagactgctactttttcttttgaacaaaatctagattatttaaatataattgctttggctcttataatatggcagaaacaattatagaagaagatcgagttatgattgttgttaatgaaatttgaactattctaatatatagcagggacactctcactttgaaagatgtaatgaacactctaagattaagggatgttgaattgaattggaaaatggaagcaaattaagaatcaagatctaatgaagctttaatggctttaagaagacaacatagaaggggaaattcaagatcaagagaaaattcaagatccagaggaaattcaagatccaaatcaagatcagggaaaattaggaagtatcaccatttagccattgtaacaaatcaaaaaatattagaattaagagacgataaaaagaaaaataaggcagaaaaagacaagagcagtgattctaatgttgtggtggatgagaactacatttttgatgtagatgtgttgacagttttcaaggttcaagatgcaacttcaagcactcgagatgcttgtatcagttcaaatcataaggatcaagatgaaaggattattgacagttgttgtacgtattgttggaatttatgttctaaaagtaagtaattaatgaataatatattagagaatatataaaatataattataaggtaaatgatgtcttaattataagagtaattattaacagactcctttgaaatagagattttccttgatttgggattgtctttttttcccaaggataggtttacaatgtggatggccattaagaaaaggttatctactagagataggctgtacagatttaatataacttcctcgtcggattgtctcatatgtggtgttaaagaagaatctcatgaacatcatttttttagtgtccttacagctctttacttttgcaaaagtactgctgccaatagattggtttgaatacccagaagcatgagttgtttctgttggtgaatcggatcaaaagtggtaaagtccccatttgggaaagaaaaattttcatcctactctaagttctctagtttatcagaataaaaagagcatgaatactgtgtattgggatctcaaagtcccaacaattgatatagttttcaagaatattgtgtatatggtatatgatagaatcaaaaatatgaatataacaaaaatgagtattattgggtgaatagtttcttttgatgtaatttgtttgttgatgtaatacaattgagctaactttccaaaaataataaaaattaatggacgtgcaactacaaagacaaggcatgcacgctgataaagtgcggccacggttcctgcatggttagctagcaagg

SEQ ID NO: 24293 - DNA, 5590 bp, Cannabis sativa
  modified_base (2227)..(2228): a, c, t, g, unknown or other
cacgctgctgcctcgccaatcaacgaatttgcgaaattaagactgttggccgcaccccacaacactgtccctgagtgatctctagccaaagtcgctacgcacatggagtcacaaccaaccttaacatttgattttgatccaatcttctggaaggggagaccaaacaggagacaccaaagcgaagttacaataaagaaacaggtgctccataaattcttcacaccccccacaaagggggcaatgtacctcgtcaatgttgattcttcttgccatgatgcctaggatagggaggacattagacaagatgcaccaccagagaagacttcaatatcatagcttattattctatttactagtattcaataaaaaaataggtcttaacacaaataggtcccagcactaggcataagactcgtacccgaccccagaaccccagatgctaaatcaccaaacctggatctggccccgaccccaaacccatacttaagaattgggtatgtgagagaaaatatatatataagaaaaaggtaatctttaattatatacaagtaaattaattatgttacaaaaattatccaacaaaaaaaacataattacacaattctatacaattttataaatatttacaaataattattaaattcatattatataataataaaaaacataaaagtttacgattttcacatattgattatttttaattaatttcttttaaaaaaatgcataaaattaaatacaaaaatacatatgtcaatatttgtattttgatatattacaaaaataatatgtttactgaaatttaatacaaaattaaatatatataaacatatttaaaatatttgtttatgctttataaacaacgtatatacatgtatgttaaatatttgattattatttgtatttataatgctattataaatctaatatatttattataataatatttcaatagaatttatataatttatttattaaaagttcataaataagtctaaaaataaaatattttatgtttattttgttttaagaaacatttatgttgttctaaaaaaatacttatgtttataagttattcagaaatttgtttttaaaaaaatgaaactgtaaccaaatgtgacattatgtataaagactatgtttatattttatattgataatatttataaattattaatctaatatatttaatatatagttctataagaaaatatgtatttttattgtttatttatataagacttaagaaaaatttattatcttataaaaattgtatagaaaattaaaattatgtttatgtatttaatatagaatgtataattaaatgtaaataaattattttatattacataaaaaaataaaattatataatgtatacaaaattataaattttcttaaaaaaatatacactaaaaataaaatttgtttttaaaaatagaaaataacatattgatgttttatgataaaattgattttgaaaaatttggccaaactctcctttaatttctaattatggcttgctgaatagctttgtttttagaagaaaaaaaaacactgtaatcacacttgtttctctaagcaataaatgtttttttggccaaataccaaataaacaaataaaacttatttcagatttctttagtttaaccactttatggtaatctcttcttctccaatccatctattgataattgtaagaccaagttaatctctgtactagttgttgattgctgtttaactattttctaagccttctcattggctgttttaattcattctttgttttatttttttagaaaactataaatataaggctttgtctctggcttagattacaatttactgagaccaagtttccctcccaccaaactatgttctcaactttctaattataatggttaattagaatttttgcatgaacacatgtaccaaatgatgcccctgaatttttaaggtcgttaaaaatgcctcatgaactattgagattgttagatttaaagattttttttttttaattttaataaaaaatctaacatatactaaaattccggaactataatttagtacattttaaaattcaatggacataatttggtaaatatcaaaatttgaagagtatagtttaatacataaacaatcgaaataataaaattgaatgacaatagacagaagtcttcaaatccaacaatctcaataattcatggaacatttttaacgaccttaaaanntcagggggcataatttaatacatgtcaaagttcagaggacaaaaatcttaattagccaattataatctcacactttcattcccatatacacaaaactttataatactaaaaaacaaaagcctctgtatttacatataataatcagtgactcaaggactaaatgatagaaaataatccaatatttgatttatgcaacaccagcatagtacttactaattacaatcaatgacaagatggtgaacagacttcgtattattctgaaaagcaaatttaagaattataatgcaaataacagactcctataactctatgaacaattttaatttatgaactctcttacttgatcaaaaatcactgtacaaacttgcaaatgatcattgaaagagaaagaataacatttcttactttattgaaatcttgttttctttaatctaaccattaatgattctatagacttttgtattctactgctatctgtttgcctcacctgctgagatatctcttgcaatctctcaactccacgacccaaacttgcgattgatggggcagcaggtgcagattcggcagcacactcaatcccatctccataagcaagcaatcctgtgcacgttgcgacactacacccaaaagttgcccatggtagaaaaccgattggccgaacctggcgctttctcattatttcataaaaagctgttctcatggctgagaggctggttttctcagctgaggctataacgccgtgggcaactgccctgatcttctcagcagaagctgtggctttgaaaagtgatgttgttttgaatccagaaccggcaaaacttggagcaacaacttttgttggaccaagagttttgccaaggacaagcgccaatgccttctgtgtttgagtcaaaatgattttaagtgatgcagggacattcatggttataaccttcatgaaggttgatgcagggacaactttagaaagcgatgaaactcccagagctgctgtagcccctgctcctacagctaccacaggtttattagttatcaaaagtttcttgtctgtctgatttggcatttcctcatcaccttcatcacctatacaaagctgtccaatcatatccttgacttctggaggaactggatggttccagtgctttcttagacccgctaagctactggcatccaccactgcaactatggtcttgaacttcttagtctgggattggagggcgtgtgcaagaagtacttgagatttttcctgaagagaaagatcagagaactcggccttaactgagctgggatcccctattttgttgagaggcagtctagcagcattgttcagagcaattctcagcccctcaactgcaattcggaaggtgtaaacctcagacatgacttttccatcaacagcttcccctttgtttacatcatatagcatcttttgagcatgagcaagagcccttccaatggatgggagatctgcaaatatattatgcaaatcaacaagcagtggataaatggactgagcaaatgatggagcctcataactatcttgaggctgagtttcccccaatcccattttgggtgcagaacttgatggacttaaccttgatattgacatctccataactggtgataaaaccttcaccatttgcgactgaatatcattggtcaagagaaacctccttgagctcaatgtagcaactgaactaaaagccttctgaggaaccaaactactaactaaaccctgaaacttgttcaatacatcggtttcacccggtgtaccattgccagcgagtgataaacatggcgattctatcaccaagaatgaagaccccacctcccgagccgcctttttggctgccaaaagatgtccatgaaaactaacaccaaaaacctctcgtaaaactaaactaccagcaacatcctcgtacttctccttactaactttttccacaaaacatcgtcttaaaacttcaaacgatgaggtaggaagtgggttctcaacacactgatccaattcactctcttgtgcaagtatttcagcaccatgagaaacacccacttgagcaactacagcatcaggcttaatctccctaatcaaacacttaacatccaatgctgactgctcagataaactttgagtagaaagtacgtatatcaccgattgagtttctggctcccaaattgcataaacgaattgcttagtccgctcaggaattggaagcttgcgaactaaatcacaagagactcttaaatcatcgtgtttaagcaccttaaagggccaaagattacgcagatttgagataaacccaagtgccattacatcacaataatgataaacccctgcttgatttactgggaaaaccacctaaacttaataataccttggatgattactcggaaacacgactaacaattaatccaccagcaacctattcacacaaaatttgaatatcatgaattaagacaaataaaaaaacgaaaagaaattcaatgcttgcccagatgaacatatgtgaaaaaactaaaacatgattacttagtcttctttcaagatgaagcccaaaaacacaaagcaagactcatcttgaacatattgaagaaaagcttaatatataaacagcatactctagctaatatataaaccctaattaacgaaaaagaagagaatttaacttttcgtatgtatattatattcgtaattggacctgcaattgatcttaactaaacaaaattaatacataaagattgtctaactcaaagatacaaacttcagactcaaagcttaatgataccatggataatggcttaagtcgattgccttcgaggttggagcagccacggcgctgagagaaagacgtagatagtgttatgagcagagcaggtgcttcgcttgagaggtgagaagggaaaaaatgagaagattttaggatattgatttagggtttttctgagtctgctacacaataaacgtgaatattgatttgaatttaattttgagaaaatccaacaccattgatgagaaggaactgttctgagggttttgaagtgcttaggtcgacgacgaattaatttaacagaaataaaataatagaatatcacatattggaatttggagtgttaaaaaatatatgcacccaaaaatacacatttattataggctaattaggattttcgccgcctgaattttgacatgtaccaaatcatgctcctgaatttttaaggtcgttaaaaatatgctctgaatttttaaggtcgttaaaaatatcctctgaacttttgtctaatttcattcaattttactattagagactttacattgattgtttatgtactaaaccatgctccccagactttgacatttaccaaattat

SEQ ID NO: 24294 - DNA, 2319 bp, Cannabis sativa
tagcaattgttgttgaagagcccagttaagactaagaaaaagcactatggcctccatctcacgagacttaaaattttcgacaattagcattgatagagcagccacaacatgtccattaacatccctaagctcttacaccagtagtgtttgtggatgagttgactattgtgtcaacattgagcttaaaagctccgctgcaacaggtggaaaccaaggagttgaagcaagagcagcgtgttcttgctggtttgaagttgctggtgcagaaatagcagcagcaggggatgttggttgagcatcacagtaattatgcattaacccagtagcaaaaatggctaggtctttggctattcttgcatttttaccatgaactgccttgtttcattcggtccaaatcgcccaaagtatacaaaaaagttgttccatctcatttttagtataaattgaggacagatggatcaagtagtcaccgtttcgcttagatgtacatgcaagccaatcgaaacttagatttagagatctccaaactgtgtttgcatatttacaattgaaaagagcatgtcctattgtatcccaagcttttctgcaaacagagcatgtctaatcagtaatgatcttcctttgaacaagggaagtggccacaggtaaagcatcatgaattacacgccagacaaagatcttaacctttaggggaatctgcaatgaccgaaaaaaatttcccccatgataatgctaaagtagagctagagctatggtcttcttcttctaaagatgttgcaaggtgatagccagtttgaactgcatatatcctcgaagtatgatagtgtcatataagtttatcattggtgctgaaataactcaagggtatagttaggattttcttaacatcaagtgggtagagaacctggtgcaacatggagatatttcattgcctttcttcagtaatgatagaaagtctactgatgcgtcaggaagtaacactagtagttaatttattattggtacaatgccaaaaatctgtatagaactttgcataggccgaataagtatctttcttgcaactttaagattcagtctcattgatagagttagagacttaagatagatttttacgcttttctaaaatcactgctacattctcaaagtaatcaccatctcatcagtagactttctagtactatatcctattagagaaatttagtacaaattttaataccctattagagaaaaaaaatatatcaaaatatcaaattatatagcatttgaaccacttattagattatataaaatattttatctgaattcaaattaatatcaccattttcaaccatttaacacaacgcaccatatatcgaattcaaaaaagaaaaaaatcacattttcttaaaacaaaaagtttttattaaggcataagaatacaaaataattatataaatcctacataatataatataatacatgagaaatattaaatattaagtagtagtgtctagtaatttttaaaatgttatatcattattagtgcaacgaatttatctaataatttttatagaacattgctaaataatccgaagatataccatctcgagctacttgaaattggatattactagtacctaacagcaatattcataaatatatatagagcattgttatttagtatcttaagatattatggtactttacaattggcttgtgatcgtctatattatttattaaataaaaatatgtagaaattaaaatgaaaatatatcaataataatatattattttttgtggtggttaatacccttagcttttcttaatatataatataattcttatatatatatctttttaaacatagagataaagccataaaatttggacataaaatacacttagtttagttgtaggctttgatagtgtatataagtacgtatgtataaatattagaggtccttaaaataatgcctcaaaggaggcaactcgatctcgtcttcctctccaaaagagacacaattactttggagagtagctagcttgaccagtcaaaccctcccaatatgtaaagaataaaattattttttattaaataaaaaaatcactcaaccagctataaatttgtatataattatataaatggtacgcttttctttgtttgatgatcagcctagctagctaggatcaaagttaacattttatacatatatgagtatattttagtataggagaagattatagaatccctagctatatattaatctcctattttgaagcattattatattgggtaaatattatttaaaatcttgtattttgcaaaaattattaattaga

SEQ ID NO: 24295 - DNA, 3482 bp, Cannabis sativa
acgacctgtccatgaagatagttcgagtccctatttcttgaattgtggttataatcctagactcaccttagtcactcctctacttttgacaagaatttccaatcatggcgttgtgatttcgagctttctgttggtgcgcgaaacaagatcgtattcctcaaaggaactctacctcaacctcatgtcgatcatccactgcatcaccattggttttgttgtaatcagatggttatgtcctggatcctccattcggtatcacctgacattaaaagtagcattatgttcttcgaaacagttttaagatgtggcagtagctcaattcacggtatgatcaaggaaacggtccttgcatttttgaactcagagactcgctcatcactctgcatcaaggcgatgattctgtaagttcttactttactaaacttaagtgcatgtgggatgagatccaagaacttcgtccacggattccttgcacatgtgctacatccattgataaccttgcattcttgaatcaagaacaggctcttcaatttttaacaggattaaatgactctctttaccttgttagagctctgattttgctcattaatccttttccatccatgtccaaagtattctccatggtcgtccatgaagaaagacagcgaaaactcaaatcccctcagattccacctcttgttgcatctactcaagattctgccaccaatccagctcttgcacaaaatccctttgcatttgctgctaatgaaaatcaaaatcgcaacaagagaatgagaccttattgtacaatctgtcacaaacctggtcatttgaaagaaaaatgtttctttctcattggttttccaccaggctatggtgacaagaagaaagagcacaggcagctgctaatcaggcatctacctctactaatcctctatcactcttgtccaatctgactaaaccataagacattcaaaacctcatttctctattgactaagaagctgcagccaactacttccacttcagaagcacaaccttttgcttcaaacatttcttgtaataccaaacataattcaaactctctatggattgttgacagtggtgctactcaccacattttctgtgacattttattattttctcaattacatgatatccccattgccacatccatcaaattagcaaatggcttgagtattaaaattcataaatcaagcaacataaaattttccaatcaactctacttatgcaacgttctttatgtacctgatttttaatttaatctgttcagtgttcgtactttcctccaaactctaactaacagcatatttttcacaaaatcttgctgcattttacagggttcccagaacaagaggattgggattgcgaaatgcattggtcatctctattttctagtgcatgattcccctgttgtccatcataatactgtttgtaacatctcttgtaataactctcattcatggcatgcccgacatgggcatccatctatgtaaactacaaatctaatcaataaaatgttacattccaaagattttaatgtttcttctccttgctccatatgtcatcttgcaaagcaaaagaaatatccctttatttcgaataacaactttgctgcatataactttgacctcatacacatggatatttggggccctttccatatccaaagtattgaaggattttgttattttcttactattgtaaatgaccacagtcgcttctgttgggtatatatgttaaaaacaaaagctgaggcacaacttcatatcccttagttttacactcttgtacacacacaatatgctacaaatatcaaagttattcgttgtgataatgcaaaagaacttaatatgacatctttctatgctcaaaagggtataaaaatcaataactcttgtgttgaaacaccttaacaaaattctgtagttgagcaaaaacaccaacatgtcttaaatattgatcgggctttggctttccaatcctcccttttcctaccataaaacagttgtttatctcatcaataggacgcctccccccttattacaacataaaacagcctatgaactcttgcacaataagaagcctacctacagtcacttgaggatttttggctttcttgcatatgcatcttctttacctagcaagagacataaattttctccccgtgctcatgcttgcatcttcattggttatcccaatggcatgaaagcatacacttttcttgatttagctagcaatgctattttcaattctagagatgttattctttatgaaaccattttccctttaaaacgttccttaaaatctgatctcaacaacttttttgccacacctgctacaactatccctgctgcaactttcaccctactactactatcccttcatagcatattgatacagattcacatactgatcctcctaaggatcctaccactcctcctccgcttgtatctattggtacatcaaaaacaactaaaactggcataattgcccatttaaaagatttcatatgcacatcttctactgcatatttacttgacaactatatcaagtatgacaggctccacaaatcttttcaaaatgccatactccaagcatatctctaactcaagccaacttcatacagtcaagcttctaaattttctaaatggctcaaagccgtggataatgaattttttgtccttaaacaaaacaatacatggtctgttgtctctcttccaccagactgccatgttattgcaaacaaatgggtatataagattaaaaacaatttcaaaggtgaagttgtaagatacaaggctcgacttgttgcaaaaggttacaatcaacaacatggtattgactatgttgatacttttgcaccagttgcaaaattcaatacactcaaactctttcttgctcttgctgcccttaacaactgatctcttcaccaaatggacataaacaataccttcctacatggtgatcttgatgaataagtctacataaaaatccctaaatgatatatacatgagggcgagcttcctcccaatgatgtctgcaaattaagcaagagtttatacagtttaaaataatcctctaggcaatggtttcctaagttaagttccactctacttagcaatggttttactcaatccccaaatgatcgttccctatttattagatcttccaataacactttccttgcccttcttgtctatgtcgatgacatagttattgcaagtaacaatgacttggatgcatctgcttttataacctttctaaactcaaaatttcaactcaaggatcttggtccacttcgtttcttccttggattagagatcgctcaatctaaagcaggcattgctgtctctcaaagaccttttaccctgcaaattcacactaaaattggatcccttggcatcaaaacagtctccactcctatggaggccaacctatctctcaagaaagacattgccccctgtttctaaccccacttcc

SEQ ID NO: 24296 - DNA, 2075 bp, Cannabis sativa
ataaaataaaaaggtctttttgtaaaaatccctttatatcttgatttattttaacacaaaagatatgagtgttctgacatataatattttacttggttacacttaacatatatgcagttcacaaacgcaagtctctaactctattctgactatggatgatgatgatgatgatgaaaagtttatcgaaagcttgatgatgaaagatgacaagactaataaaagtggagttgctaaaaataataataataatgaaggatcatgtacaaagattcagaaggttgataaatccaagatgatgacgaaaaacgaaattaaaaaatattactggccacagattattgcaatcggtcctactcatgcagaataccacgagaataagaataatctgaagaaaatattggtcaagaaattcattaaagatggcggaaatctggaagcaaggagtttgctcaaagaaattaaggaaaaattcaatcttgatgaacaaaataagttgttccatgaaaaagtaaaaacaaaacttaatgaaggacaactggcgaggatgttgtttcaagatgggtgtgtagtactccaatttatacatagttatgttaatggtgaaataatagagttcaatgagattagcattgccgaaattgatcagatttgccaggatttgcttttggtggaaaaccaaattccctttgaagtactcgtgatattgatgaggttgagtaagataggatctgatttggctaaaagtgtataccattttatttccatgaacattatggcacctaatatattttatgagaaacggctcaatcacaacttaagtcgtgtgccagccaatccagaagaactctttcgtgggaatcatatgctgaggctgcctgttcatcttcttgatcttcttagatcggagctcttatatgaagaagaacaagaacaagagtgtagggatcctcctatacctgatgatgaccataagccagaaagagaaaaaataaaaaataaggacgatgctagtgcccactcatcctcttattaccaaaggtcatttcgcaatgttcaagatcttaaggaagtggatataaagttaaaggctaactattctaagggcttgaaatctgtatccttctcatcaacttctttatttttttcacctacacttaggcttccaccgttaattgttgataattcaacaaaacaaaagttgttgaacttggttgcgtatgagatgttccccgataacaataagagaaactacgctattgcttcttatgtgaggttattagattcactcatcgactgtgaaaaagatgttaaagatttgagatcagcacatatacttcgcaatcttcttggtagcgacaaagaagtagctgaattgttcaacaatataagctacatcaacttgggtcccaagcatgacatttatgtggatgtgaaaaaacagatacaaaagcattaccaaaaaaaatgggcttcttggacagctgagtttcaccaacaacattgtagaaatccctctactttctttgcatttgttgttggacttgtcattcttgtagcaacatgtattcaagctatttacaccgtcatccaagctgaataggatcaatcgagggaggcaagactactaaataaggactaatcaactggtaaatatatatataatttatttatatatatttaaaaagaacatgcttatatatatgatagaaacggtacttttgttttgtcccaattggtagatactcatttttttattattatttttatactagtgcaaattttaaactttatttttaataatgtaaattattttaaaatttttgaaaaatagtaaaaatgcatgatataatttcatatatttgataatttctcctctttaatttctttaaccaataatgcagtggaacgaaattcgaaggagagagcttggtgtttgattgatcggtaatcttcgttttcacatttcgtatttatgatattttttacaactatatctattctatataaagtgtgcctatataactaaatttcttggtttatgagaaattcataggtgactttttatttatatttaa

SEQ ID NO: 24297 - DNA, 1453 bp, Cannabis sativa
cataattaattatttttcattttactatttttttcaattttattttcttcccaacaatatgaacaatttttctcgttcccactatcttcaatttttttttttcaaataaatgtactatcttttttactctttgttcaattatcaattgtttatttcaaatgttgtagaatattgtttttaaggaaattaacatttcaaaatgttgtagaaattaacattgtagacattgacttggtttacctactaaactaacattcttatcccctcaaaaaagaatgattataaatactcattcattgtattttatttataaatactaaatgtataaatatgtaggagctagataccaaagaaggtagattacagattgtgaataaaaaacaaggtagcatataacggtttttgcaaaagatggtacatatacatgtataagttaccataaagttttcttcaaatatatatgtagcatgaaatgtctatgtgaccgccggtcactctagattaggaatgtgactctcctggttgcaaggataaaagtgaacaaaatggtatcaatgcacaataatagaaaagaaaatctttttaaggcaaagtggcatatcatatacaagtgaaaaattgtatcattcaccaccaaaatctttcaaaaaagggatgataaaaaaagacccacacaaatggctttacataaatatatttccatgattaatttctagggattcttttcaaattaatttatttttctccttctagggtttctttgggcaacaaaaagaaatatcagaaggtaatgatgatgaatcttgggtgcaaatctttcccctctgcatcggcggtgaagttatcattatggtttttgtgtaagaggttttatttgactttttgcagaaaataaaaaaattaaagaaatgaaaaagcttctcacctttctaatctcccttttccctaatcaacttcttttctttttctttttcatgtttttttttttttggttttattttagtcactttacccaactccatatatacatgatataaccccccattgcccatttcccaaaccccaaatcacaccccatgatactgctatcatcaattcaattaagctttaaaaagttagataacttttgtgtttttttgttttattttgttttcccatcagttaaaaaatctgtgtggaccaagtttacattgttgagatatacatatgtttgattgcataattttttttagcacattgatcgatcagattattacatattattactatttaataattgtgtgctttttgtacttcatgatccgtttgttaaactgatcagataaaatgatgaagtagttcatttaggaaacttaattttcatcaatcatattacctaattgtctgtctttgttggaggaagaaacctagttatttgatctagacaacactctattttcaataataccacaag

SEQ ID NO: 24298 - DNA, 4897 bp, Cannabis sativa
acaaatgagtttagtggcggttttgtaaatgacattacaacatgctataggacggaaatcactaactgcattagggcacttatacttaggaataagtgttaaaacaatagtattgatttctttgaggatctgacctgtatgcaagaaagataatatcgcttcactaatatcttctcctattaagtcccaattgtcctggaaaaaacaactggtgtagccatatggacctggtgctttgattcctggaattgcaaagatagctttcttgacttcgtctttagaaaattctttcagtaccaagtctgcttgatccttgttaacaagaggccccaacatcataactccttgattaaccttcttccttccttccattttagtaccaagtaggtgctgataataagcaatgaaagcagctgaaatctgatctgctttatcagttcgggatccttgatggtcttcaatagaaagaatactattagcccttctcctctccttgatgctagcatggaagatggatgtgttgtcatctccatttttaatccaagagaccttgaatttttgaagcaaaaatgagttgagtcccttcaggagttgtccatattttatccgaacaacattttcagtagctataaggtctgaattaagaggatcaaattgtaatttcagctgagtttcaaggagctctttctttgcttcatcagtagcattttggatgttagaaaaatgctgtcgattcagctctttaaaagctccctttagttgcttcagctttgttacaatttgatacatcttagatccgtcaattctttgattccaaactccagaaacgatcccattataactaggatgagcaatccacatcttgaagtacttaaatggcttttttccaccaagtatttcatgagacaaagagattatagctggagtgtgatcaaataattcctcagccgcaaagataacttcagcagaagagaaactatctaaccacttttgattagcaagaactcggtctatcttggaacagattctctcatttccttgcctcttattattccaagtgtagaagcagcccccatacttaacatcttcaagcatacaactttccacacaatcaatgaactcagtttcttccaagtatttcactcttttcccaatcctttcctctttgaacaagatatcattaaaatctcccataaccatccatggttcaagggaaatcaaactacacaaatcattccataagagtttcctaccctctatatcattgaatgcatacacaaacgtagtaaagaaagacttaccatccaaagtagcgacttgtagatggataagttggcttgtacatttgagtatgttcactgaaaaactagagggattccatgctacaactattcggcctccatcatgccaagaattattagatgtaaagcaccatcctttgaatatatttaagtataagaccccaagttttgaggcctttactctcgtctcgaggagaccaacaagaccagccttattagcatgcaacatgcctttgacttgattttgctttccatggtcattgatccctcggacgttccaacaaatgattctatccatttccaagaggaggatctccccctcctcttgtgttccccactgttacaacattgttggtgccaatcataattctcccatcattataagcaccagctgaaccctgtctatctgcaaaaccaacagaaacttgtccttctgcctcattttggtcagcctcattcctttcagttagcacctgataggtgttagtaagttgtgttgtcccaacatccaccttagtcttcactttgagacccttacctacttgtctaaagccatcactgtcagtttcatttcttttttcaacaccagaaatagcagtctttctgctatctttgactacccattgttgttgtttcccttccttctttttgcaatcttcagtagtatggcccaatcctttgcaatggttgcattgaagaggcttccactcatatttaatctccgtaaacacattgaatccatgttcatcttcaaaagacactcgattgggaaaatcttgctgtattgacacttctatgagaactctcgggtagctcaatttattccttttctttgtcatattatccacctgcagaggggtgcccaattgccctacaattttgaataaagatctctcaccccaatatttaagttcaagttctggtaattgaatccaaattgggactgatctaatgtcttccttcttgaagttgacatccggatcccaagctttcatcactacaggtctattattaaagaacacatatccaccattcaaaatttcatccctgatttccacagattcaaatcgcaccagaaaaacaccataagagagggatcctactttatcaaccttatccttccatatcctcctaatgaaaccttcaatgactgataatgggggattagcccctaggacatagcagacaatagaagatttccaaaactgaacctcatcctcaatatcttcaagggtgatcttaaccttactagcaatctcagagctcttaaaagaggaatctaggtttctcaccacagtactagaacgtaatataagaggagttatagagttaccttgtcgaacgttggtcgaggattgcctatttgcattcagaaagaatgcgaaatctctgctaacatcttcctgcctctgaatcgcttgcagagacgacttcggggataaaaccagttggttctcatcctgcgatctcatcctctcatcttcgcctccatcttcaccatcagaaaaatcgattggctcaataccaagaactgcatccatcgttttagttttacgcacatctgcagttgaaatagggcctctctttttcggtttcttgatctctgatttctgcttccctcccctgtctcgctcgagtttgttttcgccatagcaccagccagaagctgcacgcgagagagaaaggaaaaagcccctttaggtgtattgaaaaaagttatcattaccatttaatatatcgtcggaggaactccacagtgtaaaaatggaatcatttaattattattatggtgtaattatcacacacatatatagtactaactagtagcttgaattgaaatatcggtttgaatcataaaatccacacattatataatcaaagagggctttcttagaaattttttaatcctcaactcaactatattggaagtatttatatatctatatatcactctatctacttataggggttattttctctattcaagtcaactagcttagaataatacataattattccccacttagtccactcttttggaaagtgaattatattttattttataattatgccaatttataactatgtaaaacatatgggatatacattggatatgtcatgtgcattactttcacttttactttgtttttccaccccctaggttaaaagtaccaaatatattcaccatcaaattatgatccttgtgatatattagtatttagtagttattgttttatgttttggaaataagatgaatggtattgatctatttacctcaaaatatttcacaatgtgctcatgaacctaacacataatattaatgagtcatgttttaactgaaaataatatggtgtggcattattctagactagtgcagcagctagccaagtcaggtcatctaaataatctaacttaggcctttagaaatgtcaactccattaacatattcttaagttgttaattaattaaaaagtttctagtttgactagtcaataatatggtgatttttatcaaggaaattcttcttcttcttcttacttttattttttggaaatattttatcaaaagttcatgcattcaaattgtgacttttgtactccttaaagtactaacacttgtaaacaatattttactaatttgaatatctttaaatttagcttattaatccttcgaggtaagcctctttttctcctatttcgttatgcatccggttccgttatacaactctatctctgtatttcatatccttctatgaaaaattgagtgttgagtaccgtcctagcgcattcgaactggtccttgcctctttctctatgattaatattaaattttataaataatattaagataaaagatacaaatttgtaagaaaataatatatatatatatgataacccttctcaaaatattgttagagcatttcacatccaaaaaagagtgtcaaagtccaaccatcaataacaattaataataataataaaatatttctaaaaaatatttcttcttccttatttattggatgtaattttactaatattagtagatcttgtaattttgtagcccataatatggtaaattgggcttttgctcatcagaggtttggttttattccactatcaactgtccttgtaaacttattttataatgacttgaaagtctaattttacccatctattataagtacgttttttttttcaaaaaaaaaaaaaataataataacaatttataataataaaaaaagatttctaaaaaatatatatttattatgttggcacatgtgccaaattttacaatattgctcttctctctcttccatctcatctcacatgaacccacttatgacaaacacatcttgtgttcatatatgcaacaataaaatagaaccaaatgtaacaaaaaaaattattttcaaccttaaatataagtagcatagctcttgtgctcctaactcatttttattattagttagtttgtaaatattctaattaaaaaataaaaaaagaggtccactatggcagctagcgttgaagctggctttaggcaacattttaggggtttttacactagatgttaaatttggcatcttttttacattt

SEQ ID NO: 24299 - DNA, 2140 bp, Cannabis sativa
cttaattattatatattattatcatgttctatattatatacaaattaattttgggtttattgttaatttatctaacaactaccttttatttccagccttaaaagtggcactttcaatgaaagttatgggatacaatgagttcataaatagatgggtcgtgtttttaactcgattgataacatagataaaatatgaggtgaatcatagttagcttttctaactaactatatagttaagttggtttacttggataagttagtttgactcatatagttaggttgttagaaccatagttagcttttctaactaaccatggtctcttcctttacatgttataaattcatggcactgtaaatcttttcttcagaataagcataataaaaagaatcatcttcttcttacttcttcctttgtttttctctatttctcatatggtatcaaaagttatcttgcccacagcttccatggcaagaccttccacacgatcccaagatggcgctcctccgtccacacgatctcacgacagcgttcctccgtccacaactgaacatcctgtcactgctatcagccctgagacggttcttgatcaaaacatgtcttcttcagctgatcctcgtcaagagtccaacactaggcgcccacctcagaacacatccaatgttccagatctggtatcccccattgatgctgccaagatcataccagcagccccaaaattaacatctgcagctgcaaataaacaaccagtagctgccaaacctacaccagcagttgcacataacaacagtcactgtaaacgaaacaccaactgttgtcaaaactataccagcagccgcatctaatacacctgctgcttcccaactcaacccaaaagcaaccaaatctggccgagttatggccaaactgcaacatcttactgactatgtgtgtcatacttcatccacatctcatcccattgaaccttttctatcatatatcaaattacaacctcagtttagagctgccattctagcaacgtattttgaagttgaaccacagaattatgctgaagcatcccaatttaaacattggttactagcaatggacaatgagaccaaagctcttgagcaaaataacacatgggtcataacaaaacttcccccaggccacaaagcaattggctacaagtgggtttataaagttaagtacaatgaaaaaagagaagtagttcactttaaagctcgcctagtagccaaaggctacaaccaaaggcaaggcatcgactactcccaaacttatgcacccgtagcaaaattcaatactttaaaagtgttccttgctttggctgccatgaataactggaatgtccatcaattggacatcaataatgctttcctacatgaagacctccatgaggaggtctacattaaaatcccacctggctataaggcacctccaaacaccgtttacaaactcaacaaaagtatttatggtcaacaggcttcacgacaatggttgacaaacttagtcgaactcttccttcatatggtttccaacaatccctatcagattactccttgttcataaaaaataccaacaacatcttcattgttgtattggtatatgttgatgacatcatcgttgctagcaacaatgacattgctattactcatttcaaacaatatttagacactcacttcaaactcaaagacatcggggtacttcggttctttcttggccttgagattggccgcaacaaacaagggatatccatctcccaaagacccttcacacttcagctcttagctgacacaggatatctaggatccaaacccgtgtctactcttatggaaacaaacctaaagttgagtaaagacaaaggggaccatctcgttgatcctaccccattttctagcctaattggcaaacttatttaactcaccataacaagacctgacataacatatgctgttaatcacctaagtcagtttttaacttctcccaaagtccaacatctccacgctgctcatagaattttccaatacctcaaaagcacacctagacaaggcttgtttttccatcaaatacatctctaaaattgacaggattcgctgaaactagtctttctccatcaaatgtccaaatatctttctttttagat

SEQ ID NO: 24300 - DNA, 1633 bp, Cannabis sativa
tttttggtaacatatatttaaaataataaataatttgaatattattataagttttgtcctttacataagttttttcttacatctgagtcctttctcacagtctctttctctcttttatatcacattcacacacacactcgtcacaaccattttcactataaaacacacaacacaactcaacttctctctcttcttctctttctctctctacaaacctcaaaactcagaccacaaacatggctacacagagatgaagatgaagatgaagatgaagatgaagaacaacaacaatactactgattatcacagtcattgaatagctttacctacctactttctatgttgttgttgagtttctactagttcttactctgtacaaagactcagagcttttctcattttttgaggtatttatcacaagactcaccccttgcctctgccataaaaggtcagtttttgatgtttagtgttttggatttttgttttattgtttttgattttcattttgagttttcttcttcgttttctctgtttgtctctttcctattcttgatgataactcaaaaaacaaaggtagaaagggatagtacaagatgagatgatgattttttttttctctttctatatctatatattattattatgtatatatttgttttcgaatttcgagcttaatcttttttgttttcatgtgcaatgtgtcttcaggttctaatctacacatatacacagtttcatagctcggcaaaattccagatggtgaaatgcccttttatgatcaacggtttgatctctctcgcttaactcgccacaaccatcaccaccgactctctcactattttcatttaatcgtcttcttcttcttcttctgataatgataatgggtatagacctttcgtcggcggcggaaataaatgaaacgtttccaattttggaactcgcttcaattggcagcaatctcactttagttctagttttcctattcatcgtctccgctaggaagatttttgtatgtgcaggtcgaattcggtttcttaaggatgatttaactccgaatggtggtagtagtccaattcagaggaatagtggagttgacggagaaattgaagatgttaggatcggtactgagttcaaaatcaccgtttgttgttgtttttatgtgttgtttgttcaggttgtggtgctagggtttgatggtgttggtttaataagagaatctttgaatgaagagcttgtgaattggtctgtgatttggttaccagctgcacaaagcttagcttggtttgtattgagcttttcagctctgcattgtaaattcaaggtgtctgagaaatttccattgttgttaaggctatggtggtttgtatcgtttgtgatatgtttatgtacgttatactttgatgctagaggttttctagttgatgatggctcaaaatctctgccttcttctcatgctgtggctaatttggcctcaacaccagctctagcttttctttgtttcattgctatcagaggcagtacaggtaataatcaaagctatctcttttaattccttagttcaactttagcaaagaagaaaattccttagttcaaatttcattgctgaattaagacaaattatcataaaagttaa

SEQ ID NO: 24301 - DNA, 2988 bp, Cannabis sativa
attattaattagtgacaaatgagtaaataaaaaatataacattaattatggtataaatttaatccattccatattttgtgcaaaattttacttaatttttagcatgtgccaaagtacttgacacaccttttacactattattggagcttcattattttgaatgagctaaattatgggtagtaatacaccacttttatagccctctattagagatgttactttaaggtgcttaacatcatactgatatgatacgttataagtggttagcagtttcccatataaataaaaatgtgtaagatccgatattaaattgcaacgtatatcacctcttgtagtgcttaacaccttaacgtacctcttattatttatcttctaaaaaatatcttctatctctaatgtagtcttgcagttaggcctcactaaagattatatttaaaaaaagtgagatttcattaaatacactaatacagtgggtgtttttttttaactagaaaaacatttacagttaattaagttttattattttaaatttgcatttattttttcattaaaataaaattgaagattatcaaaggacacacttaattaataattaatggtataaacaaatatgtataaagatttttgcaatatatatttatcatatcttccaacacaccattttattgagataatgtattttatcgtttaaaacatgtataatatagttttgtcactaatatctaaattaataatcgttggcttttttttttttctaatctaagacaatcatattcagagacgaactacatgatcctaaaaatgttgtttgctcaaatttaaaaattaaaggcaatatatggtttttttttcctagtataaatatatactacataccctgatatatataatcttaagtcgacctcacattctttaattaaacgaaatatttataaattaacaatccacttatttatttatttttcttaaaaaaataaaaataaaaagaggaaaggaagaagaacgtgaatcgtgaaatttagatccaatgaatatatgtaagcatatatgtaaacgatatattaatctaacattccaaccataatgaatacttttgaattaaaaactaattaaaagcaacaaatattgtcttcctttttcttaataacttaattagcctctcttttttcttctagtcatttcaactttaaattaaaatatcacacaacctttagttttgcaaaaaaagtagaagattataaagaacgatttatacgaatttcaacaatgcatgtattttatcttatttatttgttacattctctgtttttctaaaaataatttttaaactattttgtgagcaataaagtttttttattaaataataataataatcataaggatatataatttcttgatagcaaacaatgctagctaggggcgaacaatgctaagctcaagtttgagaagattgtttggtgttcattatcggctgcaaatcatcgcttcataatgtggctggtaattcagattaattttcttattggagataatttgattaagaaatatttatatgttgagtctgctaattaactatccaatgtgtgagatataaacataaaagatcatgcacacttatttttctctggctcatactcatggagagttttgcaaagaattagaagttggttgggaagtcttatttgatcgagcacattttattcaataggtgaattaattataataagagaacgaatagtgttattactattgtgctctatgtagctttgcaaggacaatttataacatatgtggatgaatagcaacttttgtccatatttgagatgtttaactccttatatatatagatgctctcaaacttgtcaaggctttgtaattgttgagttgtgttggagggttttatccctgatttgtcaatgagcttgtttgataaatgaagttttatttcttgataataaaattacacattattctttaaggtaaatattattttttattttttgttttgtaaaagttattaattggattattttttgtttaataataaaatagattctttattttttaaaatggtacaaatagaaccctcaactgttttttttaattaaaatgaaggtgttatgacaaaaatgattgactgtattttttgtatctgttcatactaagaattgtcttcaagtttgtatttaaaaaaaaatcaaaaattgaacttaagatctcatttttactattttaaaaaatataacgtttattttactatttaacaaaacagagattagtaatttttgtaaatacagagtttagaacagtatttactcttatttttttataataaataaaaataaaaaataaaatcaagttatttaaacttaatttttaacaaaattttattttaatataattaaattagtttgtcaaatttcttttggttatggtgacgaattttttaaatctatttactatattattaaaaaaatgatcaaaattaaatataaatttacttttaaattatttcataaaaaaatgagagttaaaaaaaattaattaaaaaaacaaacgctaataattaatattacataatcaaaatgataccaaatctatcaacagtaatattaagaataaataggatttcctccatattttgtctaggactttttttttttctgttactataaaagttgtagcaaatattcatagtactaatgattaattatgagaatagagttaatatttatatatttaatattaataaattagatttgaagttattaaaagtagctaaatagacatttttacatcactagaatcactcatggccatatagataaattaattttataaaaaaaatcgtagaatataattgaattaatgatgggggtaattgtaacgatttataaagtcaaaaggacaaaaaaacactagttctagcggaaaaactaatatttattctaatattaattaaaaggaaaaaaaaaagctatgaaaaaa

SEQ ID NO: 24302 - DNA, 1470 bp, Cannabis sativa
aacaaaggggcataattacagaatgtggcattatcattttctataacattgaagtgcaaaagtttaagatccacctaccgaaagaagatcaacaccagctgattcgagatttggaacaagactcgctatgtcctgttaagtgaatattaagccagttagagattttcagtaacaaatgtcaccaggatcttgtaaaggaagttgtagcgaacaaaacaaattacctttgagggccacttaggaaatgaagatttataatcaggtagagagcccactcccggccatgtatcctcggtcggagtacccaatattcttcataaacaaaatagcatatgagaatataatatataaatgatgcataactttggaattgtttgcagctacttcttttcccaaaaaaaaaaaaaaagtcctctcctcgcgtaatcctaccagaaaactaaagcaattgacatgtaggtactaggatcgaaccttgaaccttatgggactgcccctcttgggtctttgcagctactttcttttatgttatattcggaactagaagctgtagcctcatttccatcaatttctagccaactaacttttacaaactgattttacaactatttaaaaactatgacaaagtgagaatggaggttcaaaaactaagtttgaccacaataaggaaagtaaagtaattacagagtcatcagtgttaatgtaccctttttaagttttaaaatttcaataagtttagaggaatggggctattaatccagatgctggactcagatacactttcattcaataaaaggaagagaaaaataacaagatgggaatgcgaaaaagaaaggacaaaacgaatactttgttcagaaatagactcacctgaatatcttgaacaactcatcaatctcagagtccccagggaataatggtcgttgattcagcatctcagcaaatatacaccctactgaccaaatatcaacaggggtggagtaatgacgggatccaagcaatatttctggtgctctgtaccagagggtcaccacctagacagagccaccacaaaattataaacccaagcttggcaataattggtagagtaatgatggattccaagcaatattttggtgctctgtaccagagggtcaccacctagacagagccaccgcagaattattaaaccaatcctggtaatattttgtagagtggtgtcttaaactactaaggccatagaaatatatctatatatataatgtatatgcatatatatataattatatcacttctcagtctctaccaagtaatttgtcaatttaaaaaggaaatcatgtttctacttctcacaggtaggatattgcggcctaaatacagggaagagaaggaaagttgatcatagagcttagagagccaattatatattaagctaatgagaaataactacaaacacagaagaaaatgagaatctactgcataatcatacct

SEQ ID NO: 24303 - DNA, 1941 bp, Cannabis sativa
atggcataaaacccaacacttcattcttcaaggtttttttccctttccttttttctaagtatgaagattgagctttatgattaattaatttcgggcatagctggtgctatatacgtatatcaaaatatcatactaattaaaacaaaactaacactactacaaaaaggagtatccgtgacggtcttaagaatgttttttagtaaactttcgctaaaaaaattaagcaactgtttaaaaccgtcatgaaaaattaagtatttccaatagtttaaaacactagttacaaaaataggacacagttttaagtaaaaattgcaaaaaattacattcccctatacccaatagatttaaaccgtcaggtataaagcctatgaaaccctttatatcatccccacaaaggagctcaatctcccacctaaccccacgaaaaccagtgtagccataccctaacccctaaaacaccatttcctctctctcgaattagcaacgacgaccaccaccaccgcaacctaaccacccacatgcacaccccaatcaatctctctctcgtctatctcgtttatttcgacaaccacatgaaactcacccactaccattcttctctctcggctatctcgacaaccacacaaaacccaccacaaccacggcgaaaagattagagttctgggcgagggagcatctaagtctaacaaggttaagggtataaatttagactatgaggatgatcacattccaaaaataataggaaatgcacaatttgaatgaaatgtcaatccattataatttcaaagttttgtagaggatgtcaagaagcctatataccctaaatgtaattagtttactaaattaatgactcttattagactatacaatataaaatccaaacactattaggtaaagaagacactttgttccttagcatacaatatatctcggtacatagttaaaaaaagtactattaacattattattagcatacaatatatctcggtacatagttaaaaaaagtactattaacattattattatgtcacacatcatattgatttacttttgctcattaatccacttgtatgttgataggtatatgtggaaatatctgaatccctcagcaatgtatctaacacactactttgcatatcacgagatcattcgtgtaatgtactcaaataccaatcgtactatataattagtaatcaattatgcacccaagaccacgataaatctagaaaaacataaaatagtagtattatgatagttgctaagactttaagcctagttcaaaagataaaaatcttattgaatgtgacatgtctctctacagtgtaattcaagaaatttaggaattagattacagtagttttagatccctgttttcttttatgattgtgttaggagtgataatagggtcaaagacgatgaatttggatccttgttacccaaattgaagcatgggtgtgagttaatgttctacttcaagatatatcgtggcctaaagtgagtgagtagattaaaaactaacataaaggcaacataaattttattatttgtgtttttttctatggattatgatttgtactttttattgggatttataccctaaaagcaagtagttaattgatatattagaaaatatatgaaatacatttataagatgaatgatacattaattataagagtataattattaaatatataaaaatttcttattcatatggagaaggtataatcttgtaaggatgtacaagagaattaagattatacgatatgaataaaagaagtcggtaatgtattagagtattgggaatctttaatatgaaactgctaagtatggtttactatatactatacttctaatgtgtgtgattttaatttggatcacatatgtagatgaacaagtagtaaatgtattgtgcataattagattatgcatgaatggac

SEQ ID NO: 24304 - DNA, 1759 bp, Cannabis sativa
  modified_base (1722)..(1724): a, c, t, g, unknown or other
aacacatatacgaacaccactgtaatcagtaagtagtagacgacacaatcgaaaaaacagagtactatagagagaacgtcacaaccatgtcaaaagacaagacttcataaggattttacatattattcaataatactcttattcattgctgaagagaaaaaaaaaactttattaaatttcgttttatattgcgatcgactgcaattttttttagggaggatcattggacgttttttggtatttaatatcaattttaacgtggactttttaaatattaatatggatacaataaattccgtttgatgacatcatattaacttctcacatcatgatattgaacagacgtgatgtgaagtcttttataattttaaatattgatttcctttttttaaagtttgttcggaccaagatagaatagagtaaatttaataatttgtagtttgtatacttaatattttgttttccaatttttttaggattttttttttttgtgatttgttcaaatgtaattttgatactataaaatttaaggtttattttttatttttttcagaattttattgatgtatgtacaaatatatttatgatattatataccgtaggtttttttttttttggtatattataaggttgtatattgtgtagtatactataatttttgcatccgatttattttattaatcatatatttgatgattgatataattttgtttgccactaatatacatgtcattttatatgatgtaatttttgtaaaatcttttggatatttttttttattattgggaattttatttgagttgttgttattttgatacagtatactttagggttttttattttttattttttaataaatatgtttgtaattacaaaggactgttatatatgtgcatttttcatatgattatgatataccaaaaagttacttatatatttgaatctagtgctttttgtatccccttttctttggtcaataaactggtattttaaattttggtagaagtacaatgatattttgatctcatatcaaatatattttacaatgttacatcacctagtggtagtatgttgtctttgtatgttgaaataaaaactatttttatacagtattaggagaaatagttgtagcaagaaaagtttcttttggtgagtacaaccactgtgtgagagcaaaatattttattacagctgaacttttacaactgcatggtttgttctctatgtttacaatgtacaagtttgtatttgtataatcatacactttgtataaatttagattttttttctcaacctgcagtgtaaagttaatcaagtatttattaagttgtttataataggaaactatatagttaattgttggtgctaaatatttttaaaatactattatattatatgacaactcattaattttgaaaataaactttaaggttatccaaatatattttaaataataagacaccataatataactttaaaataactatttttttttattaagatgtttacaattatgctttgtaaacatcttatattatatgatataaaaataaaatttatttatgtaaaagtaattaattaattttctattggtattatatactgattagttaccattttataatttttatttagttaaaacatcaagtttatttttaaaattcagaatacttatacaataaaaagtatgtttgactagtaaattatcgcacctacggtccnnncaattgggagagaatcaatagatttcttttctgga

SEQ ID NO: 24305 - DNA, 2270 bp, Cannabis sativa
ttttgtgacattttacaaatgacgaatatattaaatatggtactattcacgtcagtcaacgcgatgaatagtcgcgttgaccgacgtgaatagtgaattttgtagtagtgaacattcataataattaatggtgcctttactaaattataactggaatcaaaataattaatgagagaaatgaatcggtttaaaatagaaaataatcagaaataatattttattatggtgtttactaaactgtttggaaagaaaatcataatcatattattttatttacctaaactagaaaaggtaatcgaaatactttaatttgacaacattaccattataagaaaatgtaattatttttaattaataaaataaaattaaataaactaagtaaggattgagaaaagtatttcctataaaaataaaacattttcctttatttttttttttttctaatttgtgtgcccccattatttttccctttgcaaaatttagtaaggaattgtatgagaatcaacaccataccattaattctcatattctctttaagtaaacatgccaaatagaataacatctaatgatgtcgattactatagctcaaaatataaataattatacatgtatatatatatagtaattgaataatgaattaatttgtgtgatgttatgttattatattacagagtaatttacggtataaataaataagtttaactttgttgtaaataaatacataagtttaattttttgcggtaataatatttaaattataattctaaaacttctataggtacctaactgttaattgttaagtaaattaccacgtggcaatcctgaatggtacagatcattatttatttattttttaaaagaataatttaaatataccaataaaaaaaaataacacatgaataatgacttgatatttaatggtcagatacttacaaaaatttcaaaaataaaatttaagtattattaatgctaaaaattaaattttaatatttatttataatcaaaaattaaatttaaatatttacaccttaaattaatcttatattacgtgtgagttttggtaatgtttatgaattgatttgacactaaaaatagccttatcaaaaaggagaagatatagaaagggcccacaattgaagggcaaacaaaagaatcatgatcagcatggtgtactgggcatgatgataaaaggacttattatttaattaatttgcttcatacctatatatatcactaaaaagaagaaaaagaagtttaatcatttataataacaacaaaaaaacagttaataataaaccatgtgacatcatggtttaggcaacttgattaaggttggacctacattatttcacttggacaactacaattatctatataaatataataatattcttatatatagtcttcttttttatatatatatatattgtatatagattgatataaagaaagcaagagaaggatcaagcatgaccattgatgatgaaactcatttcttataataataataattattaattattaacaataataatacaaaagttgaaagaaaaagttatattatatggagagaaaaagaaggctttgatttttattttattttttctttaaagaattaaaaggtatctctaatgaagtgatcaagctaaccaaagtagtagatggtggagtagtaagatatccacacacctaagccactcttttctttttttcatactaatcttattcatttatatatgtttgtgtgtgttttcctacatggctaccaccaaccccaaaaaagttctatctttatatgtacatatttcatgctcaatattctataaatatgtaatattccaaagcctactttttataataacaaattgatttatattccaagtttccatcatttaattaaattatggaattagattattgattggatcatatgttctcttctaaaaaaaagtagtggcaatgcttatgcccttcttaatttaagatattttccactcaagttgttattgcaaataatatacatgactatatcgtgatgggtaaaatatttttaaaatgggtaagatggtaataaacaagtcaaagaactagtgtaatataattaagttagagcttaaccatttaagaattaaggaaaatctgctaaaaaaaagactcaatctgtttctcctggtgttactgatgaacatgctgctgcatctgcctccacttttgctcttagaaatggctgaattcaacttgcgttcgggaagaatggagacaagtcaagc

SEQ ID NO: 24306 - DNA, 3453 bp, Cannabis sativa
taattagttttctgatatttttccatagtttctgattgtttgaacttatctaaatgttagtatgactctatgcggcttattaaaagtccttgtttcttctttttgtgcagtccctaagaaatctgttattatttcaatatcttgtcaacattcttgaaggtgattttgttccacgcaatagtgcatataatgaaggtatttcatataattgtcattgtatggttttatggatttagctccacgtgtatgctgtaagtcactgttgtttgcaggacttgtgagctggacgcctgtgaaagagtctttgcttaatatgcttttggtatgtctcaagaaaagaataatgaagggatttactcttgttgatgtgctattttcaaagtgatttagtgtatcatggctcttatgtttgaagctaatcttctgttgtagggatcacgaaaaataaactacaaaaacttggttaaggattgtttaactattatgtgtcaattgtaccagagttctgaagtttctgaagaaaaatcagctaaaaattgtgacacagctgtgatacttgctttacctgaagtcggaaagaatgcctgcatttctatgcagaaatttctcacaattgtaagtctcccatgaggtgtcaattagtatattgtttgagccattttcatctggggggctgatttttagttttgcttgatttttagattatggagctagattcatctaagaagaatgctgataaggaaggttctactacaagagctgatggtatcaggtaaatagtagctcaatttacaaatttatttcttcatctcttttatataatactcctataataatgaaaaaatgaattccccactgaaatatgatgcaggactccgatggtagagctaattgtagatgagcttacttataatagggatattttccacccttttcttcaggtaatcacctccacttcctgcaacttgttttctttttgtccaaactgtttgtgcatagtataaatcagtaaggtgttgagacagctcttttgtccaagttcaattttatgtgttgttgttttaactttcttatggttacaattgtgtgtgatgatatttgatggcctttcaatatttttcttactggtttaggaacaattaagattttatcttactctaaataatgaatttgccgtgatttgttccccctgttttatggttatttgtataatgagtttgtagtagttatttttgtctagaagatatataatttgcgaagaatgtggttaccagcagccaaacttgggatgttttgcaggtatacgatgaccctaaatggaagcttgaacttgttgtgctgtatctttggaaatatgtgggaaaggtaagtgagttcttggagtgtaaaaagaacaaagtagttaaccattggtaagactttcacatacattggccaaggacatttcttctatggtgattggctaattgctgttgtttgttaatgtcgtcctatagtgctactgtatttgttttaatgataaagtaatgtttttactcatttgtgatatactaatttaccttgtatcattactcttgtaaccaagtgagggttttcctccgccaccagtgagggttttcagtatattttgggtaggggccagtctaagacaatggcctctgtctcttttttttttaaaaaaatttaccttgtatcattcaatgttgcagccttctgtccgaactcgtaggtcaaatggttctataggtgatacaacatttggtggagcattgaagtgcttttcagatgtcgccggcacaaaaagtgctattaaaaaaatagggactgaagtaattcagttactcttagtacatggatttcaggtgattgctcttgctctttatgtatctatatgtaccatttaatatgtatgcaaagcgatccctatactctatagcatgcaattgctttagaccccacaactactctttgttgtactcgttaaaattttgtaggatgactgggaagataaagtactacccgtgttgctaaacacatctgtgttaaaaaaaaccggagttattgagaagattatgttattttaattataattatacagatcactttttttttcaatggaaaattggtttctgccgactttccctctcctgttaagcccagatggttactttaacatgtaaaagttttgaaccagaaccctaatcatctgataagccattctaaattttctagtattgtgatacacccagttttaggtccttacccagagttagtaatagcatgggtttgttctgattccaatttgataggcactaatacagatatatttaaagaatctgctgtagagctcttattgtcatccactgacaaaatacaagttctccaagtgattccagtgacttggaaacacttttaaaaaggttttactctgtacacaaaataatcagatgccctcccaaaggttagactcacttatagtaccaggctaacatgaagaacaactcagcaactagcagtacagctcagccactgaagaattaacaactcttcaacaaccactgtaactaacttttcttgtgcctggaatatgtttggcttattttcggcaaaatagggctacccttacattttacatgcatatccctctcagttgcactacttttttacgttgaccttttaagatattcgtctggtttttaatctgtcaatgcaaaaatattacgtgtttttcttttaatttgtcgaatcacttgtcaattacaggcttatttgtctctaccatgcgaaaatttatatgaaagcatctctgctgcaaatggagaaaggacaaactactttcatattgaaatatgtaaaagcataatatctgcatttagaaatctgagggcagcagacaagtaagttacagttagcttgttttaattttgaattataaatagataataatgtgatattcacaaatgccatactactgtatgccatttccttattgttaaactgtgttgtgcttcctttacctgaaaaaaatcttcatgataccttattctctgttaagtgcatacaactaacagtgtacaatttatggtcgctatactgatacaattctaaagctacgatgtctgactgtttaaagtgcaggagatgtagttcaatggttgtatttcactgttaattttgattgatatgtttaaaccttaaaacagaaatgataactttctaggagaggtgagatgataagattgggaaattaagatccttttaatttgggattgagtttgaatagatagctaagggcactaaagtcaaagaagagaagggatcttggaatactgatatgttactttcacgcatgtaatgaaattagcaattttgaacttaaaacggccatgtttgagtagtattgtatagtgtcgcatacaataatattgccccctttattaattgtttagacaa

SEQ ID NO: 24307 - DNA, 1956 bp, Cannabis sativa
aagctagtaagcaagttttaaagtttacaaaaaagagttacttctgtctctcacctaaaatgaattttctgaatcaaaggttcaaggtagatagatttattacaagactgagatatggaaagattttgtagctacatccacatggaattacccgtcattagttcattatatgacaaagcaaattactacctttgttgtcctcgatttgattaaagggcgttgttgttttaagtaataattaatgaatccccatatgcttttgaagtaaaatctaataatataagcacaactatcgattcagtaacttacccaacaatcaaaagtataagcgaaacgatccacaatatgcattgatatgtcttgaatttagatttagctggaacaggtggtgttggtgacataaatcctggagtatatctttggctaacccatccaaactgtggccggatgagaaacacaaacccaagaaggaaaccggaaagaaaccctccaagatgagcaaagttgtccacatgtggaagaattcccactgccaagttaatagctatgatgaccacaagagtgaaaagtgctgcaaactgaatacataagaaatttgggtcatgagggacagtaatttgaaaccaatattcaacttaatttaaatcagttaaatactcaccttattaacatatattgtccaattggtgatgagttcagaaagcattcctcccaataacccaaaaagagcaccggaagcaccaacagatatgtttgactggaggaaaagtgcagagaacaaacttccaccaaatccagaaatgacatacagcaaaccgattcggactgaaattgaaagagccatacacaaaaatcacaagtgtttagagtaaaaatcatgacatcggtgtgaaaaaatcaagttagctccacagaatcaagaactctttctacagtctaatatcatcatatatttagacttgtataattttgcaaacgttagtagctcaaatcaaatcaactcaccaaaccaacctcatctttctcacatcccgtaataacaatgattgaagagtttttagtgtctacaaaataacagaatctatataaaccttaggctttctaggctaatcaaaatcccaactttaatctgacaataatctcaactttatgtttacaagtgtgaatatcaatatttgtgatacacgcattaagccttaaattagttattttatttggcagtataaagaaaaaagcttattatggaaaacaatctaaactactatcatttattcttcaacatctagaatagcggcagctatttttgggaagatatataacataaatcttaataataatggtaattagaaatcgcaaacaactactttccttatacataccaaatccaaattcttgctcgagccgaataccaataaccaaaaggctcaacatatttgccaatatatgaaaaagccctccgtgtaaccaattacaagtaataagacgccatccctggtgaccttccaccactttggtcacatcaagagcccccatccttagaagcctatacaaccaagaatccaaaaatagaaagtgttaataatagaaacaaaaaccaataaaaggactttaagaatgaattgttaaaaattctgccagcatcattttcccttttcttcttactcaaaaatcaaagctgataagaacttacgtagtggatgacggacccagaagagggttctctttaaaaggctgaaacgagaacctacccaagaacttagctatacaagaatctgaattatcagggcaattgtttacgtacatggtgattatgaacataagagtattggcaataacaaatagagggattaaccaagggatccatttcttgaaatgctttacttctcgatatacgggtggtgttggagacgttagctgctgaggagtgtctacctcaactggatgaaccacgccacc

SEQ ID NO: 24308 - DNA, 3513 bp, Cannabis sativa
  modified_base (2920)..(2921): a, c, t, g, unknown or other
  modified_base (3208)..(3228): a, c, t, g, unknown or other
gtaaaatatttccatccaacaaagaaagattgtgtagaattttatcaacaaaagaagatgcaggtttagatcttgatcatactctgcgacagaaaggttcaagggttaaagatctaaaaagaaggagacattatattctgctacagctagccactgtaaggttttctatagctttatatgtatttatttcattgttttaggaaatttatttttaagatcttagattatagtcttataatcaataaacatgttagtaaatctagatcctagtaaactaagttccaacatctattgccattggattgcgtggctcggttgatgaggatctcctcatcaataccattgtcagccaaatcaaagatgattgatgattggtaaaaataaagttgtgttctttgctctcaatgaaagtaccaaactatcgacctcacttttagtcaacgacacttgagtctttaatgcgataataattttttcagaaaataataaataagagcaataagagcacacaagattcatagaagttggacccctaataatagtaatagcctacttccctttttgttgtattacttaaaaagaattatcaagatcacatggtcgagcctggtgagtttcttaatatactcgataaagtttacaagtatttttacagactgactgctcttttacaatgtggaaaaaggatctctaaatagtgatatgatctcactatctatagggaagatatagatacaatattacgaattagtaagagaagatttaggaaaacataaatatcaaatcccacgattttctcaatcatataaaatcaatcccatgaagatggggattttcaataagctataattatggagatatttaaggaaaatatctttaaagatctttactcaatgtatgcttctatttagatagtgacaattacttagcatgcctcacctacttggagtagtgcaaggcttggggcctgcctggatggtaaatggtgaaggtccagacttaactggtttggctttgactcaatctggatgaagctataagtgtgtatactctgtccaagtctgaatatttacgacacgtgtcaccctactgagtgccacatcaccttgtgcacaatttgagataatagtttgtttacactatgttcaccatttgttttcattttgacatttttattttgtttgattttaggaatgagaatgcaagtaccctgaatctaatctctatagatcgaaagtgtcacccacttgcaattaaagtctcattgagaagcttaattctactctttcgagaaatgtcaaggctttgttgaagtttccccatggttagtcaatttaataagaaaatttttagaacttcacattaatgtgtcaaatattatgttgttaatgctttacaattctgttaatatttatgatatgtcatacaactttaaattaacttttatgcaatacttagatgtagaaaataaaaaaaaattaataccttattgctttgacgtggaagaataggcttggatcgccctctatcctctatggttggtaaccttctttcacttggtgtttcaattgcagttgagtattttcttggttacattccaacacttgtttcaacttttgacaagttcttcatatttgtaattccttgagatgaattcaccactagcttcgtaatttacataatttattccttaattaaactgaccattgaaaaatatgagaaaaagaattgcatccctttcttgacattttaaaaattcaattatagtcaaccaactatgaaaaaattgtaaggaatgaattgaaagtaatacatgtgttgttagggatctacgttacaaccttaaaacaattaataacatccatgaggtaatataaagaaacttagcacgatagagtttgcctatatgagtcgtgcattgccaatttcgaaccctgatattttacataataatattgtagtagaacaactaatagggaactgaaaaattcacaatataggcacaactatgtatggacaatgtgattataaacatcattaagaaaaaatttaacaaagtattattgcagtgatgaacaatgacatgtacgttaagaattttttgtgaagaaacaatcgtaagaacactgcaaaccaacgtgaactcaacaaatgttaaaacatgaaaaaaagttgaccctattagaattattttttattagagccttgtgttggattgtctatatgaaatacctgtaaataaaattaaaaatattgtagcattatcaattcgtaattattgatacgtcaattatcggagggttgaaaatacagatggccaactataatgcagttacatagaaacaaaaaaccaaaacaatgttgccagatctttggcgcgagatgaatgtgagtttactttatttgtcgtgatcaggattgaataaatctaggattgaaattttgaaaaactacattaatgcaataggtataatattagctactgtagtgatagacatttttttattatatcttatttggattgatgaagaagtccagatctatttcctacatgtctatatcttatgaatctgtaaattgaatttaggaaatttagttttatgaaatttgaatgacttttcaggttttgagtttatgtttcaaattagttttttctacagaatctttcatcactggttgattttcggtttaatttttttctactgaagtgatctcgctagaattaatggtgtttctttgtcagccgtcattaattcatcgtgactgacctccttccgtcgtaggttggcttcatttctctgatgcgtggagcatgcgacttcaaggttagagtaagaggtatttttgttatttttttaattggactgtataaatgtttatggctaattaggattttcgccccctgaactttgacatgtannaaatcatgcccctaaacttttaaagtcgttaaaaataccccctgaactattgagattgttagacttaaggacttttttctaattttagtaaaaacgtctaacatggatgaaagtttagggggcatgatttagtacatgtcaaagttcgagggacataatatcaaagtctggggagcatggtttagtacatgaacaatcactaaaatagtaaaattgaatgaaattagacaaaagttcttcaatccaataatctcaatagttcaaagggtatttttaatgaccttaannnnnnnnnnnnnnnnnnnnngtatatgtcaaaattcaggggcaaaaatcttaattagtcaatgtttattagactggctcacaatatttgtgtcacattattgcctattttagtgagaaagttatactgaatacctactttttatttcctattttaacttttacttttctcttattactctataatttataccgagttctaaaagttatattttcattatgtatgttagggattctaacattgataagttatatgagtttatatttagtattttgattataaaaaaaaaagtatttatcaattaaa

SEQ ID NO: 24309 - DNA, 2529 bp, Cannabis sativa
gagagagagagagagagaatcgtgagttagagagagagagagtttgaaaagttcaatcatattatctcacttaagttctcttctcttctgttagttatttattacattgtataattttaattttcttgtaggacgttacagaattatacaatttccatttaaataagaaattttcaaatatttattaaatatccttctattattaatgtattattttatcttataacaacattttatatattctacaatacattatctattaattacttgcttttaaggcataaatctcaataatctcccatttgtactgaaattaagtgcagcacattatataactaatatagatgttatttctcgtttgactatcaggctaagtcttgcgaacgagattctccatataatatagttccagatctcagagaccaccacatcattattagaaaaatatataaaatttgattcttgtatatttttgtttatttattcttttattttcttcaagttcatcttattgattaatcgtttaatatcctaaatattaaatatttacttattcaaaacttgttattcagaaattgagcaatcataaaccttttattagtcacatttaattaattttattaattatgattgttaacacagaaatttattaacaataataaatcattatcaataaagctaaaatatttttaataacttaataataataagacaaaagaaacgtttacgtgattttgtatttaaaatctacatacttcacaagtcagtgttattttttattattctcatgtcactataagaaaaaagacttttgtcggtgagtttgctctctgaaaaaaagtttgcatatgtcgttggcattgttttgtcgacgagcttttaccccgacaaagggtgccagcaataattcgttagcataaggtgtttcgtctgcgaaataccataccttgctagcgaaattatttacaccgacaaattaattggccggcataagtttccccaccggtattgagctgtcagctgaggggtccctgacgaggttttgccggagaaatattgtgccgacaaaacttttgtgccaattcgcgccaaatttttatttaccagcaaaatttcagctcatcgtacttcaccaacaaaactcctcaataaaaacttattttagttttgctgacgatatatagtttgcaggaaatattttttaaaaaaacatattttatatttataataaaattaaaattaaattttaacttaaataaaaattcttaagataataataaataaatataatccaaaatatattataaaactaaaatttatattataattacaaaactatataaattgtctaaaactaaataaaagtatcgttagtttataaaaactaatataattttcattgcaaactaataaataaaactataagtccataacgtcatcgtcgccatcgccatcatcgagagggacagtctgtgaagaaaacacaacgctaggaggttgaaatggtggaatcagtggaaccgaaggtatcaggggcatgttgaatcctggaacggcgtcggccagatgcatcatttgttgttgaaatgtgctcatgatttgattctaagtttgcatcatttgttgctgccactcgtttcatgctttctgctctttcacccttcgtttcagagcctcatctccctcctaggtgacaataggttttccagaaggaccttccttaggagttgcccccttggccccgaccctaagtctcggcaactggtccattcttctctctcaagtggtgtgaccactcacccaacacctgtatcataacatgcatgtttatgggaaattggatggggtcaacattgtactgttgggggacattggtcggccctgattgagtttcacaaatctcaattattttgacttgcaaaaaatttgaacaaattattagagttgaatatttaaaattaattcttacataaaacgtatatataattaactccttaaattctaaatttccacatcttgaattatatttcaaaaaaaaaaaaaaaaatacatgagaaaagataataatgttgaattcaaaaaaagaaaattaataattaagtatacatggaaggaagggaatgaagttagtttaagtggtaaagtctggagtcaaagttgatgtacgaagagagagccaatgcatatagttatatatttttatatgtatagtcaagcccatctccaatcttcaatgaattaatcaagacaattcagctcataataatttggattatattaatggataatatcttacgtttttattaaaaaaatggtaccaacggtcatgtacatatgcttcaatattctattctattctatatgtgaagtagtgttgtaagttctttcttgggatcaccgcaaaaaatagttatttttaagttttatttttctgcaaaattttttctattttataaattgttgttttttgaaatttgattaatttatacattctaaatgtaaagcctaaaatcaaaaaaaaaaaaaaaa

SEQ ID NO: 24310 - DNA, 2615 bp, Cannabis sativa
atattttagtcacaaataactttttgttgtggctaaaagtcacaattagtcacaatgaatttataatgtgagtaaaatattatcactaaaagtagttgttttttatagtgatcccaccattcagagccaaacctaagttaaggcgggctagactcgcatctagagcccaccccatcttagaggctcaaataaaaaaaatattttttaataattttttaaaacatcattaattcttataataagggcccgattttaattttttatttctaaagcccatttcaacttagagacgactctgtcaccaccttgctcaaacgtgatcaacaacttgatcgataagtgaactctcgatttagtttcttaattcgaaactcttgtttcttaaaaatataacaaaaataataataataacaacaaaaaaaaaaagttggcatatgccaaagtattacaattgaaagtgtgaaaattaagagtaaaaaaatgatgtgttaaaagtgtcaagtttttttataacaagttgttcattggtgatgatgttttttgaaagagccaagaaggtgcatgcagtaatttaagaaatagagtcttataaagcgtgtgggctaatttttaacaagaggaaagaagactaagttttcctatattttggcacattttttatcaattaatttaatctaagttaattgaattatatatatagaagaataataataatatatataaaataagaccaaaatgtctgagtcaactcggttttgagtggacatatatgattcaaattgacaacttatcaattttgtgaatagaaaagttgaaagagacataaccttttggctactaaaataaaataattactaattattagaggtaattaacaattagtaattactatatatatgtgaaaatgttgttaaaaaaattattaagatgctttccttctttgtttgtacttatcaaaattaattagtagtataagaagacaaagctttaattctaatattgatattgatattgttatgactataggttttttttttgtttggtacaagtaaatttattgattttaggttaatatgaaaccaagagatattaaaacaaagaataataggtgattttcattaagaggcatcactattcaattgactaatataagtttatattaagttatttacaatcatcatcttcaatgaattaatattaatctcaataatagttaaaaacataaaaaccaatgaaaatattaattattaagtcgtgtaattattaatataatatgccatatatattctaatgccctatactatcacataaaaaaaaaagtgttttttttttgcagtaaatattaaataaaataaataagactgaatacaggaaaaaatgttaaaggatacttataatacataatattactataatatattatattattaatggtgtactttaatatcaggttctactactttaataaataattattataaaaaaattatttactatttataaagctgtcagtcacattatggttatattagacaccataatgcctaatagcaatgctcatagtcataacaatatgatacctttaggtggtgctaactgctaaaccctcctagtaccctttaattaagatttttcgtaatttgaactttttagggccgttaaaaattattttcagattattgagattgttgaattcaagaacttccatataattttactaatgggagtctgacatgaataaaagtttatagggtgcgagtaaaatactattaaaaatatttagcaaaaatgtagaaaacttctatatgagagctccttattcttttgttattatagacaaccattatttatatagttgaaattcatttttttaagtctcacattttattttagcgaagaagtgcatttagagagtacagttaaaggtctcatacatttgaaaattaattggcaataagataaatacctcgttcaagaggaccaaacatggcaatttgtgaattttaaaacaggttaaagaccataacactaaaaacaaacacacatcaatcgaaaagtttcaaaaaaaaatttcaacttatatataatattttatttctatacattaataatataaaagtagggatatgattttgtcccgttattatactttcacggattgtaatctgtgatgtacgacagccgtcatatgagggagttatttgatttgactgctgagattgatctgctggtaattaggattaaaaagtagaaacgtaccctaacactcatttaatgtaccctgagactcatctaatgtaccacagaatacattatgtgaaagtatatcacgggacaaaatcatatccctataaaagcaaccctgataaataaaaagaatgatatatagaattctaataaagcatgctaatactcgtattaatgacactaatcaataataacaataatcaaattaataattttttttacataataataaaaaaagaagtcattgtcaaaaacaaacaaagttaatatgtaaaataagccgcgttaggttgtcatgacacccaccacaccataacacacgctcacaaacacactttctctcttctcttctctttctctttctcatt

SEQ ID NO: 24311 - DNA, 3719 bp, Cannabis sativa
gctcctccaccgtcatcgaagcccgctaagtcagggggaggcaagcagaaaaagaaggtattgttatggttttagggtttgaagattttcttaattgatgattcggcttagtgcttctggctcgctaggatctagtgtttaagttgtgtcatatattctgcttgaagtgtattatgccaataaatgcctaattttattaaatgttagattcatcaagatgatgttttagtagcagattgttaaactagttcatgtctttttttttttcaaacatctaagtgagtctttgatttagggatttttttttaagtgacttataaatgaatgttttgggggaatgatcaagcataggtgaaattatcagaataacttatcattttacattgggtcacccttaatggttgctcactgtatattttagtatcatgagcttccagccttccacaaatgtcatattattcctttaaaaattgtttaattaatgttttttcgaaaaccatagtgctcaattgctcataatgtttctatttttcagtcggtattcttttttcttttaatactaatactgaggataataaacttttatcacagaagttacttgggttgtataatgattaggcatgacttaaactgtttatgttccattatgcagaaatggagcaagggtaagcaaaaggagaaggttaacaacatggttctcttcgaccaggcaacttatgacaagcttttgagtgaagctcccaagtacaagcttatcactccatcgatcttgtctgataggttgagggtaagttattaaagaaaatggtgttaattgtgtttgtcaatgctaacacacctgttaaatttgtttatttacttgtttgtgcggtttaatctttttgtgtgtgtaatatcttcaaggggatagcttttgaaatctttttgtggattagtatcatctgtttatatctttacttgtttgaaagcatagttgcgaacagaaataacacaagatattcttataatgcgtacatgcaatggatttttccaattttggttggaaactgcattatgttctttaaaatattctaggttgcaaactatatgtatttagtatttttgttctttggtaagtaagagttgaagtatatgcttggggaatgagttgtgattggcaaactattgtgcaagtttgttagctatttttaggagttaagttttgagagaataaagaaaatacgctagtagtgtgaattaaggaatttgtgttgcttcaaatttaatattttgtattattttgcattcagattaatggatcactagctcgcagagcaatcaaggatttgatggcgaggggtttgattaggatgatttctgctcactccagtcaacagatctacaccagggccaccaacacctgatttccaagatgataagctacttcaacgctctacttttgttttgtttttgttttttgaggaaatatttcaatttaattatccttcactgaatatttaggtgttttgagtactacttttgataatctagtttattccatacttcgaaattttggtggagctgacaatttgtttgtgtcctattattttttttctgttaagagtatttaattattgttttcatatataaaagctggaaaaacactttttaatagacttgaaggattacccaaaacgataaaaaatagttattaatagtttgactgtaaatcaacttttatagccaagaaacaaaaaaccgaggcaattgattgcaattgaaattggttagagagaactaaattattatttggatttcctgattaaatcttttttaaactttattataatttaatgcaattttatattttttatttttgtaatatttactacgttcattttaattttttgtacctaaagttaagctaatattattaatattctatagttaagaaaaaatgtcaaattcaatgatcctacttcataaacccattataatgataaatatgtcataaacccattataatgataaatatgaagtagctaaaagctttaaaagagttgcatgatacatacaatacgattagaaagagagaatattgtcgttcatattctcaaactatataaacatagctaagctagcttacatttgtaaataaatgtattataacgtgggtatattgctctgcaaaggcagaacaaatttatttaggctattatttgagttatatgtatgacatatgtataactcaatgtgatttcatatatttattcttgaccagagaaagaaaaaataagacgttttaaccaaaagggcgccagctgtgttataatattttccaaaaatttactaactcatagccaaaagattgagctaaaaaaaatagctcaaactacataacactagttctcaaatgtccaaaaaactagcattgaaatctttagattaggaaatatttcctaaattttcctcgttcactagggcaaattgacaaaactcaactgagtattataccaagattcaaatttggcatcaaggaatagcataattagaaaattatacttaactttaaaaatgcagtgaatctaatcttgccaccctaatattgtccaaatttttcacaccacgtcttctagtgaattaaatccaaaaagaaaacaaaaaaaaaaaaaatcatgaaccaaaatttgaattgcagaacaaaaaaagaaacatagcagaaacagtcacagcatgtatgtacgggaggacaatgcaacgaaaagcattttttttttagaatatcaatacttggcaatgacaatggcacttacaaactcattgttctcaaataagccaatacagtcttctttcaaaaaaaaaaataaataaataagtactcactaaattttaaattgaaaatcttaaaataaagatatacataataaatacattttaaaagcaagcaattcaatatataaacagtttggtaatatgatataccaatatatcacatctaaatagaataaacaagtgtgtgatcatcataaatcatttaaagtcatggaaccgaagcttaacatccaaaactttcaacggattacacaacatagaacaatgtgttaaattgtagaatcataaatgtgttcacgattaaccactatcaccacttaaaatcgttctaaatttaaaattttgatacaaataataaataaaaagcaaccacctcatgctagcagagaaaaaatatttgaattcctgttttatacctcttatctacctacaaataataaaacaaatagaagcaggatattagagaaagaagaaaaaaaaaataaagaattaattaaaaaaaaaaaacaacaaagttcagcccctcccctaccactaggcccgtccttaaggatagacatgctagatctgtatctagggcctacctaactcagggtccaaaaaaatttcttcattttataaattatataaatcatgataaattttggggtcaccccaatgtaccacaataggagacctattaaaattagggttgtttttgattaagtagagaaacacatttaaagtgtcatccttttcaatttcgatatatttgtgattgtagtagtctgaatcaatttttgaatagatttgcattctacttttctttgtggaatccaatccaaactctttacatatttggtcaacaaaccaatggtatggaatgtccacatcttcatcaaacaagattatcttaatcttgtaatgca

SEQ ID NO: 24312 - DNA, 2498 bp, Cannabis sativa
gtttgctgtatagacctatgaagtgattaataatcatagtgtcttttgttcattgttcatttgttcatatctgatcaaattgctgggttattctttatttggttttctggtttgatgaatttcaagttgtgcataattctgtttgtattgttcttgatcgattccttattttggtttgtgtatgaggtacatgatcattgatcacatcaaatggtattagagcacagtcgaggggcatcatcaaagaattgaatcaagaacatcaagagaggaacaataactgatgtgcaaggacctctactcagtttgaagttgataaattcaatgacacaaatgattttagtttatgcaggatcaaaatgaaagctttcctagtgcatcaaggaatttcagagtccattgatcgagaagagcttgcttctcttggagatgaatagaagaagattaaggaaattcagaacatggcacacagtgccattctactgagtttaggtgatgtagtactcagggaagtgtcaagtgaagaaactacagtggggttatggaaaaatttggcttcaatttacctgaagaaatcatggactaacaagctttatctaaagaagaagctatacacaatgagaatggatgaaaccaaggatctaaggaagcatcttcatgagttcaataggataatcttggaccttagcaatattggtgtcaagatcgaaggtgaagatcaagggatactgttgctcagtacattgccaaaatgttatgaccactttgtggacaccatgctttatgggaaggaatctttgaccgtgacagtggtgaaatctgccttgaactccaaagaaattaagaaaaaaagtaaagataaatcaaatggctatggtgaagggttttttgttagaggcagaacagaaataagggaaaatagaggtggttttcacaaattgaatcacaaaagcaaacagtacaaaggctctagtcaatcacacatagcaatgtccaattccaaggcagggaaacagtgctactatcgcaagaaagaggttcatttcagagattaatgcaaagcattgaaagctaaactacagagagacaaaagcaaagaaagaggagatgcaagtgttgtgacagatggctatgaatcagctgatgtcttgggtgtgtctagccaagaatcaggtgactcatggatacataatttagggtgttcattccatctgacaccaagaagggaattcgttcatagcttcaagaaattagatggtggatcaattctattgggtgacaacaaggcctgcaaagttgcaggaattaaaactgtgagaattaagtttcatagtgattaggtcagaacaattcatgaagtcaggtatgtcctagatttaaagagaaatttactttccattggtgaattgattgaaaagggtcacactataaagattgatagttcctttaaggtcatgaaaggttcattagttgtcatgaaagggaaacttaagaatggaatttattatctaaaaggaaagaccatcactagtgaaaatgacatggttgttagaagtcctgacatggagagcactaggctttggcatcttagacttggacatgtgagtgaaagaggcatgagccaacatgaaaaacaagacattcttaagggaaaactaggagagaagctggattgctatgatgactgtgtatatgggaactgttgcaagttgaaattcacactagggaaccacactacaaaagaaaaactagactatattcactctgatttacgggggacttctagaatgaaaaatctaggacgtgcaagttactttatgagtatagtagatgactatattaggaaggtctgggttttcttactcaaaacaaagaatgaggcctttagcacttttatcacttgaaaaagactgattgaaataagacatggaagaaaataaagaaacttagaactgataatggcttagagttctgttgtgatgagttcattaggttctgtcaacttgagggaattgatagacacaagacagttgtaaaaaattcacaacaaaatggacttgcttaaaaatgaataggattctattggaaagagtgagatgcatgctcaagggtgctggccttgacaagaaattctggggtgaagcattgaagactgcttgctatttgataaacaggtatcctttaaacagctgtcaaattcaaaacaccacaagaattctggacaggacatgacccaaatgtcgatcatctcaaagtgtttgggtgcacagcctttgcacacaccagacaagacaaactagatccaagagctctcaaatgtttgtttcatggttaccctgaaggggtaaaaggatacaaactatggtctttggaagagggacatagaaaatgcataatcggcagagatgttgtattcaaagaacatgaaatgactatgaagacagatgcaatgaatagcaggccaactaacaagaagatgacaggtctagaaattaaaa

SEQ ID NO: 24313 - DNA, 2365 bp, Cannabis sativa
atttcagtctcatccgaaaacccctttcactcaccattaatccaactcttgaacccattcaccttcccaaccacaaacctgaatttagaaaccataggcctctactgaatgatgcaaccaaaggagaaccatttagtccttattatctttctcccagtccaatgcaagttctgcctgaaataaaaataaattgatatatatataaaaaatatattttactcaaaatctaaaaataacactgtacgtgtgtcttacctattatcgaattaaagatgtagaacagagaaaagtagagaagaaaacaaagagagaaaacaattgaaagagctcactttattatcatgaatgtaccagcatttatacagaatagaaaacagtaataacaaacattacaactgacaggaaacggcctaaacggatttaactaataactaaccatagtaacaataaactagctatgattagtgaactatgttaacatcccccctcaaacgaaaaggggtggaagccatttttagtttggatttgaggtaaataaaacaatccttagacaatggcttagtgagcatatcagccacttgatcatggctgggaacatatcgaactggaagttgtttgtctagaatttgatcacgaacaaaatgtaagtctatctcaatgtgcttttgagcgggcatgaaaaactggattggctgccaatgcaaaagcactttgattatccacccatattatgggacaagcatgcaatgaaacttgcagttcagtaagtaatgacacaatccacttcaattcggctgcagtgttagctaaggcatgaaactcactctcggtacttgatcgtgccaccacattctgtttcttagctgaccaacttataagattgcctcccaaataaaccacatagccaccagtggacttacgatcatccacacaactaggccagtcagcaattgagtagctttcaagggtcatagttgttgctggtttgagaaataaatcgtctgaaatggtgcctttaaggtatctcaacagtcttttgtaagcctcccagtgagacactgttggagctttcaaaaattggcctaatttgttgatgacaaaggctacatcatgcctggttagcgtgagatactgaagcgcaccgatggtgctcctgtacagagtaagttcttcaaacagctcactgtcatttaaggacagtttagtggtggtactgatgaaattagaacaggccttagctccttccatgtgtaatcttaccaacaaattagtaatgtagttcgattgagacaaaaacctttcctttgaatctctgtaaatgtcgaccccaagaaaatagtgaacatcaccaagatttttgagagaaaattcagtgtttagatcactgattaacttggagatgagttgctgatttggtcccgtgaccaagatatcatcaacatagactagaaaaatgatgagatttgaacccgatccatcaacaaatagaaaagtgtcagacttagaagctttgaaccctttctgtagtaaaccgattctaagtgtgtcattccaagctctaggagcttgtttgaggccataaagttccttgtgtaggaggcagacatgatcgggtttatcttagtcaataaaaccttgtggtggttgattcatcatgaagacagtctcagttagcactccattaaggaatgcattgctgacatctagctgagtcacagcccaattggaagtcactgccaaagataaaacagtgcgaactgtaactggcttgacaacaggagagaaggtctcctcatagtcaatccctggagcttgtagatacccttttgtaactaattaggatttgaatctatccaatgaaccatcagcattcaatttaattctatgcacccacttgttgtcaataatgtgcatatctggttttctaggaactaatgtccatgtgcctgcctttttgagtgcatgaaactcagtttgcatggagtgtagccatcttggatcttttagagcagcctgtagagatttgggttcagaaggcagcaatgattcaggtagaggatgtttggtggccaagtatgctttaggtttgacaataccacttttggaccttgtaaccatgggatgagtccttggagcagtagtgttagctgaggcaatggtagatggtaaggttggtggtgctatgtcagtggaggtttctgtcataacagtaggtgggattgagtgtggttcgactataggtgtggagttaggttcagcaacagggaaggaatttggggtggttttttcaggtatactgggcaaagtgtgtgttgaattttttggtatactgggcaaggtgtgtgttggattttctggtatacta

SEQ ID NO: 24314 - DNA, 1827 bp, Cannabis sativa
aatttaggtgacaccattttttcgaccaagctaaataattattaatttttattgtaaatagattgtagtcattaattgtgatgagtgtagaagaaaaaatcagggactgtagtgaatagtgatagtaaaagcaagtagaattggatattattcaaagttaaaggacttagttgataataatgtaaatagttttgactgtatgataataaactagttttagcaattatagtaatcctaatttggtttatatgcttactcaatgcttatcttatttttgttcaaaaaatactttactaaaatgatacttatcatattttaggatgagtattaatgttattagtgatatatattttaattattaaatgaaataatgtgagagattttatatttaattaccttttgatataacttggtattaggatgtttcctttacctaaattgttatttttttcttcttattatttattattaagtctcaattttaaattgattataaaaaattataaaattaaaaaaaataatttattttcaaagtagatttttattgatgttttgatagaatatgattggtggaaaagcaatgatatagatagaaataaaattcttttggccccatccccactctagttattgttccgtgacaccgtcctcctcttacggccatacacaattccacgtttctagacttttcttactacactgtttttctattcaaaccaaacctcattgtcacatacattattgggggataaattcaaaactatctctttttattacacattaatctaatataattccaaaataattttaattaataaatactccatgcaagacaataagatagtagctatttttctcatcaatctttgctttaatattatgttaagaatcatggggtgcatctcaaaattaattagtgatgagtagagtagtacatgtttttatatacggctcaatacttttatttttgatttatgtgggacaatattctctaatagtctcttttacaattaaagtactaaatataatctcgcataatttattaaaattagagttcataatgcacatagtgggaatatgacatatgaaactctgtataaattaaagagtagtaaaataaaagtaaaaatttaaaaataggtatagagtgtaatttcttccattattgtcctatacgccataattatagtgaaagagaaagattggacttctaggacaatggctctctcctctattctcaaaatttaattggtatattttattgttattaatataattaaatatcaattttatataataaaaaatataattagctaattctaaaatactacttgctaaaaattattgatgtccaataatacacttctcaaaaaccatcatatttgtatagaaaaagagtgatatgacatgcatggaagccaactgttaactataaatgttagttaggcatttaaatgaaaatatgaaaaaataataataaaaatcaagaaccacatatagatatatgattgatgatttgatcactttctcactcttttttgtacaaatacaatttatcatttaacaaaaccgataatttaattaataattttacaaaatacagagtataaaataacatattttttttaaatatattagatatatttaaatataaattgcaatatttaaaaaaaatatatttatattatatagtcgataaaagatattagagagatataaatagttaatttaaatttaaattatattagtttttaaacaaaaaattatattttttgattatataactatatttaatataatatatctctacttataaaagaacgtaaa

SEQ ID NO: 24315 - DNA, 1000 bp, Cannabis sativa
atatgcttagtttacacggtaacattagcttataaatattctattataccttcgtgcaatgggagcaattcacttttcaaatttaagatttcttctttaagagagtggtggtaacgttagaaattgaaatgataaatagcagtataagtaactaaagttttaagtttgtaagcggtataaacttaatatttatttttagcgacatcattatccaatatttgtaaaactataatggtctagacaaaagtatgtagttacatttacttctaaatattcttttaataaattcaacacgaaatttgcattgacaaacatgaaaaagttgggggttattcatgctcaatttgtttcctctaatgctacctgcatctaagttgttttccaaaatatgcgagacgatattaactgccatgataaaaagataaggggatagagaatctctttgtctaataccacactttgaggtgaatttactaacattgcctcccattaaagcaaatgttgaacgaagtcgtaaagatgtactggcggacccaattataaaacttgtcgaagccttgaagctacggagcacatgatccataaattgccagctcagtttatcatatgttttgaccagatcaattttaatagcaaagaggccttgttttccttttttgcgcttaaaagagtggatgatctcttggactaaaatattattatcttggatattctatcctgggacaaacattatctgagtaggacagataagccttgaaaggacccctcgaattctattcacagtattttttaaaacaactttataagtaacattgagagaaatatcaatctgaattgagacattttttaaggttggaaaccttgggtatcagaacaacatttgtttcgttaattcctttatgcataaattcagattggaaaaaatccaccctacttaaccaagtttatcattctttattttagtaaacaatacgataagaattattaccatacctttggc

SEQ ID NO: 24316 - DNA, 3247 bp, Cannabis sativa
  modified_base (3031)..(3033): a, c, t, g, unknown or other
ttttacaagtcaaaacattctaagcaataagcaaaaatataaatatttatttttataattactatcagacaattaatcattcacaaacctctagtagggttaatattttttcatttcctatctcatagaaaaccattagatctatatctgctagtgcaatgcaggttataaattttttgttgttctgttgcatttttattaaggtcaattatgtgtaaagccttaatcatattttaagatattgaatacataaaatgtatgtaagccatttaatttaagaagaaaatatattttgatattatttatttatttatttttgaaaaagatatattttgatattcaagagtgagtatatatcatagcaagggtgtatttattatttttaaaacttgcaatccgattttctacttaattttaccatattttcatcacaataatcactaagataattctttctaaaaaaataaaaaaagaatacagaaaaatgttctcttttctacctttcaaaaaaaatgttctctttcgtaaatacccatatttttttttcgtttaatttgctgaattaatctccattaattaccaaatactattagttggaaataagtttttttttgttggtaatgtgtacttttttttctctaataattttttgagagtttttcatttttacacttcaaaacaatttagttttttcgactggttttagctctaactgttttaactaacagtttttgccaactaggattaaggagcttgttgatatggcagggagttaagtgagtcaaatccaccacaaatctacctaatttgattcacttgctcactgtctaattagtattgaaagagttgaccatactcttgcaatcgagtatgctctagaagttcaaacaatggatagatttgtctctagttacactttttgtgaaaatgttagtaggcaaggttatcatgagtacaaatttttcttacctgaacctattttttgatcattacatctctgatgaaatatagcttgatgtcaatgtgttttgacctctcatgaaatattgaattcttcatgagatgtaaagcactttcgttgtcacaatggacaataatgtcctctgagttgaatctcaattcatttgtcaatccctttaaccaggtagcatccttgatagcctcagttgcagccatatattctgcttctatggatgacaatgcaacaactttttgcatgttagacttccagctaacacaacctcttagcacagtgaacacatagcccgtacagctccttctagtgtttatatttacagcaaagtctgagtcaacatagccagtaacttcttatttgtgttggtattcactattaaacacaatcactgtgtttaatgtaccgtttacatacctcatgatccattttaatgcttcccagtgttctgtgcctggatctgagatgtatctcctaacaacactcatggcatgtgtcaaatcaggtcttgtgcacaccaaggagtacataagactcccaacacagctggcatatgggattttggtcatcttgattctctcagtttcattgtttggagtctaagatgttgatagtttaaaatgttgagtaatgggagtagcaattggcttgcatctgtccataccaaacttgtctagaagtttttgcaggtagctcctttgtgatagagtgatacaagtttgagtaggtctatgtatgtctattcccagaattcttttagcctttccaatgtctttcatttcaaactcttcattgagtttcatcttgagatcatttaactttgatctctcctttccaattattaggatttcatcaacatataataataagtatatgtgatcagtgaaatagacacaaggaacatacttacttttgatgaatcctatcttgatcatttaagagtcaaatctgagattccactgccttggtgcttgcttgagcccgtagagtgatttcttcagtaagcaaacttggtctgcatattctttgtcaaacccttctggaacctccatgtagactttctcctcaagttctccatgtaagaaagcagatcttacatccatttggtcaacttctaggccaaatttagcagctttggccatcattgccctgattgagacttatttgaccactgatgagaatatctcattgaattctacaccttctttctgtgtaaacccctttgcaaccaactttgctttgaatttggtgggttcagcactaggaattccttctttgtgcttaaaaatccacttgcagcctaccaatttgcatccctctagttttctgaccagtatccaggtcttgttcttcactagagagacattttcctcatttatagcttgtaaccaagttgttccatctttcccattaattgcttcttgatagctggttggttcagagctatctatttcctctgctacagtcaatgcataggcaataaaattaacataaccaaacctatttggtggcctgctttctcttctttctctgacttttgctagttcgtagctgcttagatcaccttgaccactctcattctcaattgtgtcttctaattgtgaagagttatcatgtgattggtccacctcaatttgccttccttcttgcagtgttatttgaacaattttaggaatgaccttagagccattggctttagtttgtcttgtttgatatgcacataggttgtgtaaccaaacactcttaagtgttcaaacctaggatggctgccttttatattggatgttgaagctgtctttgactagtttcagctccaactgttttaactaatagtttttgccaactaggattagggagcatgctgatgtggcagggagttaagtgagtcaaatccacctgatttgattcacttgctcactgtctaataattagtatttacactttttgtgaaaatgttagtaggcagggttatcatgagtacaaattttctttacctaaacctatttttccatcactacatctcggatgaaatatagcttgatgtcaatgtgttttgannnctcatgaaacattggatttttcatgagacgtaaagcactttcattgtcacaacggacaataatgtcctctgagttgaatcccaattcatttgtcaatccttttaaccagatagtctcctttttttttttgctaagacatatagcctccttaattttatttcacttttaatttgatacagtagaacctttattcaagaatatacttgggactaag

SEQ ID NO: 24317 - DNA, 2617 bp, Cannabis sativa
agaaggatcatcaattacctcttgctgggttctcatgatttccaactattgatccctccactctttgaattggcatctttgctctacaaaagcaaaatttatacctgcttgggtatcttgctaattgtaatgaagagtgttattatgctcttgcatttgccttaagcagcccgcaaattctatagtttaatgtcatcaccgttcaacctttgagtatttggagtatatggaattccagtaatgagggcagtttgctcgatccgagtgctggtgtttctagcttcttgcatgcctagagtgaatccagccaaagaggtggtcattccatatcctattgtttgagggctcgtttgaggttaaggagcagtagggtcgagatctattcagactggatctcttcgatttgcaggtgtttacacataaggagacatcaaatcagtggtttcagtctgatttcccctccgtttttgtacaacaatcttcgtatatcctaaaaagttaaagaacaaagattgtgtttctttactcttaatggaagcacaaaaaatattgaccttgcttttagccaacgatagtgagttaaattaaagcaattaagaataaccaaataataataatcgttgaagattaagtaaagaaaataccaaaattattgtagaggttcagccccttgatgacggtaatatcctactcccatatagttcgtattaacttgtgagtagagaagcaagaagcccttgatatctcttgaaagctcttacaatgatctctgagtgtttcactcttggatctataattctttgataatatttatctcttgtattttttgtgtgaattttgttccccggatagtgagacaactttcctatttatagggaagtattacagcgaattggttttccaaaactaataagaaacaaaatggataactatttactttttacaattacaataaaaatgagaaaattaaataggtttcctttctttcttgtactgcgaatctatcccatgaatttaaggatacatccgtggcttgcaagcttgaaaatatgtgagacatatcttctaaaattatccatctcgcatcttctagttggtgtatgtaagctacgtgtgtgatggaagctgatcggatatttcatcttctgttatgacttcatgtatcaaatctccatgtatggatcattatgagtggaattgtccatctaagttgcaagattctttccacgtgtcacccagatggatgtcacatcaccttgtgtggaaattaggataatatttaggatttatggacaaatagaaagttttttatttcatgaaattattagatattgtttttcttttaatgaatttctctatttctactaggatgtttttgtaacttataattgtttattcccattctgaaagtgaagtaaacacatgaatgtgaatactatcgaatcctatatcgattctagatttcaaaacaaataatttattctggtttcgattcctttatcaagagtgaatccaattcttagtcagtttgattcttaatcaatccaattacgtgcaagtaaatataccatctaaatagatgtagctccaaaactgtcgtgtgtgctctctattttacttagttacatctaactttcatcttgtctatacatatgagcgagttggtaaattttttgcgtccataattttttatttcaattaagtgtaattaatattgtaaagatcttgtttgattggtaatataacttatgatcacttgctttctatataaagcagtaatcaagatacaaataaactatcacaatcgatcttctaaaaatagactaagcataccaatctctggctgaatgatgagtgcatatttgtacactcattcttagtcaattattagatggattagtatttatttttgaataatagatttgatgttctccaagtgcgtataggtttgtgctgaaaagaaattttgtgatggactgatctctttgaacccatttttgacaatgatttcatcattttttaaagagcttatgaaactcaaaatgatagagctcgttctcagctttccaaaacatgttaaatcatcccatttggagtccggacgcaaaaattatgcatgatttactaagcaaggtcgaagtagaaaaaattagtgatttgcgctatagcgcagggggtctgcgcccggctggaaaaaaatgattttttacaaaaaaaaagataatttcaacaggggttcgtgattttttctcttaggtaattctaagaggattgatctatctttgttggcctatataaagaagcatgtaaatcatattgagcgacgactagagagatagaaataagcaactttgagattataaaacacattgaagagtaagagagaagagactttaagcaatcgtcatcaactatcatcattaagagttcttttcttcttcttctttattcattttcttaggtatttaactatgaacatgattattgtggttattatgtttgtgactgtgaaccaaacactcattgtagaatgttgatggaactattttagattatgaatttaagtttttagattattctcatatttgttcttgttatttgtttatgcaattttgtg

SEQ ID NO: 24318 - DNA, 2323 bp, Cannabis sativa
atgtgaactatgcaacataaaaaataatttctaatctttattaattagtaaatctaattatatttaaatgtattttatttagggcacaaaacccaacactggattactcccaaaaaaaaagccctcaaaattatattagagtcatttttgaaacaactgaggaggggcaagctactggtaatagcttcaagcccttagaagatttggaacagggccagattagaatagagggtcctaaagaagatgctgaattaggtactatctcatttagtcatggataattgcaatattttttgctagaatgttagaggtgttaataaaaaggagaaacaagatgcagttttggatttctgaagtgtcaataaatttggtgtagtgccttagttgaaacaaagttaaaggagaataaagttaaagagatgatggagaataagtttgttaattgggagtatttctcaagtcctacaattgaagatcgtatcctaattgtttggagaaaagcttttgtcataaactatagtcattactgaaaccccacaattggttcatagttatgttaaaatgtttggccacactaaagcttgttgcataacttttgtttatggttttaataccatagatgagagaaagaatctttggagggatctatcgaatttgaaacatcgagtaaaaccctagctcagtctaagggattttaatgcggtgtttaacactgaagatagatcaggaggtaaccccttttgtcttggtgacatggctgactctaatgactgcatttcccaagctcatgttgaacctctcaagagcactagttcaacttttacttggactaacaaccaagatggagttagtagaatttattcaaaaattgcccatgcttttgttcatgaggattggcatgacatgtttgctaattctactgctcattttggcaaggagacaacttcagatcactgctcttgtgttttttcaacaagagctgaagtgaaaatagggataaaactctttcgatgttacaatttttgggttgatcaccctgacttcaagaggctggttttatctagttgggagaaactgatgacaacacctggtttaaacggaatttacctcaagcttatgagattgaaacatagcctcaagaaatttaatcatgagacaataggagatgtggggaaaaactaccagcaagctaaagacaggttccttgaagctagaatgaaggcccaagagaaccctagggatcatttgtaccaggaacaagagaagacaacaactagcaactttatctgtcatgagaagatgtattttaatttcctaagacagagaattaagatcaattggctgcagaaacgagatgataacacaaagtacttccatgcctatatcaagaaaagaaaggttgagagcacaatagctatttacactaatgaacaaggggttgttatagataattttcctcaggttgctgaccattttttgagacatttttgagagtatatgggaacaaggaatgaaggctcaagtgagctgaactagcattttttttagcagactattaaacgatttagaccagcagctgcttccggtgcggcctttctccatcaaggagataaaaaaaaatctatattcagcatcctagacactaaatccccaggcatagatgggtttagctctagttttttcaagtcgttgtgggcttatattggcaaagaaattttcaaggctgactctaatttttttgtgtcaggttatatgcctcctgaattacactctgcaacgatttctctaatccctaaacatgacaacccatctaaggcaataaactataaatcgattgcatgttgttcaatcctctataagtgtgtttcaaagcttctatgttcaagactggcaaggatgcttcctaacctgattaatcaaaaccagggagcttttatcctaggtagatctatagcccataatgtgatgatacttcacgatcctttgaagaactatacaaggaattatatattccctcggtgtgctatcaagatagacataagaaaggcttatgacacgataacttgagatttccttgaagccttactgaatgcatataatatgcctcaaaagtttgtccaatgggtgatgatttgcataagatctacatcttattccattatcatgaatggaagagtccaagggagcttcaattgtgaaaaaagacttcgtcaaggtgatcttttatcctctttactctttgttcttataatggaatatctcactagttacttcagcaggctgccaataattccaactatagattccatcttatgtgtaaatc

SEQ ID NO: 24319 - DNA, 2055 bp, Cannabis sativa
acctgtttcttcttctacataatctcacacctgcttttttttttgttcaattcataataatttttttctacaaaaacacttttcctatattctgtaaagtaaaaaaaacttcacacatataactataaaaacacttttcttatattctgtaaagtaaacaaaacttcacagatatatagttataattatatatatgtatataaataattgaataattatttaatttatattattaatttaatttatatttattattatgtattttttaaaaaaataattaatttaagataaatatttatatagaaaatttattaaaatgatagtaaaatattaatttgtaaatttatgttttaataaaatattaaaaaaaaatatagaaattaaggagaaaaaagaaaaatagctttggagagattttagaccgccacgtcacagtctcatacttctcatttaaatatatatagattattatatgagatatttataaaaaatattaattttttttccaaacttaaatttctttttttttacatttataatttttttacttaatttttttttcttttttattgtttaaagtttcgaaaagcttatttttctattctatatatattttttagtcaactttagatgttttgtagtttattcagagttaatttatatattatttgcatatttaagattgatgttgttatttttctggttatttatggttgtctttttgttattttatagttatttttatattgttgtttatgtgttatatagttattttatagttattattatataatttttcggtacaattgttgtttagtttatatattttttggagtaaatatcttgtgttttgaaaaaaatttcaattggaccctcaatccacacctttgaaatctgacggctcaaatgagctggcaaaagacaaagatatcctgatcaaccggaccaggaatgcgaaagggtgccatcattaaatgcattaatactcgcaacttccttcaatgatgacagaattacctcataatatttgtagggcatgttagtcgtccacccattaattgtgagcttaactcgctcatcttatacacatggagattacgacctatttaacccacacatgaaaaataccttgaatacgaaagggcaatccacaacatgccaaccccctctagttggggccattctagggacgtgaagatgcaggatcaaacttggacgagatggcaagtcccctctccataagtgcagaaagggacttgggggtaaatgttatccacattttccctaacacgacgtggagtacacgtgtgataatgtcaagaccaaagaataccaggattgacccaagaacgggtgacgggcccaggcccatctagtgtaccacccaggaaaggtgtaaccaggaatctcatgtaaccacttggtctcgagcctaaggaaataccacttcaataggagtggaagtgttccactctcagcctagcaagctaagagatgtcttatgttgacccgagaatggcgagggtctgcttcatatcatcacttgcttgagtcctatcacagtaaaaggaagaactgacatgcaataaaccttgtctgggcacaccacctgagtgaaaaatgcttggcgatcattcgggtattaatctcaggaagaatttgaatggtgcaaaggcgtataatgtcatcttcttcgggaacatcctacatggagcccctctgacaaaatcccaccaaattcaaagaatgtctcctttgtcttgtttgaggaaagggcttggacaaaaggtagcatcaccctagggatcgaaacggtcactactctaacacaatcattttcccatgcaaaatggagaccatgcctagcctgacacgtcggctccaaattatagtttttgacaacagtatttcaaacctactttttatggaattgggctttatcctaaggcctaatgagtgtttatttgaaaatcccctactagtggccttgaaatatgaaaaactacacgctggtccgggacaaccgacctatgtgcacactgcttataaataagg

SEQ ID NO: 24320 - DNA, 7646 bp, Cannabis sativa
  modified_base (5471)..(5471): a, c, t, g, unknown or other
ttaatttcattgttttagaaattcatgttaggatgttaatgaaaaatacttgttactaaatctagatccttgtaaaacatattccaacaaatggttctctcaaacttaccatatatttaaggatgaaaggttgtattgaatttcaacttggttcccatggctttatgtagactctcttagaatttagaagtaaatttgtgatcacggtctacaacaatcgacttcgaggcaccatggaatcgaactatttccttatgtatgttgaccttaatttggccaaccgatagcagagtcgtatttattattgatgctaccacgcatacacaataagaacaagaaagtaaaagagacacaatacttttatagaggttcggtccccttagttagcaggtaatgacctactccccttttagttttattaataccagacataaggccactcacatcacaagggttgtggaatttaaattgggtctcttaagattacaatatgagaattaagtaggcaaatctcaagtgagagagagagccttgggtgtgtagaattattagagaggtagagctagggtttcaaacttagagcttgagagctttaaggagcttacagacttagagaaattagggttaggttaatgctctttatataagagagcttacatgaggataataacctaatatccctaaaaaattggaaaaatagctatatgttacataataaaacaataaataataagtaggttagtaatcccttaaaaataggtaaatagctaatacttttcccctattttatgggttaattatctcgagtggctaccagcttgcaggctgcacgccaagtggcttctgcaggctggacactaagtgtctgccagcgtttggctagctaagtgcctgcccgggtccagctgaccaagtgcctgctagctttggcaagtgttggctagcctttgcatgtgttgcgcagccttagtacaacttcccttgcaaagctcaggcttccttagtcgaacggaccctctatggtctgacaatcaccctttggccgaccagcttgtgctcaaaccctggtcaaccatacaagcttctcctgaccgacctatgtactccctttggcttgttgcttgacaattttgccatgccttgtaaggaaactttatcctactgctgacaaggttgtattccacacgtccttagtcttggcttacatggacatgccatgttaggtggataaaatttgggataatattttcctcacaagtccctattcgaacatctagtcagatagggactttctagcttttatctttcctgtagtagcctctatcgagctgccttgtctgcccaagtattagtttttcacatggcatttctttagatctttgatcttatctctccatgtatgcctcatcttcttttctttcacatttcttctttaaatctggcattgataagtttcaagctttttaagcttttagaaactttttgattctcattttagattgttttggtattttgatccgcatgatagttttagaatgcataatgtgtgatttcctgacgaaaaggatctgatttctgcctttgttatgatttttgactttttgagtcacgaagaacacatttcagttttgaaaaacatacattttaattcaaaactaaccttcgccgaccctagggatcttgtttgagacccacccttagggtttttccatgggtgctggctagttttaaggtttcaccctagaaagctggtcggttcatgcttgggtttggggaccctagctttttcttggctgggtcatgggaccctggccaaccctctcaaaccttgggaaccctagctggcctaggccttggttccaagcaggtggccagttttctatcctcctttgacctcggcaagaatcatgtcatggccttgtaggcatataaaaccttagtctcatacgtagttcccttagaaactttgtatgaaacttaatgctgagtctattataatcaaatgctcaactgaagactcaatatttgtccaagttgttacacttgaaaccgtactttactgatacccagccttgtaccatgacattatttggcaagtattcttgggtacggttgactagagtcttgtttatgtcttgaaacctgcaaggaactttgccttttggcttggaacctgcaaggaactctgccttgccttagagacttagcctggtatgtggttcctataggaactttgttcagctcttctctggctgtatggttcttgaggggccttggccttatgcatttgaaccaattttgttattcatattcgtccttaaggctttcatgttcttagttttggcgtataggcactttgtttttttagcactactattgtttagccttaaagccttttattatggacatataatttattgccttgacatgtaagtatccagatttacttttctttatgccaatctgaagtatgcttgcactttacttataggtaggtttagtagcttatactaggcgttaaaatttctctgcataagttctccatgctagtttattgccttgtacggtgtgggtggcccccaagtgaacacgtagacttacggtctcttggtcacttgcaattcacgatgtttcatagagctttcctaggaattttcttggaggtgctactaggtgtacgcatgtggaattgaaaaagaataactttaagaagttatctttttagcaagtggtttagaaacaattagtcatgcgtataacaaaagcttacaatttaatgtccacttttgaaatcacattttggctacccctgcctgacatgcaaagcagaggccatcgctgaagagcgatgggaggccatgctcaaaagttatgggtactagctcttttataaaatcctgcacggtgaaacatgtagaggaaccactattgatgagtacaagttggttagagagagtacttaccgagatgttctccattccagtattttggtagaagagccaactcaaagttcttgtcatacttgcgaagcttttatatatgcaccttttcttgttatcttgtaacttggtgcggaccttttcagtttagtttagacatgcttgctgcaggatctttgttatcaaggaatattctccagaccactaagtctcttacaaagaatttcctttccttgatttgttttttgaagtacctagccaatttttgctggcagacatgccactttagctgccttggtctcttctttcttctatttcgtcaagggattctgctagcaagatgtggtttacttcttggtcatagtagaccaaaagtatgagagcagggtgttggcgaatcaggtcggcaagggtacaaaccaagtggccagcccagttgagggagcattatctggccagttgcacaaggctatggccagctagcctatagaggtagtggccgaccaggttgttgattccatggtcggctaggctactaaggttgtggtcagccagccttttggaagccaggttgatgctacagtctaggacagtttgatcctacctacactctgttggctttacccctagcatgattgacgtagagcctttatgcactcttgtcaatagatgttcaactttttactttgtaacacatcttagaggtggtattgggataccacgtctatgtgttacgctgaacaggattggacacccagcagctattccccttatccctactttttggcaaggtttttgtttggaggtatgctggcatgggtgtcatccatattggatggttgtcaagatgttctatttcttttgaaatagggatgcttagttctttgaagaactgagcggttaccaagtttgcctctgttgccaaggcattgctggccagtcgagcgattacatcggatattgtatcttctttggggacttgccatttagtacaacctttgagttgacttaacaagtcttgaatctagctcaaataggccatcatctttttacattaagttgtgtattcacctagggcatgacctacgactagttgagagtcttggtgtatgtttaggtattcaacccactctttgtgtgctagcctgatgccaacaattggagtttcatgtttagcctcttttttagaagctttgaaactgacctttattcatcgtgcttctattgcccctaggtgctctgagggccatgcctgcaccgggcaggtggtcaatgtaccttttaggttgagttgtcttgctcttgctctcgcttcttttctacctcatacttttctcctaaatcattggagatttggggagatatacttttaaatttagctgtaaagctagcgatcattgtatgattgtatgatttagatgtgttcatgtcgctttatgtgttcaattgatgattgattgtaaattacgaaattttttataaaaaaataatatgattttggatctggaattattttatttggatagtttgggaaaaattaagcaaattacttttttttttttttgcagaacttaatttcgattaaaattgagaatgttctgatcttttgaaaattttaaaaatatcaggctagggttacactcccccacgcgcgtggacgtaggtgaacctcggtcgagacaagctttgggaagaagcgtgtccgacgttcctcatacaagctccttgtctgaacccctctacgtgcgtgtcccaggttgaatgtgcctcctccatcgatcacgagccctccttccgcgcgtggacaatatgtaatgtatattgtccgtgttgcttgcaaaatttaccaattttcaatcttaatttttttatggattttaatttcgatattttagtagatttttttgtgaagattctttttttttcaaatttcaaaactaattaaccgcttaaaattaattattatttatttgattaattttagatgttagtatattttgagcctgaaaatagatataataaatttactattttgattatttattattttatattaattataaggtttaatattttgtatttcatttatttaaataatatatatgatgactttatttgaaaaatatgatattatttaaaagataatttggataattttaaaaaccaacctgatatttattaagttttcgaaaagttagttattttatttaaatttaaattatgagattaaataaataataattatttatcattttatcttgttagataattatttttatattttaaaaataatataattttgaaaagttaaatgataattttgaaaagatatttaaggttgttaaaactataatttttgaattttgggtttacttttttaaactaatattttattttaaattaaataaattctgtaatcaactatcctatcttattacatgtttatttatttattgtttattcaaaacttttttttaatgaatctaatttttatttgatttaaattattatgattaacttgttgatagatcnaatgatctaattttaatcatagttcaattgtcaatagatcaaataaataatttgtagcaggtaaattttgtaatcttctttcatttgtgtataaatctagtaacatgatatggtccatccaaatgagtgtgtatatgagcctatatgttcgcttttgggtctagatgcatatagaaaactcatttaattttgagaattaaaatggactatgttgctaaaattaaaagatcactttcatagtttttatttaggcccaactagtattgagcttattcaattaataacaattatttatttaaggttaaattcttctcttttgggccttgtgtgagagttaggagccattagtattgggtacgacatactgaatacaatacaaccattcctcacatgaataaccctaattgtgaatgcacatttaccttatttaaataattgtattaggctaataatattagtttgacctaattaaaattgattagcaacataattaattctaaaatatatgaaatttatttttcatcatattattttgaaattaatttaagaaaaatacacttagtttaatgaaataaattcaagataaactatatgttttttttttttctgttattcaatttaataaagaaattaataattaagtagaatttttatagatacttaattatttagattctcttaaaaaatatatttaagttaaaaattaattttaattaattttttgccaacttaaattagaatattttttaaaaattaataattaagttgatttgttcaagagacttgattacttatatatataattaaataagaatattatatttaagttgaaaatttaattattttagaacaacttaaattagatattttcaggatatttattttattatattttaattaaaatattaaatatatctaatttattttatataaggattttcgaaattaattttgaaattaaattaaagttaaaaaaaataattttaataaattttagaccaacttaaattaagtaatttttattattaattgaaataaatagattaaaataaataattaattaaaaatatatttttttaataatgaactttaatataagacattcgatctccattgttggttctacatgattcttgttttaatgagattcatccacaatagatgttcattccttagcaatttaacactgtaaaatcttaaaatataagtattattataaatattttattcttagtaatgatcacccaattagtgattgttaagagtagggcttacaaagtatgaaataataataaaagctcatgaaataggaatgaccttgactcttgcctaaatgggacaacatcagattctcttttcgatcgaatatataaaaggttgctagaatggagtctttttagatgagctgactactctattcaagaaatgatatctttgactctcgccaaaacgagacattgatattgatttgttcgaaatcttgcaaaataatttaaatatgttttatttttggtatttttataaacatatcttaaatccttgttattttctgagtatgtgtatgaatttatattgaaccaagtaattgatttctattcattgatatttgtagctatcaaaatgatgtttaacaatcctcaccccaattctcatttactcaacgcatttgcaaatgaactcgaaagtgcgaagatcattcttggtcagagtatcacttcacacttgcttatgatgaacttaaaattctaaaaaagcaaccatgctgggaattttgttatcaatagaacaaagaatttaattttttctctatagtttatctcatgagtacaaccaatttgttgtatcctttatgatcaacaattagaactcgtctgacatagacaagctggacactgaattgcgtgatcaagggaggaggatgcatgcagcatgggatgcgcgtgtagggggttctaacaatgagcttgtctgaggaacctcaaacacgctttgtcctaaagcatgtactctcgatcgaggttcacctacgtccacgtgcgcaggggagtgtaatcttaggataatattttcaaaattttcaaaaaatcatagcatcctcaattttaatcgaatttaagttctgtaaaaaaaagtaatttgcttaatttttcccaaactatccaaataaaataattc

SEQ ID NO: 24321 - DNA, 1993 bp, Cannabis sativa
aacaagataacaacataaaaagaccgtatatattttctgtaaataaaataaaaaaaacggtaaaaatatttaaaattacgtgtaatcgtatttttgtaaaattttttgttatttttgtgtatttgtgaaattatccctcttactattatcattgctactttttatttacaaagttgatctcctttaaaaaatataaaggctatttataaaaatattgaaaacaaattgatatatttagtatgcaaacataatttcattaatatgatattttctttaaaaaaaacttaaatcatgattgataaaaagaattaccacacaaaaggttatatataaattttacttttctataatcagaactagtttgttgataaaaaaaatttaatttcttaataaaaaatcaattttttatgaaaaaattaaaagaaactagttaaaaataattttgttaagccaataaattaaaaaaattagttatttttatgtaatcaaaactagtttcttaattattttttttaaaaaatagttccttaaagaagaaacattaagaaatcagttatgaatattaaaacttataaattttacgtgctttgtattctattttattgtatggaatattgaataaatccactacaatatcaaaattaaaactaattacaaacttcttagaagctccaaaactcgaccatgaaccactaccaaaatagtactatccattaagacaaaaaaatagaatgagaatagttgccgaagttgttatcatcgttagaaaaatcatcgaacaagtcgttggaattgtcgttgttattagaaagttgctagagttatacatcggaattgtcaccaacgttggatgtttgagttgttgccggagttgggcgttggcatctgagactaagaaactagttatatttatcagctagttaaaaatataacactgagaaagaaattatgcaggttaaattgaaaactaaagaataattagcatttttgccctctaaactttcgacacaacctattttattccctaaaatatacggcttgttaaaaattctccttaaaatataacagttacataattatgccccttctgttaggttttgtttcttttaccgttaaaaattagtattttcaccccctaaactttgaccatactacaagaaactaaacttttgtcggtgcatttgtccaaatgagccgacaaaagtttctggcataaaagggttgttgaatcgataacatgtttcagccacaatttataccggcgcaataatgtgtcagtaaaagtatatcaatactggcatatttggtgaattatgccgataaaaccacaaaaatgaaccgccaagaggcacgaatagtttttatcgtttaataggctttcatcggcgcattaatgacccggtaaaagtccataaaaagagagagaatttttaccgcatgtaaataattttggaggaaaatttcccctattttggtaaattttgccggtgcatatagaagtgcaccgaattttgttttttcaacttttaaagacgctttttcgcttttcctgatgcatatatgtgccagcaaaagttaccaaaaaaaggagaaattttttgtgtggtaagaatggtaggtgggaaaatttttaccgatgcactgttgcgctgaagtcttcctcaaaatgcgtattttattttaggttaatttttgaacttttactggtgcatttttatacttttaccagtgcaaaaaaatgtgccggtaaaagtgcctcgacaatatgaggccaccgtccccttcttccccgtttcctcaattgctctctctcttctctctcttctcttcactctcttagctcactcccctctctctaatctcattctcaatctcattctctcattctcactctcactctcaatctcaatctaaatctcaatcttctcttttcattttgctgcctccgccaccggcaccaccaccaccccaaacgacagtcaccaccaccact

SEQ ID NO: 24322 - DNA, 4245 bp, Cannabis sativa
aagaaaaaaaatgcagaaaataagagatgggttgaaaactctggcgattggtgtagatttcaagggttttggagtggttgagcttgtgaattttggggcttcggggtggagacgaggagacttatttagagtaagagagttagagagaggtttttttcaaatgtaagagtagttttgagagaaaaagatattaaaagtatagataccatatttttaattggatggtatattaaaagaccatactttacatttagaggatcttacaaaaataccctattttttttgtcatttttactgctacacttttttttttatatacatttttactgtatcaggttttaaaaaatattgtgtttcaataaaataaaaaataactctaaaaaaaacttaacacaactataaaacaacaaacagataactacaaagcaataaaaaataacaaataatgacctaattgcaatatgcaaaacaatatcaactcctcaatatattttttgtattacaattttttttacttagttttgataacttgattatctttttgtactaatacactattttttcatggaatttgttgttacaatttcatactttaaactttttttttcctctttttctttttgagttagtggcagttaaaatgataatttaatttttaaaagttaaataaataattacattaataatagaaataataaaatcttatgatttcaaaatggagtatatagtataatgggtaatatataattaatatgacaatatctactatcattgtgtcaattaaaaacacaaaaaatcttatcattttattttaataaaatgtcaaaaaataaggacaaatatcgttttagaccctgtattttgcaaagttaccaattggatcttctgttttgttaaatgataaaatagaccttgtaatttctaaaattatacaaataggatcctgaactgattttttgtcaaaataaaacttaaagataatctaatctaaagatgttatgacaattgagccaagggtcctatttttaccattttggataataggtttacaaaaatatggcatatcaaatgccataaaaagtcttaaatgtgaaaaaatgtcatagaaaagtgaaacctataaatgtcatatttttgtaacttttttacaaaatcccatatttcatgtaatttttttttttttaaaaaaatagatatgtgaatgtgtacacatattgtgatttagttttcggtgaaagttatgcttatttttgttagcagtgtaaaaaacatggtacatttgaaagacacaagttctatgaggctcaaaatatcattctgttctgtccaacaatactagggctctattaggcccaaaaggaaaagggcaatctggtaaaataagattacatataaaccctagcttcatcactctatttcttcaagcagcgaggtgtctcatttcttagtcgccgcccaaaaaaacctaactctcagaaatgggacgagtcattcgtgcgcagcgtaagggtgcggggtcagtcttcaagtcccacacccaccaccgtaagggtccggccaggttcaggtctctcgacttcggagagcgcaatggttacctgaaaggtgtggtcactgacatcatccacgacccaggaagaggtgccccactggcccgagtcaccttccgtcaccctttccggtacaagcaccagaaggagcttttcatcgccgccgagggtttgtactctggtcaattcatctactgtggaaagaaggccaatctcgtcgtgggtaatgttcttcctctcagatctctccctgaaggtaccgtcatttgcaacgtcgagcaccacgtcggtgaccgtggtgtccttgctagggcttctggggactacgccgtcgttatcagccataacccggataatggaacctcaaggtatctcagtacttattttttattttttaaattttaattaatactagtttcagctgtttatgtacaaatttatttaatgtaattacttgctgtttgtctaagcataatcttgtatagaaattgaaagttctaaaaagatttatgctttggtccatttccataatcaataggttaggtgcacatgtttatcttgttaattaaatatgaatttctcatggggtcgaatgttgttttgtttagatttgaacagcatgctttaatttttataatactcaacttcgacatttgatgctgaaaatgtagtcaattttgtcatattgtaatatatgttatttgttgaggttatcttttttcattgtgtatttgaaattagctattaaatattcattagactctcgtagaaagtaagctgaatatggttcttatcacattgatgttggaaatgtgtagagttaaacttccatctggcgccaagaagattttgccaagtggttgcagagctatgattggtcaggttgcaggaggaggcagaactgagaaacctatgttgaaggcaggaaatgcttatcacaaattcagagtcaagaggaacagttggcctaaggttcgtggtgttgctatgaaccctgttgagcatccccatggtggtggtaaccatcaacatattggtcacgccagtaccattgctagagacgcttgtcccggtcaaaaggttggtctcattgctgccaggaggactggtcgtcttagaggacaagctgctgctgctgcatcgaagtccgactagggttcttagacattgtccagttttatttgcctatgaaaatctttcattgtgggcatttctatcaaatcgatacaactattttattagtctacttaggattgcatttctgtttctggatcagaactacaattttgcattatgataatcatttgtgttttattgttttgcttttgttggaaattactgttgagctaaaatatttttttgctttatgccatcttagcttttgctttggcatttttataatttatatgaatgtactatgagttttgctagttgttccagtttataatactctgctctgatttctcgttctcaattttgcaccaattgaaagcttttcgtgagaatcataatcatgtttgttgaattgctgaaaagttagttgaaacctagttctaagtgcttataagtagtagaaggaacctaatttgtctgagaacctaatttgtcggattatccatgggcttgtcttaagctatttagccaacttctcattcacctttattcaaatttctactttgtttgtcttcagccattgaaggattgccccattgatttaagttaggctttcattgaattatgttgagatttaggccaggctgagatgagttgcttatctctccaaatcattcacaggacaaatgagaataacaatttacaatttgacatgtatatgctttatttttagagttttaaataccttggtctgaaattgtccatatctcattgaaatgtttgattttataacttaagaattgtttttagtttttaaaaacaaaaaatagcttttaaaagctaatatgtgtttttgatcaaattttttaaaaatagtttttttaaaattgagtttcttagaactagaaaatagaaagcatcaaaaaaacatttttgcccacatacccaaatcctacaccaaaaccatggaacctagatccgggcttggacatggaccttgaccccggacttggaccccgacccggatacaaacacagacccagacctcacttgaacatcgaaccccgacctcagatcccaacctaacccgcatcaggacccagaccgtgaaattggaccccgacccaagttcaggtctgagggtttgggactggattcatgtttgggtatgggtctgggttcaggctggggttcgggttcgagttttggttcaggattggatgggtttatgtcatggtatggtgtagaatattgattttttaaaaatagttttaaaaaatctaagccaaacaccattaaattttaaatatgataaaaaattattttttattcttatttttaaaaacatgatactcacaactattgacaactttataagggtagatataagcgtataaataagtaagtggatagtttggtacgccgtataagggtcgtattgtattaaatactaaataacactatgtttgaataaaacaatgtattgtattaactattacaacctgtattatttcttaaatacataacaaatagtccgtattagcttgtattataatatttacaaaagatttggggtcaacac

SEQ ID NO: 24323 - DNA, 3562 bp, Cannabis sativa
accatgcactgagatacactatgatagaattggtaatcgtgatgccgcctccctagttaacaacgatgatcctacatgcattgagatttggaaccttgtctttatacaggtatactagtgatatttgatttgaaggcgactttattttttttggtataaattacgatttctggtttagtagaattcagcaattaaatatttgagctgtttttgaaagcttatacaaatgaagttatgtttcattttcttctgatgatactttgtgagtctgtgcaccatttactgaaatagcattgcatttttttttatactgcatgattgattatatttcgaggcattgtacagaaaaaaccaattgatttgttttttcttttgttttgtcattcttcaatagttcaatcgggaaagtgatggctccctaaagcctttgcctgctaagcatgttgatactgggatgggttttgagagattgacttctatactccaaaacaagatgagcaattatgatactgatgttttcttacccatatttgatgccattcaaaaggtaaaatctattatattttcttctattattttgtagcattttatttttccttctcttcaggttcatttgtggtttatggtaaagtttgtttttcaacagctacatcatatatacatggtgtaagttggaatgttacatttattcatgtgtatttgaatacactgttttcctttctacttatttgtagacaactggggctcgaccatatagtgggaaagttggagcagaagatgtagacaaaattgacatggcatacagagttgtggcggatcacataagaacactttcttttgccatagctgatggctcttgccctggtacatcaaatcttattttttcattgtatttttaattttacatttgagatcacatatcttaaaccttaatatttgatgtggttgtgcatttttgtagtagcttatttatacatctattcaattttattgtccttctccatccatttactttggatgaccagtgcagaaggggatatgaaagttaagataagtaattatataaaaataaatgaagagaaaaaattaaaaagaaaggaaaaaaggtttttaaaaaccaatataatgtatatcatagaaagcgggaaaaaacataaaaaatactaaacaaattctattgcaaacatctttccagtccacttaaactgttctttctacggaatattttgtttcttatgttggcattgtttcctagagaaataaaaaggaaagatttagttaatgtcaatttcaaatgaaagttgatgtatgaatttgccagttaaaatatgtattgttttttttttgtttggtttgctatccgtttttccctttcatagagtaaattcttcactacatgccgtctcttgttctttagtcatttgagctatttttacttctcatgatattcaaataacattcatcaatttagagtgttcttaggcaatgatttctgattgatttctagttttgacatgggacattttacttactaccaggcaatgagggtcgtgaatatgttcttaggcgtattcttcgacgagctgttcgttatggaagtgaggttctcaaagcgcaagaaggattttttcatgggtaaaaaccaatactttttgcttcactaagactaagatgactacaatttgtaccctagtagttatctagagtttcctgccacccagagattgtgggtttagtgtgaagaccatcaaaaatcctttgctttatgcagttgattgaatttttgtgtacgggggagtctttgttgtgttgtatttctttgtgttccgttattgtttgtagtttattcatttgaaggaccattttccttaagattactgctattttattttgtttttaatgctctttttctatttctatctcttcaacatgccatacgagatatgaattttttcttctagcttgcaaacttgctttgttgttaacatgatttttgattgcaggcttgtagacattcttgtgaaagtaatgggtgatgtatttccagagctaaaacaacatgaagtgcgcattagggagatcattgctgacgaggaagcgagttttgggaagaccttacttaaggtgagcatttttattttctttatactaggccaaacatctgaaaaggaaaaaaatgcttaaattttggtttttgtctttcaaataaacaagaactgaagttttccatcaaaaactcaatggttgttgctcctcttaattagtgatcagtcttttgggctgttgctatagtaattctagtcacttttgttgcaagctatacacttcactgattaatgctatatgcaaactactatgatctctttgtgtgaggcattataattcttttcagagtctacttttatttgctgtctgttacatcatctgaagcttggaaacaattctatataggttgtctttatgtgaggtggcatcttgaggggattaaataaatgatggtttttcttgattttctttctagagttcataccatatccaccatagtaacattttttatgtgcaacaaagctaattcaatcacccacttgtctttttagggaattgagaagtttaagaaagctgctcaggatgtagaagggaagacattaagtggacaggcaagtaatatccaaaaaaaagttcttattttctttttgttacaaattgtttcttacaaggaaacaattacgggagaaataattctctcttattttcttttgcttacaaagtttgtttcttactgcaacaaaagtcatgtggcttttacttatccttcattttgttcattgttgtattaactctgttattgttcgtggtgtaggatgcttttgtcttgtgggacacatttggtttcccactagatttgactcaggtacacggagttcataattgttttctggtgagtgttttaagtatcatatcctgataactttgtcttgcagttaatggcagaagaaaggggcttacaagttgatgttgatggttttaataaagccatggatgaggctagggaaagatcaagaaatgcccaaaataaggtattatttcttccccgtgttctctgtaatacatccaattaacataatttttgtttgtcattaaatacttcaaatttcaagaattttggtgaatggagtagagtagttcttttaagaattttgtaatgatatttttgcagcaatctggtggtgctatagttatggatgctgatgctactgcagcgttgcatcagaggggaattgcagcaacagatgatagcttcaaatttacttggttcaaggttaatgccactgattgttactattttcttacgtatatatagcttatatctttagatatttgactactgttacaccactggcaagcattagttttacttctagtgcacaagagtaacaaatgttgtttacactggttctgtgcccatcatttcaggaccacaagactacagtaaaagcaatttatacgggttctgaatttgttgatagtgtttctgcggatgtcgaagttggtatagttttaa

SEQ ID NO: 24324 - DNA, 3639 bp, Cannabis sativa
tccctcagccaacatggctcaaagaccctccaactctaataaccgtgggaatcactcaggcagaggaaatggttacagtagtagcaacaacaaccaaggtcgtggtaatgcttatcatgggaactcgtctagaggcagagacaatcaaaacagaggcagaggaaggtataacaacaataactctaggccaacatgtcaactatgtgggaaatttggccattcggctgctgtctgctactataggtacaatgacaactatatggggcagccacctcagagtgatagcaatcaaaatcaagacagaaatggtcacatgtcagctcttgttgcctctcctcaaaccttgactgatgatgcttggtatgcggacagtggagcaaccaatcatctcactgctgaacctgataaagttaacaacaaggctgaatacactggtaaggaacatatggctataggtgatgggagtaaacttgagattaaacacattgggattggtacactcaatactccatctaattctcttgtcttgaatgatttacttcatgtaccttccattacaaagaatttgattagtgtatcaagactaacccgtgacaatgatgtttcaattgaatttttccctcatttttgttgtgtgaaggacctaacaacagggaaggaagtgttgcaaggtccacttagggatggtctctatcaactcgggtctacttcaacaaagcctcatggtctcaaacacttctcaaaaccgtttactggtttatcttctgtgtcatgtaatcaatctagtttgtctagtgttgtttccctaaaggatacctggcatagacgccttggtcatccctcctctaatgtgttaaatcaagtcttaaagacaaccaatgtacctgttaatgttaatgaaaatcacagtttttgtgattcttgccaattcggtaaagcacacttactgccgtttactagatcaactagccgtgcatctaactttttagacttaatccacaccgatttgtggggtgctgcaccagttgcatcacacactaactacaggtactacatccattttttggatgatttcagtagatatacctggctgttcccactcaaacagaaatcagatgcacttgctgcatttgttcagtttaaaaatctggtagaaaaccagtttgagagaaaaattaagcagctgcgtacagactggggtggtgaatttcagtcttttactcggctagttaatgaacatggtatattctttcatcactcatgccctcatacctctgaacaaaatggtagggcagagcgcaaacacagacatatcgtagaaaccggtctcactcttcttgctcaggccaatatgccactaaaatattggtctgatgccttccaaacagccgtgtatcttatcaatcgtttgcctactccaatactcaaagggaagtcaccttttgaagtccttttttccaaagtacccgactacaaattccttaaagtgtttggagtgtcttgttttccatgtataagaccatatcaaagtcataagtttgcctttcattccattaaatgtgttaatttggggtatagtgatgttcataaaggatataagtgtttaagtcctcatgggaggatttacatcactcggcatgtcatattcaacgagagtgaatttccttttgccaaaggttttctcaacaattatcagtctgaacagtttgttaccatgacaactccactcacttggttcaatctcccagttgttgataatatttcctcctcttctcctactacagatcactcctcgagaccatcttcaagtgttcctgcaacaccagttccctcgggttctcagcaacaatctgtaagttcttctcctcatattgttggctctcctattccatttccacatactgacctgctcacagataatgagattccaacctctcccaacattgccacagaaccagcacatcccacggctactattgtaccaattcagcctacacatcccatgattactcgaggcaaagcgggtatttttaaacctcgaacgtttcttggtcagtcaacattctctcttgattttcttgaacctgcttcagtggctgctgcccttcagcatgaggggtggaacaaggctatgtcgactgagtttcttgccttaattcgaaacaagacctggaccttggttccattctcagctctttacaatattgttggctgtaagtgggtgttcaaagtcaaatataatgcagatcgaagcttccaacgactcaaggcccgcctagttgctaaaggatttcaccaaagacccggtgtggactttggagagacatttagtcccgttgttaaagcagccacggttcgtgttgttctcaccttagccgtggcatatgattgggaagtaagacaagtggacatcaacaacgctttcttaaacggaactcttgatgaagatgtttacatggttcaacctcagggttttgaagaccctcaaaaacctcaccatgtttgcaagcttcataagtcaatctacgggttgaaacaagctccgagggcttggtatgaccaactaagaatgacacttatacagtggggatttgagaattcaaaggctgactcttcgttctttatgatgaaacaaccgaagcatgttgtgttggtccttgtttatgtcgatgacatagtggtcacgggaaacaactcaaaagaagttcatgctttcatttctagactcaatctgactttctcattaaaggatctcgggccacttcaatatttcttaggcattgaagtgtttagagacaacactggcatttatttatctcaagggaaatatattgcagaactgttacagaaggccaaacttgagaatactaaacccagtgtaactcctatgacagctgggaaggcattgtccatttcggatggaactcctctcagccaaccaaccatgttcataagtgtaataggagctctacaatatcttagccacaccagacccgacatctcctttgccgtcaacaaactcagccagtttctcaagcaaccgactgatgtgcattggggtgcagcaaaacgaatactgagatatcttaaagggacaatgcaccatggtcttcacattgctcctagtgtgaatctcactcttgttgggttctcggatgccgactgggcatgttgtcctgatgacagaaaatcagtggcaggatactgtgtttatctcggagattctttgatttcttggtcatccaagaagcaaactgtagtggctcgctccagcacggaatcggaatatagagcacttgctcatcttgctgcagaattgtcctggttacaagaactgttaaaggaattgaacttcaaatgctcagccactcccgtgatatggtgtgacaaccaaagtgcaagtgcacttgcctctaatcctgtctatcatgctagaacaaaacacatagaactggatgtgcacttcgtcagggacaaggtacttgacaagaagttggaaattcgatatgtgccatctcatgatcaaatagccggctgtcttacaaaggctctcactcctactcggttccagtttcttactgccaaactcaatgtcacacagtccccatttcgtttgaggggtggagttaaagaaaatga

SEQ ID NO: 24325 - DNA, 2001 bp, Cannabis sativa
  modified_base (1432)..(1449): a, c, t, g, unknown or other
ttttcaaaataaataaaaaaaaaagaatcgttaaaaaaaatcgttaaatcaacaattgccgttagatagacactttttatatataaagatttattaaaccaaaatgtgtgaaacttcaatattaaattatatcatttctttgtaaaaaaaaaaattatatcatttcttataatacgtaacattttaaaatactcatcatttctgtttaatattcgtatagatgctaagatagtgtaaacaaatttaaaaaatagcaccttacagaaagagaaaaaaatataaataaaagtaggataatttaaaaaaaaaaaaaaaaaacaaaaaaataattacaaaaatactgtctgtacggaatttttaatatttttatggtcttctaaattttatttacataaaatatggtcttttggtatatttttatgttatattcttgttattttgttattgattttttattatttgtatattattttttaagttgtttcttgttattttcatgtgattttctagttatttttttttttttgtatttttataaaatattgtaaaactgtaaaaaaaaagcttttaacgtaaaaatggaaaatatttacaaaaattgatattttatacaattattcctaaacaataggactttttttaaatatgttattttttcccacctccaattactcaacatggaagcccaagtaggcccatatatgtgtagacagcccatttgtgaggcccacgtgatctctgtgtagaatggtgaacagctgaacgtgaacatctgattctgtccccactaaagtgctaaaagtagacaaactgacagtagatatgagatttcattactattcccaactttgctcaaacagtcactttatttttttcggggaaaaggaaaagtatatttctttcttgcaatgtatgccagcctatttttgttttggactcattatagaaacatcaatcatttgattattttacttactaataataatgtgttattgttttttatactagatctcatttcattacgaattaatagagggaaatttaaaaccctaatacaaaatccacttgcttttttttttttctcttcttcaagttgttggttgacaaacctaaaaagtgtaaattttagctgggttggttagatctgtgacaaaggtcaacagtaattctacttattgatatttttttagctttttgaggtgtcacattcttgtgaattctatatattatttcagcattcatattttttttttaatttttcagcattcatatttgccacctaataattattatttctaaaaattctctagtcttatatctttatttataaattttttatatataaaatgtagttatactagactttagatggtttaataaaatattttaaaaatataaaattagtttcataaatattaatattatttatttnnnnnnnnnnnnnnnnnntataaatattaatatttttttatttatggttaattaaacttatactaattttatattaatttaaatatatattaatattaatatattatttgtaacattattattttttattattatttttaatattaggagtataattaattttaatattcttcaatataatatttatttttctcaaattttaaaaattaaaaaaatcaaaattaaataattaataaataatttataataatttataaaattttaaatacacacaacaaaaattaaaaactaaaaatataattaactaatggacgtaaaaataaactagttacatgtatatgttgtaaatttatagcctaaagtagtgtcccacaccccacaccttataataatatgttgttgtgtaattattatatcatgtcaggggaaagcaagttttgcatgcaataatttacaaaagagtacccctcaaatttaaattcactctgtcatcaccagtgggaaattactccttcatttacctagtcaataacttccctaaattgctacttcatttgaatttaatttgaa

SEQ ID NO: 24326 - DNA, 4465 bp, Cannabis sativa
  modified_base (2589)..(2597): a, c, t, g, unknown or other
  modified_base (3717)..(3718): a, c, t, g, unknown or other
  modified_base (3890)..(3891): a, c, t, g, unknown or other
  modified_base (4434)..(4436): a, c, t, g, unknown or other
tcttggtgtgcaattgcggtctaaaaaattacaaaactgcatatgcaatttaatttgaaaaaatagcctaaactcttattacacgcactacgaacactcctaatgataatcggaatatgttcttagtttaaacatgtgacaactttgtatttataattcttttttctcagtgataaacgagacttatatttgtttattagggtaatttagaacaaattttaaaggggaaatttgaaaaaatatgcataaaatctcttaatttttttttttctaaatcaataatactccatatttcccatatatgaccatattaccatattccccatattgcccctctcatttgaaatcccaaacccaaactgcctcctctcttttcctctcgcccaaacccacagtgaacccatcccaaacccatcgatttaaacccatgctgacggcgcccctgctatcgacggtggacccaatctcaagccgattgtgatggcgcccccttcctcgcgatttggacctgtgatttttcgtcgggcccgatgcagtcagatgcaagcccaatgctggtctgatgctcatgcaaatgggttggagaagatgaagacccgatggggtccgatgcttgtgttggaaattatattctcattgggcccgatggcacccgatgctgggtccgatggggctcgatggtgttgagtgatttttcaaaaatattgtgtttggtccaatggtgggttcgatggggccgatgcctacgtgttgttctcctttttttggtgtgttgggtccgatgggccaatagtgagggtcggctgcgtggacggtgggggcagtcgggtgtgggcagtttgtgtggacgggtgtgggcggtctccgtctgtgtccggtgtgcgtgcggttgagggtatgcgagatagagagagaaagaaagaaaaagaggggaaagagagagggggcggtttgggtttgggatttcaaatgagagatattataggaaatatggtaatgtggtcatatataggaaatattgagtattatggatttagaaaaaaaaaattagggtattttaagcatattttttcaaatttttcttttaaagtctatagtattgatttggttcgattttatgcgcttattttcatttgttttgctaaaaatataaatttagagaaacaagctaaatttgtgggaaaacaagctaaagtgtagtttacaaaaatactattttagagttttaaaattacaaaattactgtgttttagtaaaataaaaaaaaaaaactcaaaaacaagtgaaaataacatgaaatatgaaattttatatatataaaaaaaatacaatggtatttataaatttactgctcttctatagcattttttcacatttatgattttttatgacatttgatatgccatatttttgtaaacctaatatccaaacacatattacatgtttttgtttttagcttaattagttttatttttttttagtttattttacatttacattttaggatttattttatttggaaaatttacaccaaatactaatttttttttaaacattacatttataatttgacaaggaaattcttacattcatactttttttctttttttttttttttcttttttactctttttcacttattaaagcttcaaaaaagattttttttgtcttttttatatattttttagtcaattttggttcttttttttttcattttttaagtcagttgctaacttttatttttctttctttctcttctctctctctctagttctcttttttatttttattttttctaatttctctttgtgtcgatctctttttttttatttaatttttttcttagattaattttttttatctttgtatatacataaatatatacgtaataaatatacatttttatatctcttttttttaacactctatttctctcttacaaaaaaattaagagcactcctcctatatttttctatcttttacatgattaataaaagtagtatattttttttggatgttttgtagtttatttagagtaaatttatgaatgatttgtatattttaacaagattgatgtcttaattttttttcttttaatttatagttatcttataacaagattttctataatatgagattgaatattataattgcaaaacttagtttgatttttgtattttttttagcacctctattttactgtactggtgttgctttattttttgttatgttttgtcttttttttttttaattattttaagttttcatattatctttttatagagtcaaaactaaatttataggtttttatgagttctatttgcatataccccataaaatgataagcacaccctattagaaaaatacttatataattttaaaagttattcttaatatattttaaaacatttttctcgcattattttaaattaatttcactacttatttttattttattttcatatttttttctaaatcatgtatatattttctaatagatatatttttattttaatagatatattttctaagaatatgaattaaaaaaaagtttaaaaaaattggtacaattaaatatataaattttannnnnnnnnaaaattattaaaatggggtgtctttataagtttttggggtgtagataaaatttcttttttttatagggtcgagactggtttcagagattttacatgatttttttatagggtcgaaactgatttcacaagttttgaggattttgtaatgagattgcttcattttatgattttttttttttttattttaagtttctttatattatttttttttttcaaatttgaaactggttttcacatttatgttatattcttaaattattgttatgtgttgtttttgattattttgtttagtatttttctaaattattgttcaaaactggtttacatatttttgagagttctgtaatggggttgctctattttatgatgttattacaaattttttatgttaagttacttttttattattttgtttctaggttcgaaacttacacttatatttttgtttttaaattattgttatgtattgtgtattgttttgattatatatgtgattaatatattttttttttgtatgtgtttttaatttttcatttttcatttgattgtttgatgaaactgttttcagttaattttattatttaatatttattattttttatgattttttacagcgtcaaaactggtttcacatgttttaactgttctgtaatgggattgctcccattttatgatgttatagtatatttttttagattgtataaattagttttattattgtatgatatttgaacaataatttttgttttattttgaataatcagtttctgacacacatattatttattattttcataactgatttttttaagtaaccaattttcataacttgtttctttattcataattgagttttaagtttcaatttttttatatgattatttgagaaaactggtttttatttgtttatttttattttggttattttactaactggtttctcacattccactattttttttttatttttctttatagtttttattgtatttttgtctctttcactttttttgttcctttaattctctttgattttaatttctgattctctttgttatatttgatgtatattgtatgcttaaatcaactctagtttctgagcaagcaaataaaaaattanntaccaaaatagagaatgaagttagcagtttggttattaggtattgatataaaatttatatgttcgaaattggttttttaatttagtatcgtttgtaaaagtttaattattagacattgtatatttttttattatgttattgataaaataattttttttttgcctcttttaannaaataattagtttcttttaatattgatgaaagtggtttttaaagttagtatcgtttttagattataatttttttcatcatcttgttgatgaaactattttttatttttttagtttctttcaatgttgataaaactaatttttaaagtttgtattatttttagattataattttttatattttttttaggatgatgttgatgaagctcatttttttctgctgcttttaatgaaataattagtttttaataaaacaaaaaaacaaatagtagtttaaataataataaaaaaaaacagtttaaatttcaaaaaaaaaaacaacatctacagttgagatcatttttttatttattttagtgttttattttttaaaaaaggaaaaaaaaataaaaagaaacataaatttaaagttttttatggcattccttatgactttttcccatatttgtaagttttttttttaaaaaaaatgcaatatttagtataattgagtatttatgtcatatatatatatgaaagagatttcaatggttacatttttattnnnaccatcatggttatatttttttaagtcat

SEQ ID NO: 24327 - DNA, 2964 bp, Cannabis sativa
  modified_base (2916)..(2920): a, c, t, g, unknown or other
gaattccattactttcatatatgaatatatttaagaatctaataattagtttatcattaggattaatagaactctaaagagctatattttagtatttttaataaaatatgtgataagtcctgtttttaattaatttaatacatgttaaaagttgtacattaattattaattttaatatgtaattttaatgtattacctaatttttttttttaaatatttggtttattattaaaatactaaatgttatatcaaatttgttactatatttagattttgcattgaaggtgtgggcaatattttcgaaagtgagaaaaacctacatagtttcaagatggtaagcttcactacaccatcatcatcatcatcaagtttttattatcccaatttttctattgagtttataaatttgtgtatgtaacttgcttcattgtttttacaggctttcgatggatatggatatgaatatgaataccacgagacttcgtttgagcatatgtatcgatgctaccctccatcatttatcgacaaggttaacattgttcgtcacttagttagataatctgttttcatgattgaaattttttatgttaattaatcttttaattctgattaaaattctttacaatctatttttcagccacaacttgagaatggggataaaagtaagtattctatatcttaaggctcttatggattaaatgattaattttactatttttcttcttcttatacatgttttttgttgcaatgttcagttataatgcctcagtcggcccttcataagcttggttagtatttttagattttcatttttttctcttctaagtttaaatttgaattaaattcaagatgttaactttaatttttttttaattttttgcagtatttctacatatagactatccaatgttgttcgagcttcgaaatgactcttctgagagagtctctcattgcggggtattagagtttacatcagaagaaggcattatttgtatgccttgttgggtatggatggttatttttttcgtgttacatttaacgacttttgttacatactaatttagaattttttttttaaattagatgatggaaaatatgaaattaaaagagggagatttagtgtgtttaaagaatgtttctcttcgaagagcaaagtacataaaattacaaccacacagcactgactttttggacatttcaaacccaaaagcaatgtgagtctccaatccatccttattatgaataatatatgttaattggaaaccttgtgttattaattgtatacaaatttttgctctatgaactacagtttagagaccacattgagaaattttacatgtttatcaactggagatactatcatggtagcttataacaacaaaaaatattacataaatatcattgaaacaaagccatctcatgctgtgagtattattgaaacggattgtgaggtagattttgctcctccgttggactacaaggaacccgaaaggcctatcgaacatgttccttcaagcaagccttctactcaaggtatatatttcttcaatacattttaattcaatttagacattatggttgcttttcgtttacctcgaaaatggattaatttttattctattctacctttgtttagttgcgttttaaagtattgaaatttgaaatagaagaaattattcttattcctgtaattttattcattattatttttgtcatttgtagatgaagaggttcctactaaagaagaacctaaatttagcccttttaccgggttatcaaggcgcttaaatggaaagccttcgacgagcgaaatagcaaccacttcttcttccgagtcaaaagacaaacaatctgatgttgttgggcatggcaagtcgaaacagccttctgtagggtctagttctccatcgcttgctcgtaaatctcaaggaaagcttgttttcgggtcaaattccaaccgtacgcctacacaaaaggtgagtttttcttcttctttatgtcatacctcttttcactatctagtttttctttaaatttacttaatggtttcttgaattttgtaggaaactcctaaagaatcgaaaaaggaagaggcagagaagaaagttgagcctaaatttcaaccttttaccggaaagaaatactcattaagaggctaaagctcaagatagacattcaaagtagaaaaacagtcaaaacacttagtgaagttagttgattagttcgttagttagttaattagaagagatttgtatttattgaacaaaacacaatcattaatttattgttttatttatttatttattcattattattttaatggaacatactcatatggatttatcacgttgaacaaattacattgaatcaaattactattttttttcttacaacactttgcacttgtctacttaatatctcataatatatcccataccttttttctcatttttttttgaactatatcttttttctcattcaaattaatatactatttaatagcaaaaattatttctatgatatacttgaaacaatattattatatatttcggttgcacacataaacttttttatcccggtttttaactaaaaatcgagataaaatgtcttcactaaaatccttaggcccgtttggctagcccataaaaattgagtactcttgaacttaatttttgcctttaattttttttaaaggttctatcaaatagtcaaaattccaaaaatacttaaaaaccaaaacctaaaaaatatgtttaaaatatgaagagagtgcaaaagagagtataaaatagagtgtgattaacacttcttgtaagaataataatcttgaaaaaaatattataatattaagattgagacgcggtaagactgaaatatttgaataaaaaaaagggagaattaccccatatactattnnnnntaactttttttttcaaatttatggtttgggtttctaaagtggtt

SEQ ID NO: 24328 - DNA, 3273 bp, Cannabis sativa
gtttggtcggtttaaaccgatcaaaccgtagtataaaccggtcggtttttttcacatttgtataatggttggtcggttttcgaattataaccatgcaaaccaaaaaccgaattttagaattttttttgtgtaaaaaaccgaccgttgctcacccttatgaatataaaagcacattatgtcgtaagtaaattgtactcacgaaatgaatgaatatcttgcacattattaaacctgtaagctctccagcatcactacatgaatcatgaatagttaaaatacagttgcaatcataatcctcaagtgcatcaaagagagagcagagcttattggtttgattatctaaatgggaaaactaaaccctattaaaccaagcaacccaactaccctaatattaatagataaaagaaaatgatcaaacctttttagctgaattgaaaccatagtttattacataaacgaatgatcatcatataatagagaatttgtaatgggccattaatagatagaaatattaaattacatgtgaactattgggactaaagaggagtaacatgcatttgacaagagtaaaaaaaaattacatcttcaaaatttaacttgcagtcaaagtcatgatgggtttcggagactacatgaacaattccgtgagtttccccctcactttttactcaaagtttcagataacacacgatgatctgagtaaatggtaaaaaagaaaaaacagctttaggaataaaccaatttcaagttcgaatccacgattcattattgcaacaatcccatgtaaccaaaccctgaaaagttaaaaacaaaatattgcgatcaggacggaaatataaatatggaaccttttcctacataatttggattgttaagtagaatgtcaaaaactctaaatactagaattaaagaaaacaaagaatcaaattgaatgactgcaggagtaaaccgatggttaaattaaattatacaagttggcgcgaaaacaaagtatacagcaaatattgtatggcattttggcaaagatagcaaacctcttggattcctgttctttttccataagataatgtccaaaaccacctaatcctctatattctaaataaataaggtggtgaaacttcagatctataagaccactgcatttgtctctcatcaaagttcactctttactttgaaataaaaaataatcctagacagctcttccaagttcctacaatgattcacaacaaagaagccaaagtctcttgacataagattttgattcatttccctaaccgcttgagctagcctcaagtggacttgagcaagtatatcatcacctatgaaaatcgagcatccataaacagtataaaaccattaataaatggcttgcaaattacaaatacgtttgcatgtgccatgagtctttataattaacctagaccacacaccataaaagaaggacagttaagtctgttacaccggccaacaagcacacaagttgcaggttcacccattactatttattccttgcatctcaaaagtctcccaaaactactcaaatcaacaattcggatctttctacataactctaaagcttaaccccaaccaaacctcaatgtagcaaaccataggtaatgtaaaagtaccctatattaactgaaataatagtgcaatgaacaaaaacaagaattttaaatttagacacttgaacaatgatcctcaactacacttgaacatatccacatggtgacatggcaacgaaactacgtataccaataaaggatcctcgattacacttgaacatatccacatggaactgaaacaatgaaactacattaccaataaagatccttaaaattatgacataacacctaaagtcctaaaaatacatcgaaatggagtagtgtcaagatatcatgtctagttagaccaacaaatggagtagtaaacttaacaccactacaatacacccaattcagtccaaaaaaaaaagttcaaaccattagtttgattgtagattcaatctcaaatccttaattagaaatgtttgccatatatactttaatgacaagaagaaaccaaaattgttcaacttataagaaagaaactccaaagaaaattcctcgtactcaacaatcagaattaagcaacaccaatattcagtacccagaaacaaataaaatagcggaagaagtgaacttttcaattggttaccaatttaacgagctgggttaagagccaaaagcaagttctttcctccgggcaagtatgcgacattaggcgacttagcaagcgttgcagccacttccctcgaggcctcaatcctcctaagttcaataagacccataccagccgcagcagtggcatccgagatcagcttagcagactcactctcaccctgggccctgataatcgccgatctcctctcctgctcggccttagccacaacgaatttggaacgctcggcctcctgctgagccacctgcttctgctccacagcccgtgagaactcacctccgtacgacaaatgagtaatggccacatcgtcaaggacaatgttgaaatctttagctctacggatcagactatctctaaccatggcggaaacgtgaggccgctcagtgaggagctgatcggcgttgaattgtgctacaacggccttcaaaacctcgttaccaatagaaggaaggaccttctcgtcgtattcgagaccaagagttttgaaaatatcgggaaggcgactgacttccgggcgagataaaaccctaagggtaagattgaccatctgaagatccttggtgccagaaacggaggagaaggtgtgaggcctggtacgaatatcgaagatgaagggcttctggagccatggaatgaggaaatgagtcccttctccgacggtctcgtcgatcacaccacgaaatcggtcgaagagtacggcgcgctgaccaccgtcgactgtgtagagagatgagttgacgactgtggcgccgactccgagaccgaatgccgcgcgtgcgacgttggtgaggaaggagacggcggcttggctgctccccattgtagtgatctgatctgagctaagaaattagggcaaaaatgtgtggaaagaggggttttttctttgctgtgtaaaaaagatccagggtttatggaaggtgcttgtataaaaccctcaacttgagaaacacgaagtcatttacttgtatgggcttttaggcccactatttcgactggcccaattatatatatggaaaagagaaaattagattgtattacattttttaatattta

SEQ ID NO: 24329 - DNA, 2556 bp, Cannabis sativa
tggcagagaattagttatctccaagaggtgggttaggtatatgccgattaggattgaggatagggagttgagcgtggatgtagtggaattggtttaaacaaattttgatattatattgggaatggacttcttatgcaaatatcctgctagcattgattgtaagcggaagatggtgatctttcaacctgagggtgaagaactgttcgtgtttgtgggatcactttagggttctcaaattctagtgatctcagtattgaaagccatagttttgttacaagaagggtccttatagggtttctagcagtagttttagataccactaggcctgagtcagttagataccactagggtcaagaattcttggatgtttttcctgaagaacttctaggtttaccaccgcaacgagaaatagactttgcaattgacttatcccatagaggggagccagtttataaggcaccttatagaatggctcctgtggaactcaaagaattaaagattcatcattagaggatgcttgatttaggattttctcgacctagtgtgtcaccctggggagcttcagtactatttgttaaaaagatagatggatcacttcgtatgtgtattgactactgggaattaaataagttgataataaaaaatatatacactttacctaggttcgacgatttatttgattagcttcaagaaaagacagtcttctctaagattgacctccgatcaggctatcatcaattgagaatttgagaggaggacattccaaatactgccttttgtacaaggtatggccattatgaattcttggttatgtcctttggactacagtgctccaacagcttttatgaacatgatgaataaggtatttaaggatttcctcgatatatgtgttatagtatttatcgatgacattcttgtgtacactcagtcaaaaatggagcatgagcagcatttatgaatggttttacaacgactacgagaacacaagctctatgccaagtttaagaaatatgaattctggctatctcaagtgtcattcttagggcacattgttagtacggatgggatcatggttaattcgaaaaagattgaatccgtcaaggattggctgagatcaaagagaatcactgaagccagaagttttctcggttcagctggttactaccaccagtttgttgagggattttccaagatttgaacgccttaaacagaattaactaaaaagaatcagtagtttttatgaacagacaattgtgaagcaagttttcaagagttaaagcatcgattgatcatagctttagtactagcattactgtcagatcggaaaaagttcatggtttactgtgatgcatccatacaaggtttggagtgtgttttgatgcaagccagtaaggttatcacttatgcttcatgtcagctgaaagagtatgtgcagagatacccaattcatgacatagagtttgctgcagtggtgtttgcattgaagatgtggcgacactatctctatggggagaaatgtgagatatacaccgatcacaagagccttaaatatttctttactcagaaagatttaaatatgagacagaggcagtggttggagttagttaaagattatgattgcgaaattctctatcattatatgaaggccaatgtagtggcagatgcccttagtagaaaaggtttcggattggtatttacacaattatgatctcacctcagttggcaaatgacatggtcaaattgggtattaagtttgtagcaagaaaacttaataatttaacattgcaatcaggtttgttagacagagttagagctgctcagttagtagatccaaagttaacaaagacttgagaaatcttaagagtgtgcggataaaaatacagtaaaggatttcaaggtaaaatcttaatcgagacttatgaacataggactcatgagagactcaatattcataaatctcatcaaagttggtggttgtaaggttcttgggaacaataaaccaataaagtagaagaatgggatgtgtcactggtgtttgaggtcttggtttcaactaagtacggtggacttaaagagaaagatgaaggaataggtatggtgttcttggctgccatcaagtaagtccaaaagagaagatccagaagaagatccgtagttcagcctcttactctcattatataggttgtagggtttgttagtgatccccacatgtcggggtatctcactaacaaatcccgtatatcatcttttttaatgaataaaaaattacaagaaaaaaaatatctacaaaaatctcatttttctaggccaaaattccacaaatattgggaaaaatagttattttaggctaaggatgcactaatttgaaatggagtgacaatggatgtcaccactcggtttggaattcatgacattggtgataggtgttaaaacatatgttttggggtgccactatttgcataaaatgccacatgggcggtggcagtgtcctctaacacccctcacttaattacactactcgattctcgagtaaagtgtactagtctaccttgtgag

SEQ ID NO: 24330 - DNA, 3999 bp, Cannabis sativa
  modified_base (346)..(363): a, c, t, g, unknown or other
  modified_base (3581)..(3591): a, c, t, g, unknown or other
  modified_base (3697)..(3711): a, c, t, g, unknown or other
  modified_base (3786)..(3810): a, c, t, g, unknown or other
tgctaaggcttaccttgggctgatttcccttgaaactctttgttgaaaacaccaagaatcagcaaccaattccttggtttagggctggttcgaaagagagaagaaggaagagaggttatgttgatttttgacttaattttcttagtttacttaatttctttctaaatgaaataagatggatttcccgcataaatccttggcagccacctaactctacccttttggctttaaaactagggtatttttaaaggtaggggtaaaatggtcaagttccataaccctgcttaatctcggtattttattttctcaaaaataattcctaataagaaataaggttctaaacttnnnnnnnnnnnnnnnnnngccatccatcgcattttctgttgtcgcctagcaaaaattacaaaaattacataattaacatataggagaaataatggccttagatttcaataaaatctccggaattgtgaaattataactctaatactcattaataataatggggtctacaaataaataaattcataaataataaataacagaaattagtgctaattgcctttactaatccaaattactaaagcgctcattacaattcaggtatgccagccaaactgagtggaacagctactcgacgatttacagaccattaaatcacataattcgtaaaactaatgagggacacgctaaaacactattcggggacttaaacatgaaagtaaaagtttccatatcaatggataacatggaaataccctaaatattataaaaatagaaaaaactagggttccctaaaatgcctcaaccggtagaccggttccccaactagagttccggttctaaggggtttcctggggaccaaccagaattccagttcctacaggtccccttgaactggaatttggattcaatgcaggaaacaaacaaaacatcataaccaattcaattcaactccaattcacaccaaagcttccatgatacctaattacatcataatgaagagaattcaagcaacaaaaacaagaaacaacccctgaaactcatttcaccattaaaggccaaagtttgagctcgaaagctcaaacattattcaaaaactaaaccaagccttcaaactactccaaaacaatcaaaataaccatagttctactacacaacacgaatgcaaatatcaaattaaacacagaaccctaacctttataaaaaccatgccaaactcaaccttgagcttaagaaaacataaaaagagagactagaacatttaccttggattaggatcactctaatattgctaaattgtttagaatccagttgaaaaattctgaacactagtaggttcttgggtgcgcaagcaaggaagagggagagaagttattgttttatttttctaactttgaataatagaaaattaaactaaattttattttattaaatcaagtgtaagtatcagagcgctaaaccacttccaacatcttgcactaagggacaaattaacaaaatggcaaaagactattttcccctcgcctaaaatgaaaggccacttacacctaggggtattttggtcatttctaaaccacgaataattcctgacgttcccaatgtctaactaagttgccctgctactactaaaatactgaaatgtgattccattggctaattgttgcgttctaatgctactgggaaaaaatatgcaaaaacataaaattttatacatagcataaataatacaccctgaattcaaataaatccccataaaataataaatcataattaataatattattcataattaagacctaatttttgctaattccaaattaaaactaagcagtctttacaattatcccctcgttaaaaggatttcatcttctagatctaacctgaacaactctggatattgagccttcatgtcaaactctaactccctggtggcttcccccaccttactatttcttcagagcaccttggccaatgctatggtcttgttccgaaggactttatcttttctgtctgaaacctgagcttgttgttctatgtgcgatagatctggatcaagttccaggttctcataactcagcacatgggtgggatatgaaacgtatttccgtagcatagagacgtggaatatgttgtaaactgttggaagtactggaagcaagggtagacgacatgctaccaatccaatcttgtcgagaatctcgaaagaccctgtaaacctagggcataacttgccccttttttcgaaacttctgatccccttcatggaagacacccgtaggaatacatgatctcctacctaaaattatacatttctatgcttcagatctgcataactctttttcttactctaagaggcaagcattatggccttgatcttttctatggcttcattagtccgttgcactgattccggacaaaggtattttctttctcccatttcatccaagtgaataggagatttgtactttctaccatacaacatctcgtagggagccatccatatagtactttgataactgttagtgtatgaaatctctatcagtgacaggtacttgctctaggagccttggaaatccattacaaaggctcgtaacatatctttttgtatctgaattatcctttcagagtgccatgtaacctcactatctttttcttgtataactctacatactgatccactgtaaagaatgttttcaccggtagaaaatgtgcagacttcgtaaatcgatctatcacaacccaaatagaatcgtacattcccgtggtcctaggtaacccaagtacaaaatccattatgatatccttccacttcaactcaagaagtgttagtggctgcaataatcctgcctgtctctgatattcagccttgatctgctgacaacttaagcaccgagataccaattaaaccacacctctcttcatctcacaccaccaatagtaatgttttagatcttattacaacttggtagtgccaggatgtaatgaatatggagtggtatgagcttcctgaataacctcatttctatgtttcacagtatctggaacacaaaccctggtcttatacaacaacatcccgttatctaataccttaaaatctttagcttgaccagctaacctctcttctaagatcttcaccatttctaggtcaatttactgagcggctttaattatgtctaacaaatcagattgcaatgtcaaattataaagttttcctacagcaaactcaatgcctcatttgaccatgtcatctgcaagctgaggtgaaatcttagtcatactagttacctgcccgggacctttcctcctcagggcatcggccactacttggccttcctaggatcgtaaaggatttaacagtcataatccttaataaactctaaccaatgcctctgtctcatattcaaatctttcagggcaaagaagtatttaaggctcttacggtcggtataaatctcacacttttttcgtagagataatgccaccaaatctttaaagcaaacactatcgcgacaagttctaaatcgagagttgggtattgtgctggaatatattataacaggatctagatttactaccannnnnnnnnnntaacatcctaaatatgaatttctataacaatgtaatttaaacacataaagtttgagaaaccttacagtggttccagcggaattaaatgactccttctgctcagatnnnnnnnnnnnnnnncctttctgtagcagagtatcaccgagatctgagcccaattgtccctcacttgaatttggattcttcacagtcttnnnnnnnnnnnnnnnnnnnnnnnnnatgtgtgtgggaacttactctaatcactatagggtacaaattgaagagagaaagagaaagaggaggattcgaaattggcataatgaagatggctcaaaatttgaatgaaggaaagtgtttgcatcatctttttctttgaggccatcactacctatttataggaatccacctagggttaggttagagtta

SEQ ID NO: 24331 - DNA, 3980 bp, Cannabis sativa
atatatataattatttgttaggaatataatatttttatttaaaaaataaatatataattattttgtcaaaaaaaaaattgtaacttaggatcaaaaattatttttaatagtcactataaaaaaatttatttttagtcataacaaaatttgtgactaaagataaaaaaaattgtagctaattataaattatcattatattctgattaaaaggttcttggcttaaaatattaatcacaaaaattataatttatttcgattaaaactaaattagtgataacttgtaattaaaaaattatcactaaaaataataattttttgtagtgagtttatacattttatattttctatataaatatatatatagttcggtgacatatatagctctttaaaattaattactacaaatagtaatatttgtttattatttcttcaattttctattttttttttgaatttttattataggtttataaatatttattatttatttattattatttgttattttttaaatttttaattaagtttataaatttttatttcattctatttctgattctctacgaattccatatatcacatgatatcttaaaaaaaattgatcttactttagatagtgatatggtacttacttggtggctacgtctctttctagttgtatcagtctttgactctgttattcacaatcgcctttctaattagttcgtttactttcagaaaaaaaataaaaaaaatcatatgtccaacaaattatttatactttgatattaatattttaaaatatttgaaagttctcaaaaaattatgaaataaatgcaagtattaattaactataacatctagtgctctctctctctatatatattacaattgattatagtgcaaaaaacgtaagtaagtgttttccaatgaaaattaaaaataaaattatatataatttacattatttataaaatttttagagatgagtcagtggacacaagttgtctaaatttgaaagttaaaagtactatatataatttataaaaatatataggaaattaaaatttgagttgatcatagtgtttgtgaacgaggaacacgtggtgttctggagttagtgctgtgatttaatttttctcttttattcatttatttttagaaacgtagctatagtgggatttgttcaaaaaaaaaaaaaaaaacgtagctactgggatacttcactccatgagagaagctaattagggttttggcgtttcatcataagattcatatcaacaacatttttaaaattatccacttatagtggtaagaatatttttactggtatttctttttatttaaatcaagattcaagtctcactataactatttatatatatgcttagtcttttttgaaagccactcattagaatattatatactgtggtgatgttatttttattttttaatagaataaaaatcttcaagaataatattgataaataagctcttataaataacacgtcatcttcaaaattatttaagctaatattgaaaggacacatgatcctttttaacaagcaaaaaacgaattttttaataaaattaatattattagagttattattagttaattatatatctcatcagcaacctatagttattttcttattaatatcattattcatgatattttatatatgtgcttattacaatggttctccaatatatgttgccacagttaaattttactatacacacgtatatatatatataaagttctttgaatattattgcagtaatctcctcgtgttcagtgctatatatatgtattatgtataaatataatagagacaacattaatacatttgacgtttgttgtgcatgttttccaaccacgcgggatgaacaccactttttataaaagtcatcaaacttaaacaataaaattaaatcatgtataatatgactatgaggctctatgactaaactcgtagacatgactataaatatatgaccattaatgttaattaatttaatctaatattatatcaatgtggcgtattataagtggttagtatcaagatgagttagttggttaggaaggttgttatatcagctgtaggttgttatgacagctggtatagttagttagagtttgttagcaattagttagttaacagttagcttagtctctcaattcatctctgtatataaagatcattctctttgtactctgtattcattcattcactttgatcaatacacagagttctgttttctctatctttttcttgcttgtttggtaaaagttagtaatattttatattattaattaaattaaaatatataagattgatattaaattgtatcaataacattatatcgcttattatgtcatgctgactccttaatatttttctgaatagtatattagatagtagacactaatattatttaacatcaccttaaaatgaggtcttgtaatatccaattgtaattattaaactaaattatatggtactgatacttaattctattaattaacgatattatattttggagggggctaaatacaattagtatttttttaatatttttcttcactaaatatgtatttatactatttaatacatacattagtgaaaacatgggcaatcgagatcgaccaaattcaaaagtataatacacactaattaattaagttcataaacaaattcatcgtgttccttatattatttatatattttttaaatttgttttctcataattaataatcttctttaaatccttctttttatatttgactatatatatataattcttaataattaataaaaatcgttatagtggaagagtgattatcccaaagtatgggacttataagtccctcatcatataaagaataaaaacgcccccacttaataattatttattcataaaaataaaaaataaaaaaaatgaaaggaaaaaagaaatcacttttgataaaggaataactgcttccaaaaattccctctatttagcatctctcatagctaggaaacacatttgaaaaattgaatgaatatttatatacaatacaaacaatattaattagtatttagtagtattagttagtatatatacagtatactagtactataattaatatattactagaaattagaagattttatgtatgtgtaatcagtattagttgttggagtatattaagtcaaacctcacataaattcttaataaatgtactatacatgcatgcatgcaatgaaattttactaatttaatttatacagactcaaaatttattacacaaaaattccttaaaaaaaaaaaacgaaattaactacagtatcatcactcatcatatcttcacaaatatttaattcatatatattatagctatagattgcatgccttaatttaatattaattcaatatttaatattaataagttataaattaaagtggctatatatagttgagatatatattctcgacgataatcaggatagcattatcttgaaatattaaatactattcttgggtcagaaaaaaacttcctttccatgcatattaatatttttgcccatcttattctgttattttacatacacgttatttgtatatgtatgtgtcccacttttttttttttcttttctattaatttataattttaatttgctttttccaagtatattaatatacatatatatatatatatatatatataactcgatcgttctacaaaatcatacaaagggaaaaacgttatcaaaccagtaaagatattaatgatctgaactactaattttggagagacacaatcattattatgatatttatatatgtgtcgttttttcttatctatataagatatgtatatatatttatattacaggcccaatagcatgctctttggctctaataataattccaattaattaggcgtctaattttaaactgtaaaaagttcttgccatacctaaccactaatccatcttaattgggtgctt

SEQ ID NO: 24332 - DNA, 3270 bp, Cannabis sativa
ctcatgttatggaatatgggagtaaaagtataagagcagagaagctctatctctaccaaggttttgatcctgccactgttaacttcccacccaacaataacaaactacatatgcctatggaggttgtgaaccaaagagatgcagagctatacttcatgtggcaattggtgaggcctattctcatatcagttctcaaatccttaactgggttcccttttgttacactaactgaccttttttgttcttttttttgttccacaacagtacaaaagatcagaattagagaagaagacagagattttgaaacagataaaggacacaacaaggcacagaacgcacttagatgagagcataaaactgataggctcactcctttatggcccacaaaagaatgaagctgtactgaactctgttagatcacctggtctgccgctagtagatgactggagttgtctgaagtcgatggttcgagtgtttgaaaagcactgcggatccttgacgcagtatggcatgaaacacatgcgcgcattcgccaacatatgcaacaatggtgtttcccaagcttccatggaggacgcttgtttggctgcctgtgacaaccatgatgctggccagtggcatccttcaaacaaaggttttagcgcttgatgatgataactctcaagcagtagtctactttgttagaaagcctgtttcatttatatatttttatatataaataaatgtatttatagtttacatgttggtataagtagtgtttacttatgatataagctttgtgttacaatactcgataatgtgtaaatatataaggttaccacaggatcaaacatgggcatttcaataaatttcttttggggtgagtgaaggagcaaattttcaatttttaagcacactactttcattctccttccattatatcatatacaacttgctaccatatttttccaaacgtggataaaataaaattttaaagatgattagagatatttggttattgtattccttcaaccacaaatagtatttgaattaattgctagttatacctacacccaatcaccatttactcttagtttaaatatcctcacatacggtggtatgcccgatatttttatagaaactctttcttgtttcttacaaattttattgggtcgtgggtcaggtctacgaaatgcgaatagggaacatacttttcatgtttcttttgtttctttgtccttggatgaatctctcgtctcatctttttactttgtattcgagccagtaggatttggatttcctactttagtggtcacaatgctcgttgttgcggtacttgtgctgggtttatctctcgagcaaaacattaatagcttaatttcatttcgtgcctcttcctttcacataaaaatttgtactttttttattgaactcgttgatatttctaacaagacaaccttgcaagtcatcccataattctccctgtagttgacaagttagttgtaattccagcttgaaggactgttaactgaatgctatcattcatattcttgactttggctgcagccatactaaaataacgtaagtacacctcaagggattctcttgattgctgcttgacattaattaaagtagatgcttatgctctccgatctctcgcagcttggaattagtttttgaaatccttcgacaattattttaagttatagaatggttagtagatttgtcaaaccaactacttgcgtctcttattaatcaagttggaaataatatgtatcgcgagttatttgaaacattgctttctcgtattatgttattaaagttgttcaggtgcgttacaggacctgttgtacaatcatattgtgcgacatgagagtttttgaatcctccaggatattgtgaattcaaaataccaggatcgaatggttctgcctctttgtttgtcacatcctgttagtttctcatattctccatcttggtattttttaaatttatctttcaactgtataactcgcaattatattggatccacaggctattgttccatgggttgtatgccagcatgttgatttaattgattacacaaatttggtgcattacactttagattctcacgtcggttaggttgtctttggtttaactgctcgggaatatcagggttgcgaggtttttgatcctaattacatacaaatcttgtccttgagtaactttcagattggtaactacgagagttgcttatactttcttggtcattgtaataacatcgtgatcctcctttgcctcacgtttacctatcaagggcatgagctctggttgacctactgtgctcgcgtgtttgatctatactcaaactagattcatgtgactcttctcgcatcgacctccttttcttgaagagatttgacacactgtccctacttaaattaaggtgtgcaatttctctatcgttgtgagtaggcctttgtagatgcctagggggttgacttgacgcaggttgatttccagcatttttcctgtcatggtgcaaaatttcttggtttctaggttgcgctttcttggcatttaattttatgcgagatgactttggtatatcgagttgttcattccctgagttttcaaatccatggaaagttcctagatttttaggccgcgcttcttgattttttgtatttccaatattttgtcggttttctctatctattgggatatccctcacatttccaagttattcttcctgagtgtttatgtggttctttttaggggtgcacatgggctgggttagccgggttgaaagtattttagtgggccaacctaataactacggtttggagaaactatgaactattccctttttttaaaatcgtataacccaaccctacttactataatgatataagggttgggttgggttgggttcattgggttgtgattaatatttttttagctttaatatttatatatgttatgaaaaatgataaaattcaaatgtactataaaatttaaataaaaaaattatgaattattgataatatattaagaagtaaaaattatgaaaacctatgaaaatgataatattattagtattcatgctgtcatgcattctaaaaatagacaaagactatatgttattaataacttactatatataaatattttgtcatagttacatataatacaaataataattatataaaatatacatataagtaatgtgacttagcagtgtggacacggtctagtttgggttgagtagagttagattttttcaacccataaccaaaccatacatac

SEQ ID NO: 24333 - DNA, 3498 bp, Cannabis sativa
  modified_base (1045)..(1045): a, c, t, g, unknown or other
tataaaatatgtttaaaatggagttcataaacaaaaattataacctaaacaagttttataaaaattcagattagagtcatcaaagagtttagtaccccaaatcaccaaaacacaaacaccattcaagaaatcctttcaaaattcaaacccaaaccccaacaaaatctaaattcaaaaaataaagaaagggataaaaaattcttacctaaatgttctccaacaaactctattccttgattccaacatgaacacacattaccacaccaaagttttgataaaaaagatgaagaatttagtaaaaaatttcaaagaggtcgagagagaataaaagggtggttggaatatgattttggtttggtgttgtaaggctaatatggttgatcattgttttgtataaccactatgatcaattttgttttgataggatgaatatgatttttgtatgaccaatatgttcaatttgatttttgtttgtaaaacaaagaagttcaatactttatttgaaacaaccattttggttaaagatgtcaacacttccaaatactcagttttccattgtgcccttcaccagtttcatactaatctttttcttttgttatttgtatgaaatgaaatgagtttccttttttaatattaatattttattgtttagctttttgggagcaattctttctcatgtcaattgcaattttaatattgcgactcatgtatttgttaaacatgtttttaggatagaggatatatatatattttttttttgaatagataaaatccctcaaccaattacatttatctattaacatccttaaaaataaaataaaataaatatatgaaatgagggtagaatcaataaagttctatgggagcaaataatattgtactatttcttgaattttgtttcaaaaggcaaatcacataacaaaaaattataaaatataaccaataattaacattttaccaaaaagatctctatcattcaacattccctaccatatttagaattcgaagtagtcccaaataaacctataataataataataataanaataataataataataaggtttataacttaaaataataggattctttaaaagaagaaaaccactaaaaatgatttaccataaagtttcaatatatgtatgactttagtaaaatctttgtgactaaggttataattagtgaattacaaatgtcaagtatttatatgtgcatttattagtgcatggtccaaatctaaatactttgatctagctaggcatccattgtattggtccatgtgcataaataaaaataataataattattattattataataacaaacacattttatttaacctaaaagaccaagcttggtctacaaacacccccttggaaaatattaatattaataataataataaataaaaaagtttggtccacaacttcattaattaaaaagttgagatccacaatttttaatgactcattaatagtcatgttaatgctagtattagtgcattgcaactacccaataataataatggggtgtttttggggattcaactttttcttttttttttctaaaaaaatacaaagaagaactaatgtacatattattcacccctatagatgtggtgttttttttttctcataagttatagcatcatgtcattttaaaaatagtaatagaagaaaataaacaagtgaagtaataattaagtagtaattttgtgtaaattaatgaagaaatggagttgggggtggtccataatagaggcaggtagtagctgtgttgttatcaaacacttgccattaaaacgacatggtttaatgagctttgcttgcatttaattaaccaaaatgcatactttctttctttctttattattctacatttaatacattttaacacacttaaacatttcttaatttcctatttccaatatatatgaacataactatattagtacctagcaccactataagaggttgtgccgagaaatgttaaagaatattcatggttcttaacactcttataaagtagaatatcgttattagtgcaatttaatatcgggtcttacttaatttaatttaataaagattatagagaaccatcaaccaattataagacgccatattatagaggtgttaggcatcttagtaccctatagcaatgctctaagaataattctcgatattctataaaaattattatattaaattatgtatgatttgatacttgattgtatcaataccaatatgatattttaagtggtgttacacaccactcatattttttggccttttttttttataaataaatacttttaggtactaattattacgactataaattttaatacaacgtgtatcgtattattttatacataacaaatgatatgtattttattaatatgtcttataatatttataagagtctcgggttggacacccagagcgtggccccggacccgaattctaacccgatcttgtacccaaacctgaccccaaacttggatccaatccacagacccaaactcggccaggaccttggaccttagaccctataccctggacctagatccctggacacggccccaaacccagacccagactctagttctagccatggacccgacctcacccaaacttggaccccagatcagcccgaagtcgaacctagacctagaccccagactgaacttggattggccttggatccagaaaccccaaacctcagactcggactcaaactcggacttggacttagcccgactttgacccaaacttggactccaaatcccaaaccggacttagacctaaccctagccccgaaccccatccccaatccacgaactcgaatccaaacccaaacctgaacccacacctagaccaggttcataatccggatccagactcggacccccgacccagactcgaccagcatttttggccctgggttgatgatagcatctggatccagagtcgtggtcgaggttgggattgcgttaatagtaaatttattataattttgaacagtctcttaatacaagtcaatatcaaatatagtattgtactaaataatactaatactaacacaataccataatacaatgtattaaacgagttcttagagaagtaaaatggcaatagcaccctaatgtggttaataccatattttgttagtgatgtaaatgaaaattgcatcatgcatatttatattcaaattaatatgagaatatgttatgtcttctaattaaggtatatggggtaccatagtgtcttataagtagggattttcaccactgaaatggggccatgtataggtaaccgccttgattgagactaggattagatagagacaaagataattttcatgttaatgggattctctttaatttttatttgttttgtggtagtttttttttttttttttagctattatagcatattggtaactttttttatatttatttattctgaaaaaattttggctgtttaaagtattagcata

SEQ ID NO: 24334 - DNA, 3868 bp, Cannabis sativa
atatttaaatttttattataaaatatattttgttattaggagactcctcgccccgtctccaccccattaggagattccccgctccatctccgatggggaataagcgggggatgagaattaaaatccttaataacagggatgggaacggggacgagaggagcactcttcgccaatttcccgccccatgcgcatccctagccacaactttttttacttttagtcacacatttttttgtgactaaaagtaaaaaaatttatagtgattgaattatattatattatacgataactaattagctttcaaaataagaaaaatatatatataaaataattggtatataaaaatagtagcttcttatattatataataacttactaatttcaaaaataatttttaaagttacctaaatgtacttttaatgataaactaccataatataacttaaatataactaattaattactaagatgtatacagataaattttggaggtaatcaaaatgtatcccaaattatataatataaaaataaaaaaatttatgttaaagtaattaattggtttcttatcaatgttattagtaaccaaaatgtttgttttaaaaatacatgaaaataataataaataagaatagaaaacctcaaatttagctgacgtggtacgtcagtattaatattaacttcatttttgtaaattagatacaaaacaatgtatattattgtaaattaatttcccaatacaaaatatggataattacataatgtattatttttttgtaaattttttatatttttacgtttaaagtttttttttttacatctttacggtattttataaaaataacaagaaaactacataaaagtaataaaaaaataacatctaaacaacatcaaaatataacaaaaaataacatataaataacaaaaaatcattaacaaattaacaagaatacaaataaaaatacatcaaaatatcgtatttctgtaaataaaatcataaaaaatcataaaaatgtaaaattctatacaaacatatttttgtaatttttttattgtttttgtgtatttgtgaaataattcctataaaatatgtgtatacaaatagattatacaattaataaaacaataatgcatgagttttctatgatccatttattttgtttatggaatttgtgtaccacaaatggaaatattctatgtacacaacgataagatataagttatataattcaattaaatgaatggtatgaagataaagaaaaaacacacgagttcaaatgaaagttattaaattatatttataaatgtcatggcttatgaggtgtagttttttaaattttactttcttttctcaacttttgtttggttctcacttcccactttgtttgttccaaaatatatagttccccatttcttctcttctctaagaaaaataaaataaaattatatatatgtagaaaagaaattatgccaattagggcttttattcaaaaaaaaaaataaattaaaatgataccattgccgaaatatctcataaaaaaaggaccactttcgatcaacggtaccaattaaaagaccaatttcacaagtgtatggtggggttagctcaaattcaaccaaataattaataaattataccaaccatgaaccatgcatcaaactagcctctaagtgacacgtggtgggtgacgattggtctaaacgaagttgaccatttttagcaacttttgtgataattttactttttcactgtgatctaactttctaaagatcggttaaaatcgaatgtccaaagcatcaaaaattgtcatttctatgaagagaaaaaaaaaaaggcagccatgtaccacttgtcaatgacctcctaagccttttgacttgtgtgatattgacaacttggcataccatattaatatgatacaattggattaaaatttgcttattattgatgacataaattaagctcaaaccaaaagttataaaaacatttgatagtattagagttagttaattatttttcacattgctgattagttttgaaataaaattttattatcttatctaaaatattaagaataacacattgacctttttagccttgagattctgaaaaacatgtttacttgttttttttattcaataatgaattattgatttatggagtacgttatatatttatattatattgaaaactcaaaaaatgtacgtactcattcactcaactatattttataatcgatgaaaatcagaaatattgtgttttaatataacaaattaaaactcccttatattctaaactttggccaaattcctaacaagtagagaatcttagaaaactaaagcatcaaatttttaatctcattacatatcctattatcaaagaaatctcaatcaatattaccaaacaagataaagttttagagtgcaatcctcaaatgccaaagaaaagattctttctttttttcatcaaccttatatcataaaaagtacgtaagagggtttttaagccttccataataataataataataattgtccaagtttgtgattagtgattttacttgtaacaaaaggattctataagagtggatatcctttaaaacattaataaaagctactttgattgtttttgaccgatcgttcgatcgatatgaaaaatataataatgttacacaaaaaatagtctttttccactttaattcttttctctatggtcggtttttgatatcctaataatctaaacattataccaccaccccttatttacagggataacacaatctccataataaagcaaaaaattccttttacctcaaacttgaaacgttcacacccctaataaaataaaaaataaaataataaaatttatatgtatatttttgttgaacccaaccctttgagctttgacaatgacttcttaagggtgatgaagcaccatttctctcatcttctctttctcttccctttcttgtaaagagattcttttttcatgtcccacaacttttgcctttcatatattcctttctagccttccacaaataaatgccaaccttcatttgattcttctatacatatcactctctctctctctcaactcattataacaacaaagaagaaaattagaaaagaaagaggtgaaaaaaaatggtacccgaattagaggtatgtatatatggttccaaactatatgaattttttttgttttattacataacatgcattaatgatgtatacattaaacactagctaactttgtttttttcattttttatttgtagaaacctcgagtcacagaaatacaggtccgaatggactgtaatgggtgtgttcaaaagattaagaaagcacttaatggcataaatggtaagccttctattatgataaacaaacaatgtgtttttttttttttttttttgtactccaagtatttgattttttgtttgttacaggtatatatgatctctacattgatttcccacaacagaagttgattatagttggttgggctgatccagaaaagattatcaaagccattaaaaagataagaaagattgctacaataatttctcacacagaacaacaaacagaggagccaacacaagaaccatcaccacaagctgatcatggcaacaataatggacagccaccaccacctcaagatgaatcagctgcaccaactgatcaggccccaccggagccagcggacccgctcgcagagccaccgcaacaacaagaccatccaccacctcaaccacaaccaccacctgattataatcatgatcatgatcagaatcagaatcagaatcaacctcctccatcacaaccacatgatcagcctcatcaaccatcttctgaagctgcaaataataat

SEQ ID NO: 24335 - DNA, 1954 bp, Cannabis sativa
aatttctagatcctcagaagcttctttggccatgattgctctaattgaggcttgttttacaacaggtgagaagatttcattgaaatctacttcttttatttgagtaaatcctttggccacaagtctggtcttgtacctcttgcaatcataactttatatcccctcatttcatctgaagatccacttgcaattggccaatttacacccctctggtaatctaacaacagtctaggtctcatttttcaccaatgattgtttttcctcgtcaattgcttgcaaccacttgtctctgttcttgcaataacacttcttcataagtggcaggttcaacattctcaatatcactgactatggttaaggcaataagcagtgtaatctgcaaagccaaatctagctggtgcccttgattctcttctgaccctatctctggcaatttgatagttgtcaagaggactatcttgagtttgacctatttcttctgcagaatcctatttatcatagtcacttgccttgccttctggtcttacctcaacttgtacttgtctagtctcaatgctaatttcagctttgtcttctggtttcatggccatcactttctcattgaagactacatctctatgcatttcttgaacccttcttctaagcaccatagtttgtatcctttaaatccatcatgataacctagaaacatacactttattgctctaggctgcaatttgtcatatttgacatgaacataagcaattcatccaaacactgtcagattatctagacttggagcttgacctgtccatatctcttgtggagttttgaatttaattgcagcagatgaactcctattgactaaatagcaagcgttttaacagcttctccccaaaacttttttttctaaaccaacacccttcaacatacataccattttaataagaattctgttcatcctctcagctaagccattttgttgcggagtccttggtgctgatttgtgtcttctaatcccaacttctctacaatagtttgaaaattgtgtaaaatagaattccaaacattgtatgtccttagtttcttaactttctttccaaattgattctccagcagagttttccaatccttgaaggttttgaaagcttcatctttggttttgagcaagtgcacccatacctttcttgagtaatcatctacaatactcagaaagtagttaaatcctctcaaacttgacacctttgagggaccccagaggtctgaatgtatgtacccaaggttctttggtggtgtgtttgcgagtgctgaatttatgtatgtagcatttttcataaacacattcttcacagaaatcaagtttaccaccaagttttcctttgagaattccttgtttttctaactccagcaggcccctttggctcacatgactaagcctaatgtgtcacagtttagttttatcaaattcttgattagatgagatagtattgacacatccagttattgtttcaccaatcatgatatagaaactatttctgaattcccctttaataaccaattagaatctttcaaaaccttaagagacttaccatcaatttcaaccttacaacccttctcagttagtacaccaatagacaataaatttctttttaggtgtggtacataccttacattttgaatcatccttttgactccatcatatattttgagcatcattgaaacaatttcatagatttgacaggctttgttatcacctagaagtactgttcctccttttattttttaagatcattgaacatttctttaatggacacatatgaaaagagcatcctgaatcaagaacccactcatgaccagaatctacatttgaggccactaaaatttgaaaattcataggcatctgctacaacacaagcttctcccttctcattatttttcttgttgtctctcttgagtttagcttttagagccaaac

SEQ ID NO: 24336 - DNA, 3697 bp, Cannabis sativa
tagaaaataatttccataaataaaatattctaatagctgctattgataaaaatagtacttgtagtggccttggtatggtggtgcgtgatcacttgggtactgttcttgcttctactgtttggcgcctaagaggttgtcttgatcctaagtgccaaaggctttggcactttgaaatgccatgatccagtgtcattgctttgggtatgacaatatcatcattgaaatggattgattgaatgttgcgcaaaaaatggtgaacaaagtttctctaatttcttctttgggtcttgtttgaataaaattggtaatctttgtaataattttaaggatgtttgtttttttttttttttgcattgttctagagattttaatgttgcagcccataccttagctaaagtcgcttttattgcgtcctctattactatttggtggccaagttatctaaattgtattcagaatttattagtagcagatgctactcagaaacacattcttgaccccaccttttttgagtttctttactttcggtgttagtggttgattttgttaattctgtttttggcatctttagattgacaaaaatattttataaattgattatttatttttgactaagttgtttattttatttttgtaattttgtatttatattgattgaattatataaggtaggtagcttttctatatatgaaactaaaccataaagggtaagttgattcaacaaatatttatctatccagttatgtatatttgatcctttctaagtttcctaaaatatttgatcagattttttgtgaagaaaactgaagcaaactttccttttctataaaaggaaagtcgcacttactgctcacgattccataggtatagaaacagaaattcctaggctgattgaagatctattttagggaagtatctagtgagttgtgatcttgttcaaaccgcgtatgagctattaataaggtgtatattgattataaatacaccttatagtagctaggtcttgtatctctttcacctctttgtatttaattcacatcttgtaagaaagagtatctttgttttgtagagaagaatgtgttcgtctctttctctatgtttatgtattttgtattatcttgagtctgtaatcaagtctacaaaagaagaagaaaaatagtgctacctttggaaaatgttctagaatctttcgggagatagtttttcaagtctttgttgagatttatggcctaaaagcaagtaattaatggataatttattatagagtatatgaaatacaataataaggtaaatgatatattaattataagagtataattattaaatatctaagaattccttattcatatggagaatgaataatcttgtaaggatgtacaaaagaattaagaatatacgatatgaataaaataaatcagtagtgtattaaagttttaggaatcattaatatggaactgctaagtgccatttattatacactatacttttagtgtgtgtgattttgattcggatcacatatgtagatggacatgtagtaaaggtactgtgtataattagattatgcatgactggaccaatatgtaaacatctttcattaacttaccgtttaccatgaaaagagtttatcatatcacaataatgattattagtagattaacttgaatcctgagtatacatgaaatcctattgtattcaatgaattctttggttcacacttttaagttttctcagaggagatgatcattcttgcaactttttttttgggagcttaataacacgagtgactagaaacatgttatacaatagtggaatctaagctttcttaacggatcgaatattagttttcttatagtgttaattttgggagtgctaatagttggatccaaatctttaataagttatatattaactcacattaaattaatgacacataaggaatgaagagataatggaaaggtaaaacatattttgatcaactctaatcatgaaataatcattgaagggcgagctacttatattgattatatcaatggactacaagtgagaattctgtaaatatagttctatattgtcaaagagtgtaattctatatttatagtggagtaataatgaaattaataaaccagattattttattgataaaattgatagtaatattggatttattgaagctttgaaatataggtctatggtccccgagtcacctctatacaataggagaaggttttatttgatgaatgaagttcgtaagatttaatttaaatttaatttattggtgagcttaataccttaatcctaatgcaattgagagtcttttaaatttaaagtttaaaaagaaaagataaatgataagaaaaagatgaaaatcttttctcttctctttttgagtatttgtgtggtagtccacattttggttactcatcttttggccctttctggcaactggaggttgacgttctcttactatggtggtcgactagttttaatttgagtgaaccccattttctcaaagacgataggaatttcttaacatcctgaagattatagtgaatggtttaggaactaacgtagctagagcttgtcgttcccacgaacggtgccaaattgtttgttgtaagaactcgtcaacaaaatattaagaaccaaaagtgatattcaaagatcttaatagaagaacattaaaaaaaaaaaaaaaaaactttagactcttaaactttcctcagaaaaactacttctccaaaaaaaaaaggtcccccatacaataacctcaaaagttctatttatagtgagttctctacaattttgaacttcatcagattccttagtttgagaatgtcaggtcactttcacactaggtaacctagtacctcgggcaacctgttgtcccagacatcctcagtagcacaaacactccctcttccacttgtaccttggatgagataaacattgtcatcattatccacactcattttctagtcgttatcttgtttgtaatttccttgcttaaatgatcctagcctcgatattttctcctcgtttctatttgtatgaggagactgagtgttggtgtgtggaggttaggcactgggcgagctgggcgctgcaagctgagcgttgagggctgagggagagctaggcactataggctaggtattgagggagctaggcgccgagggggagttaggcgctggaggctggtcgctgagggggagctaggcattgcaggctaggtgttgtaaggggagctgggtgcgcgggtatgggcacggggagcttgacccgtgcctttgctcctcctcgtaccaatgcatccccttgggtgcattttggaatttacacttggtgaactttcgagcataacactaataactctaaaaattacatttactaatttttggggtcaacacaagagtaagggaattcaaagtcctaattctattgggaatgcttgaagaacagaaacaattgtataagatttttataaattgatgcccatctggtagtttcaagagaaactggctcagttcacgtcatcaagtcaactccacacaagtgtaaagttgacttgggggcaaatgttatcctgaaaatttttcctggtgacgtgaacatcaatgtttgatacaaggtaagaaagatgacatctcagagttgagtagtccctaatgttggaaattatcttaccaggatcttagat

SEQ ID NO: 24337 - DNA, 2013 bp, Cannabis sativa
tttgattcctcttctttggctttaagatctgtccttcatgtcccatctattactaaaaatctagttagcatctctaaactaactgatgataacaatgtatttcttgaatttcacaagcattgttgttttgtcaaggacaaacaaacgggagctgtgctactcaaagggaaacgtaaacatggtctatactctcttggtgatgcttcctgttcaacaagatcaaatgttgaatgtcttcatgtcacctctgattttacctctacaaatacttgtaatcgtgactgtctgtgtaataaagagatccctgaatctcttccttcttgtaattcaaatttcatcaataaaaattctagtttgtcatctaattctccaagtgtttttctttccacaagtacacatgacataaacaattggcattgcaaattggggcatcctggcaacaatgtcctaaacagaattttaaaacacgtttctcatactggccaaattaaattatgcaatgctggtcaattaggaaagaatcacaagttgccatttaccacttccactagccatgccagtcaaccccttgagttggttcacactgacttatgggggccctcacatgttccttccaaagatggctataggtattatatcatttttatagatgactacagtcggttttcttgggtataccctcttactttaaaatctcaagcttttgacatgtttgtcaaattcaaaagcatggtggaaaaacaatttgaattacccatcaaagctgttcaagcagatggagggggtgaatatcgaccttttgctaagtttctctctgatcagggtatcttatttagtcacccttgtcctcacacccatgaacaaaatgggagagtggagaggaagcatagacatgtcactgagacaggtctaaccttgttagcccaagctggtcttgatctaagctattggtggcatgctttttcttgtgcaacattcaccataaatcgtttacctactcctgtgttgtccaatgtcagtccctatgagtatttgtttggcacagttcctgattacaatatcttaaaaccgtttggatgtgcttgtttcccttacctacgaccctacaacagccacaagacagatcaaagatcacagcagtgtctcttccttggctattcttcctatcacaagggatatctgtgtgaaaatagacaaggtcgaatctatatagcaagaaacgttgtgttcaatgagacatgttttcctggcctgcactcatctcagcagaccatatcagatcaggtatgtgactctgttccagtttcacaatttccatctgcaactttttttactactgatcacaatattgcttctcattctgtgtccactgctcctgcacctgtgactgctgaggctgaaccaacaccaccaaacgaccaacaagctgttattcactctccatctttgcctcaacctgaacaaccagttcttccccaactcaggtctataccagcaactttaccacccaattcagttcccaccactgctaccgaacctacaaacactgtccaaaattgtcccacactaaacactcaacctagatctcaccaaatggttacccgatctcaaaatggaataagaaaaccgaaagcttatctagccacaaaacaccctttacctgaatctttactgccttctgaaccaaagtcagtaaaagcagctcttaaagatccaaggtggtatgcttctatggacactgaaaataaagctctcaaaaaggccaaaacttggatcttagttccaagaactgatgacatgcaagctattaccaataaatggatttttcgagttaaactaaatgcagatggatctttagatcggtgcaaatctagactagttgcgaggggatatctacagcttccagggattgactatgaggaaacgttttcacctgttgtgaaaccagtgacagttcgtgttgtgttgtccttggcagtaaccaacaaatggaatgtaacacaacttgatgtt

SEQ ID NO: 24338 - DNA, 3110 bp, Cannabis sativa
tcttttaatcaatttatgcacatttggtcaatgtttgaataataactgcatagagtttttgatattttagttcacgatgtgtatttaaaaaaaattcaaacttgttttgaacactataatcttttcgaaatttgtaccatgtgtgataaacaaacacaaacatgaaaaaaatttgaaattaaaatatttcaagatatgttttctgatagagaggttgagtaagagattataatagtgtaataagagattgagaataatactcctctaatttactttatactatacattaatttctttttttatatttttctctttatcatttaaatattatatctttacatatattttattaattaaaacaaaaaaaaatacaaaagtaagttaaaaaaaatgaatattggtgacaaaactacctaaactttatattttttaacacttaaccacaaaaattaaaattttgacggcaacctactgaactctcattccgttttactctttacactcctgtctaaaaacctcgtgccacagagaactgctcacatgtacacttcatgtgataaatttttaatagttcacgtaatattaattttaaatataataaaaattattttaaaatttaaaaaaatagaaaaatagcaaaaccattagaaaacatttttttccttcttattcttcttctgctgtgttattcatcttgacaaccaccattatcatcatcaccaccacacaaccaccatgatcactattgttactattttctaaatcaaagaaaaataaaaactaaattagggcaaaaacaaaaaaaaaattgaaactcaccatcataaacaatataaaatatttcaaaccaaatctcaaatcccaactccaagtcaaaatccctgttcaaatagattcaaacacaacaaaaatatttaaaacaaaacaaataaaaaaaagcttacttattacatttttaccattgtattataagaaaataattttctacatatagtttgtatatatatatataaaaaaaaattacataaaatattattttttttatatttttacggtgttttataaaaataacaaaaagactacataaaagtaacaagaaaataacagttaaaaataacatacaaataataataaattaacaagagtacaacatcaaaatacattaacaaatcatattttttgtaaataaaattataaaaatcgtaaaaatatttaaaattctgtacaaccgtatttttgtaatttttttatatctattaataaaaaatactttcatattatattttattaaaatatgcttacttttacgagtgagttattcaatatactctctatttaagtctattacataatttacattaatttaagaagtataataaagatattatttataaaaataaatatattttaaagaatatgaaaataaaggtaaaaattaaaatagataaattgaaattggtatataatgtaaacctaattaggggattcattggatttggtatttgtttattgtacgttagaagactcttagaaagagaagaaaaatggcatttttcaaaaatagtgactttggtacatattggttggattgatcgtttaggagtcgattgggttatgtatagttcgtattataatttaattaatttaatttcttttttcttacccaataaaattgtttccaaagaagagagagtatataatttatacatttatgatatttttcttctcaaattaatagaacacacttcaaaggaacagtcatccaactgaagcacacgacctgtagagaaataagagtctcttgccaagcaatgaaccaacttatttgcagatcgttttacaaaatactaatcaataaaaaataaagccaaaagtaaatttcaaacaccttgaacattaagagcaaattgtaaaggcataaaaataccgctatgatgaatcgcttatatacacaccatgctatctgttttcaacatgactctatcccacgaatgagttgcaatccaactcaagacttctttaatgcctatatattatctcagcaatttcaggttgaacacattcaatcttcctcttcttgaatgcttctaccaaagcaccatgatgattccgagctatacaacccatatcaaaagacaagacttgaaccagaaaaaactaaaaggaaaagactaaaaaaccatgtcaaaagacaagactaatgggaaaaaactaaaacaacttcaacacataaatacggtcacaaccttaaaatcaattaaagaaagtataattctaaccccaaaaacactaattggaattaacctaataatagaaaattaataaatgaaataaaaaaactaaaacagagtaggactcaaaaactaagaaactgcaatccatgtatgtgtttcttaacctaataatagtaaattaataattgagataattggaagagtgattgaaccaaatcgccaccatagagaacatgtgatatgggtagaacgttcaaatacgactgaaccgaatcactatcagacaactggagataactgctcggcgacgccggccgtcgttgatcggcgataccgaccgactgaaccgaacagaagacgcctatgggttatcgcagaaacttcacgaaggtcccagctaatacgcgatatttcctctctcttcacttcacgtgcgcttttctcgcgatatttttgtaattatattagttaaattataaattggaaaattttcagaaatactattttttttcatgctttatatacaatgacttagtttttattaacaaaaaataatcttttaaaaaattataaaaatatactttttttagcgaaaaaataagaaaaaataactgaaaaacaacgacatttcaacttcacaaaattataaatcaactataaaacaaccaaaaataaaaaatttattatttttaccgaagaaatattttgataaataaaaatgttcaaaagataacaaataaaatatttttgtattaattgtaatttgtttcaaatttttaatcaattttgtaaaaatttcaacaatatgtatattgtagaatatagaaaaacatgaaagtccatatagcctattaattacattactaatagagaaat

SEQ ID NO: 24339 - DNA, 3061 bp, Cannabis sativa
gaaggaatattctaatgcttgttgggtgttcaagagttaagcaaaaaatatccggcactgccagtttcacaaaagctacaagttacaaaagtttaaatgagatatcaaatttaataaattgcaaatatgcaactttgataatatgataatattgtaggtataaaaagattaaaaggaaagtttcctaagctcaaacaatcacaacatcaagaccatgttcccatgcttttccttagcaattccatattcaacacaacatggaattaattttagcaattatattgtatcatgcaaccaaaattctactttatgtgcttctcaacctaaaacaatcacttgcccaggagattcattatctgtcgttcatgtacactgttaaactaagttggagtttaaataagattgaatgagttgaggcaagtaccacagcaataatgaggaaatagacaattctcaatcatcttagtactaaacattgttaaggtaaatgaaaaataaattccgcatagagagcctaagttgacgtgccttcaaatgttactttttatcaagtgtattcttcaaagcagaattggtcactcaatctgtcccccacagtttcatacataattatttaaaacctatttccaaactcctttattgttcttgaatcattttaatttatatggactaacttcacaatctcaacacgagcatatcaagtaaacgtgttaaacatacattaacacatttagttccactaaaatcaaaacgcctggcggaaaaaaaaaaagccattgtttataaattagcagagcattaaagcaggcaccataattatttgatacacaaccgtagatgttctaataacaagttaactaatttgtagaatacaatagctaaaatagcacttttctattatgtctccattttatagattcaacttcatttccaatattacataaaggcctcccgaaaccaatcaaacaacattagccttagcaaaaaggccatcatcaaaattaaattgatttaacattctcgtaaattggtatattaataaaaagtgaccaagagtgacttcgcacacagtgagtagtgtaataaagatggcaaaaatacattctctaattttctaaaattttcagtctgtaagattcattgagtgtccatattctgctatgtgcatctataaagagataaacttaaaaaaatcaaagcaaaaaaataaagcatagataaataaaaacatgcaaactctacttaccatgtcctccttagttttcttcttgtctctgtcagttaatgataaaacccacagaatacctatatatatcccaatcgtaactcttgaagtttggaacaccatggccattacatgagctcactgcataagtaagacattttcagttagacccaatattaaaactcaacaatgatactagaaaatgaaaaaagtttagaacgaataggtgaagtgagatcctgataagcttctcagacgaataagtggtgaataagatttgtttaaaagagggcttgagacaaaagatgaggctggaatctggataggtcaaggttgtacgcgtggtaaaatagaaaatttggacgtgtcaacaagtgagaagatggttttttgataattaaccaagaaaggtacaaggcggcattttgtggtaatttgtcaaggggggccgaaactttttactgcattcgaaatgaaaatctgagcaaaaaaatatgaaactaaatgaatcttctcacagttttttagatgaaagatttgagcaattgacgccttttgatttttcatttagatatgattccatccgatttcagttctactacctgctaacgaaaacaacagacaaatgtatcgatatctaccatatatatacaaaattatacaaatacacacaaattaagcagaggtggagattgatacctagtaaataagggtcgtaaattggattggatgagcccgtagcgccaatagctgcggccaacgttcggctctgctcttcaagtaaatgcttcgccggtgctagtgacggtgatggctatggcgacggagaatggatagagaactggaggatatgttgccgtgaagtaaaaaaaaaaaaaagaccaccggtgagagagagagggcggggagaggagataggttttaggacgaaaaaaagaaataaattacattttatttccactttttatttttattttaattgttacttttattttactattttttattttttttgttaagaaagcatcaattataataaattaaagagagtcgtttacaggaaaaatagctgcagataatttttcaagccaaatacaattattatcctgtactaaagtatgtttcgctaaaccatgagcagcatgattagcatgtcgtctaacatgacgaacacaagctaaataaagattggataaataataatgaacatccacaaccaaatcatgaaaataagacataatgggtcttgaattattaatcacatcaacaagaagcagaaaatctgtttcaataaaattcaattgtaggttcagactcctagcaaaaagtagaccatgaaacatggccttaccttccatgaggcttatagcaaccgcgcactaattttgactttgcagccttgacacacccagaagaatctcgaataattatgcctaagccaattcttttttggaaagaatcaaaagttgcatcaatgttcattttgaggcaatgcacaggaggaggttgccacttaattggggctgcaacaccaaccaaatgagaaactttcacaccagtagaggaaaggtgtgcaccagtagcagtttgtatgtctacaacaccagcagaagtagaaatatctactacatcagtagaaagagatgatacaccagtagcactatgccctgcatcagcagcttgagaacttgcagctgagttgattttagcagcagcattttggaagttgtgaagacaagctaatgccttggaatggatttcaattaatgtttgaggtgatttaccatgaaaaatattgtttcgatcataccaaataaaccacataatgcaaaaaat

SEQ ID NO: 24340 - DNA, 2935 bp, Cannabis sativa
tattattagtatgtttattataattgtaaatataaaaatagacataaccaatttatactatactaaaataaatatattttctttttattgtgtctatgtatttattattttctattgagttagtggaagaattttctattgaaatacaattcttacatcaataaataaataaacaaacataactttataaactccaaattaagttagtaaaaagaaaaagcagtagaaaaagcagtagaaaagaaaagaaaattaagaaaagtataaatgtgaaaatatctttgtcaaattataaaagtaatgtttgaaaaaaaaagttagtatttggtgtaaatttttcaaatagaaaaaaaccttaaaatataaatgtaaactaaaaaaaaaataaaactatttaagttagaaacaaaaacatgaaatatgagtttggataatagatttacaaaaatatggcatatcaaataccataaaaagtcttaaatatgaaaaaataccatagaagagtggcaaatctataaatgccatatttttgtaacttttttataaaatctcatatttcatgtaattttcacttttttatataatatatttatatgtagtgaaaaaaaatggtaattttgtaagctacctcaactcaacttaacagaaaaatatatcttcggcccatttatattcagggccggcccattgtgtaagctgagtttttgcttctcttgtatgaggaaatggagttgggcttgggcttgcttagttcacacctaggatgggccagacttcagagaaatatttgtttttgagattaataatcttttttaatggttaaactataaaattgtagtatcaaccattgtataaaattatattataattctataaaaaatataattttatataatataaatgtcactttatgaagcttagattgagtggtccccgtgtcatgttatagatttattttgtattataactatacatatataaatatatgtgcattaaattgagtggtccctctaagttattgctcccttaaattggaaaaattactagtttgctcactatataatattaataattattttgaatttatctcttcattaatatgtagaggactttcatttagttgttatttttcattgaagagattaaatctcaatcatacattttaaaaagaaaaagaagatttattagataagagcattacagtattgtctagcactacttagaggtagaggtaatattttatgattagttagcgatattctttaaattattattttaaattatatgagacgtggtacttaattatatttatagtaatataatatcgatgctgatattaggcattattaatatcttttagtattttttttattatactatttgtaaaaaaatgttataagatattagtagtgtttaaaagatatcagtagttattatatcggtatttgtgtaattaattatatatttttagaatatgtaaatgcccaaaaatgctcttatattgtttgttatgtaataaatgtgagtcaaaaggaaaaagagaattgtgaaaatgaaaactttgaagtttgaccaagaaaatgtgccaatacatatgtcggcatctgcatttacctttatatggttctatgaaatgtaatataagttttagcaaacaaatattacaatattcacattttattattaaacaattatcaacccaataaataatttgggtaatattaacactaatattatattatttatttagtttaacttgtaagaataggtttacttgattattaattatttttcaaatgaagtcaatttacaattatttagtgttaaaacaaatttatacaactccatcatcatcatcactaacttttcatttaattttcaattaagtcttatcaagttaggtgtgcatatatccacaaggaccacaacacaattttctttattctaaaaacacatgactcactataaaacatgacacattagtatttgttctatatatcctatttatgcttaacttttcctttttgggtgaaatctattgctctcgttactagggccgttttcccaatctctttttctatgatgttcaaaaaaaaaaaaaaaaaaatctctttttctatgagattttttttttaacattagtctataagattccaaacaaatatttggtacaaaaacatttaaaaaaatcatttaagtttaatttaagttacaaataaataattaagtttaatttttattaataaaaatatataggttatatttttagaacttacctaggtacctaatcattaagtgttaagtcaataacatgtggcagtcccttataataggtgtgggcatccgatccaatccaactttttcccctaattcgatctaatccaattagtaattggatttagaaaatcatcatccgatccaatccaattagaccttaaaatccaatctaatctaattaattggattggatcgactttttaattggatatccaattatacacctaaatttcaatttttacttaaaaatataaaaaaaaaaatacgtaaaaactaagtaccaccttctatttaagtatttttgaaacaaccttctatttaagtttaatacttcatatacatactattcttacaagtgtaatgtagctaaaaattttaaataattaaaacaataacatttccaagtaataaaatagaacaaaatatcataaaatacaccaaacaatcaagtattacaaatttaacatacaaaaaaatctaatagaaatagaataaatatatattatatttttcaatattttttattatataaataattttttaatataaataaatgtaattggattggaaaagtttttaattggattttgagattgacatccaataaccgatccaatccaattagaatccaacttttagcatccaattcaatccaatt

SEQ ID NO: 24341 - DNA, 2538 bp, Cannabis sativa
atgaggcaaaagtggggggttagccctcctttggaaagctcctttttctgtgcggataaagtctttcaatgatttccatattctatggggaccccgatccctctcattgaagacactcgtggaccctgctgcaacgattagcatgaagatatattgggccttgcttatgcggtggcgatttcaatgagattagaggccttcatgagaaataaggagggggtggaaagcctggttactcaatgaaaattttttaataatgctattgatgtttgtgctttaagggaactggagtttgagcgcagcaactttacatggtgtaatggaaggcagaaaaacatgatttttgagagattagagcgagtcatggcaaataataaatggttgaatcattatgtaattgccaaagttaaacattttagtcgttggtgttccgatcattgtcctctattcgtgacttttaaagccattccaacagatgacaatcagcgacaaacatgggggtatcgacttcactatgaaagtgcttgggccgataaagaagaatgccataggatcattaaggagatttgggaggagggcaaaattattagttcagtaaaagaactaggtagcaggatggatatttgtggagaagtgttgggtcaatggaacaaacagcaaagaagagaaagccaagctcgaatcaaagaattaaaaaaagaagtagaaatttctcgggatcattcaaaccaaggctttacccgattgaaagaaagggagagaaacctgaatggacacttagcaaaagaggaactcttttggaaacaacacagtagggcgatttggcttgctcatggagaccgaaacacaagatactttcaccaaaaggcgtcttctcgtaggaagaaaaatctgatccatggcctttttgatcagaatctgaactgcctgagctctaaagaaaagattgagaagaccatttgtgaccatttttcaggatcttttttcagtcaaggaccccaagtgcgacatcatggctcacctccaacgttttgttccttcacgacttagtagaagacaaaatgaattcctccttgctgagtttacggctactgatgttctccaagctttgaagcaaattaatccgttgaaggctcctggagtggatgggatgcctcggttgttctatgagcatcattggcaagttataggttcgaatgtaaccaaaatttgcttggatattatcaacaatcatgcggatttcagatcaataaagaagagcctcctctgcctcattctgaaaatcaaaaaaccacacaaagtggctgacttccgcccaataagtctctgcaatgtcagctataaaattgttgtgaaatgtcttgccaatagaatgaaagatagcttgaagttggtcatctcgaaaaatcaaagcgtatttattcgagttcggctcattcaggataatgccatattggggttcgaaagtttccattgtatgaaaaaaggtcgttttggaaatgggaaaaagatggcgcttaaactagacatatccgaagcttatgatagagtcgggcggtagtttttagaagcaatgatgctttgtttgggttatggcaagcgatgggtggataaaattatgaactgtatcacatcggtctccttctccgtccttgtgaatggggaagttagtggtcttattcaaccccacagtgaccttcgccaaggcgatcccctctctccctatatgtttctcctctgctcggaagatttctcttgcctcattcaagaagctgaaagagcggatagaatccacggtatcaagttttgaagagagggtatcatattatctcacctcttcttcgccgatgacaattttgtgttccttgatgcaacaccaaccgaatgtagatgtatgaagtccatattagaagaatactcatttctgtctggacaacaaataaatctcatgaaatcggagctatgtgttggaagtaggataaaggaagcagatggaattatgcttgcaactgatcttggggtgaaactagtggactgccacattaaatatcttgggttgccggctacagttaggagaaggaaaaaggaagtttttgattccattcgcaccaagatttgggataaacttcaaggttggaaagccagcttattctcccaagcggatagggaagtactcataaaagttgtaattcaggccaccccaacttacgtaatgagttgtttttgccttccgaaggagctaattaaggacattcatgcaatgatggcgagatttcggtggggttcatctgagtctaagaataaaattcattgggggaaatgggacaaactttgcaaaccaaaggataaaggaggaatgggtttctaaaacatggagaaatttaacaatccttattagcgaagcaagggtggaagataataaaccatcctcattcattgctggcccgtgtccttaaggcatgttactatacaaactctacattcttagaagctaaacttggagcatttagttcctttatgtggcgaagcattttatgg

SEQ ID NO: 24342 - DNA, 3399 bp, Cannabis sativa
tattgatcttatacatccaatctttaacattcaaaccatcaaatcttgttactttaactctgagattttttatgagaaaactaacatcacaaaaatcctcttcagcattcgattgacgaggaattggatggttctcaactatcctagagctcccacccattaatggcaactgaggaatcgaaactggaatagaatcgattggtaattgcgacaatgtctccttcgtctcagccttgtgttattataacatctctgcacatttccctaagttagttgtagagaatgcatcaaaactcttcttcatatcttcgaacagagcaacaatttttcgttcttcattgcaaattaagaagaacaattaaagcaccaattgatagatattgtggttctcttcaagacaggataagtctccaagctaaaactggctatttcatttcaagaaaaaaaggaagaatacataagaattgcttatatagtattccaaactagcaataacaaaatcaacttaataaccaagttcagctaatttagtcatacttcaacgcaactctatcaactcaacatcctggagccatctcggcttcacacgaactcggctcacccgctcaggaccctctcgaacgacatttggagcagctcattcgtttattgaagagcttggctgatttggggttttttcctgggctatattttccatgacaatatttactctttgtttccaaactcccgtgtcaatagctattgggctttctaattggtcctcactaacaaacctatataaaggttatgaaaccaattgtaaaggcacaaactctatctctctcgaacttacattttttcaactctaaaattcagttaaggattgaattcttggagaacataactctgtagaactcttcttaagcattgagatcaataatactcaaagttgagctgaaatggggtgaaccactataaaagttcgttgttcattattgtcaaacttcattccatacaccggtttattttaatcgacattcacttgtattcatcttgctcgtttacgatatttttagatatgttgataaaaaattgtgtcaataattacataatactaaattagtagtttgtaaaatttaataaagtaatgttatcaattttttaaaaaaacaagtaaatattaaattaaataatatatgaaataaaattacaagaaaaataccaaaatacattataaaataacatacaacaaaattcttctcttaatgtattttaaatgttttgttaattacttgatagagaaagatgcatttgttctctttgaccatatccggacttgggacccgatcaaccaagacccggaccctaaactcggacctaggacccggacccgaacccaaactcggatccatacctgaacccagattcgggactcgggacccatacccgggacccgaccccgtgttgagaatcatgggattctatctcaaaaccaattggtaatgagtggagtagcccatgttcttatataattctctaccatttattctatgtgggacaatttccacaatattccccctcaagatggtggctattttttgctcaccaatcttgaactgtatcagagtggacatggtcactatttgcataggtgcgaatctgataggatcacttgcccgcaagggatatgactctgatactatgttgagaatcatggagttccatctcaaaaccaattgataatgaatgagacaatatccacaatacccccggaccccaaacgtgggacccaagacctaggactcatcaaacacgaacccggacccgtagttggtgttgaggtcgagtgtattgaaaatatattataactttacacaatatctattaatacaagtcaatactaaacatagtattatattaaataatactaatataatacaatctaatacaatataatataatataatacaatgtgacgtaccaaacgagccctaaatgtcataattaagttaaattagagcactattaaataagtattagtttgttattatgtataagtactataacacatcaaacaaaaaaaaaacataaaatatttaaattattattatcactttatatatatatatatatgtatatactcatcattattaatattctctagcagagatatatataattattcttgttttttcaggagtgtttgtttgccttgccggtcgacctaatattattattattattattattttataattatatgtaatattattttccaatatcaactatacaaattatttgcatttggtgtttgaaaaataaataataacaaaataaaaaagagtagtaatgaaactgacagattctgattctcgtgtagagggagtttataaaagtaaaaatccaaaactgtaaagacaaaataataccttacgatttcaacaatacatgtataatgcttatgaaaaagctgccacaccccaaaaaaaataaattaaaattaaaattattaaataaattactgatcatcagaaccaattcccttttacataacagtagcaccactttttttttttactaaaccccataaaagagacaagtaagaataagaaagcatgctcaccaaaaaatccagaaccaagatattgttcttctatgactcaagaaaaaagctacaaaaaaatatatataaatatagaaagaaaaatgtgaatatttgtttgtttacatagatttttttcttttcaaagctcaaacatgcttctgcaaacaacagtagacaaaaagctgatcgagttgcacttttaagcagtacaactgctcttctttttttacaatatgccctaattaattaatgtataaaatatatactgcaaaaaaatataattagaaaaggatacgtaaggaaataatatgctggcacatttgtctagggttagggttagggctagggttatgttacatctttttgggactctttatatatgtataaaagaatgatcagtcactttactcagataaagatatatgtgaaagaattattaacatatataatattgaaaatttctccttttttatgcatttagaacaaaattttagtcaatgttaatgttgtaataattatttaaatttatttgtacatttttttaaaaaaatttaatgatttatattacaaaaaataaaatttaaataattacatacttaacgagcgtataagaaaaaatagtcatgtgtaattaaatatttaaactttattttggtataataaattatctaaaaatttataaattatcttaaaaaattataatgtacaattataaaaaaagaatagaaaaaactctcctaaatacttaaataaatagaaattaatcgaaatacttctttaaaatattaccctaaacttaccctatatataatatt

SEQ ID NO: 24343 - DNA, 5698 bp, Cannabis sativa
  modified_base (3628)..(3633): a, c, t, g, unknown or other
  modified_base (3797)..(3809): a, c, t, g, unknown or other
  modified_base (3865)..(3885): a, c, t, g, unknown or other
gatttttaaaaggcatatatttgtctttttcatttttaactaataaaattaaaataaattaagttagaaaagagaaaggtattccctataaaaataggaggagaaccttcccctttgagtaaacatgccattaggggtgtgcatagatcatccaatccaataacaattgatcgattcaattataaccgaccgctaaacattagatatccaattgtgaccggatcggattagatgtgatttttgaatatccaattggatcggatcggatgttgaatggtgtgtccaaaaatctaatacgtccaacatctaattgaactaattagtattttcatttagtttggggatgagtaattagattttatattgttatacataaaatatatatgtatatattaaaattaaaaattttaatcttttttcttagattggatgaatccaatcaaatccaatacatattggacctaaaatattggattgatccgatctgatccaaaaaatattaggtctaaaatattaaataaattcaaattaaaccaataaatttatatatgaaatctatccaacgaaacatcttaattatagatgttagatcgattagatataactgaaattaattagatcggatcggattcaatatataataggatcggatctgaataggcttaaaaacattgggtgtagtccaataaatacccctaattacattacatatatagttagcatagtttgattacattctgtatgtataaatatctcaactaatatcatccgttttaacttttaacttactgcaaaatatttatggtaattgtgtagttaaaagtatcaatatcctagttatatatatagctagggttaagaatatatatatatatatatgtttatataaataactagggttaagaatatatataattttaattaaactgaaaaatcaaaagggttaagaaaactaaaataaacaaaatatatatacttattttaagaattttaagaagcatagaacaaaagatttgccttctgagagagcaaatatatggatgcatattaaagaaggttaaaaaaaaaagcattaagtccttttaatctcctgcacactaaagccaaaaccctaaaattaattagaactcagctaccaagcacaggatcatgtgggttccagctataccaatcaccagtagggtttattttaaaatgtctcaagaagaagagacctataaatataaatatatatatgtatatatatatagcaaaaagaattcattattattaccatagttcctcaacaacgacagcacagtctgcaaggcttcttcttgttctgtagctcttgtaaactttctgcaccttggttgcagctgcattcatggcctcatctctacttgttcttgaataagaacattttccatcatcattattattaatatcaccattagaatttacctcagctaattccaccatattcaatgaaacacttgtatggatcattaaatgatataatagctttagttctgaaacaaaatagacgacgatcaatttaaaaatgctatttatatatataataaggagaagataagagctatatagctgctgcattttataagattttgaaaaaatagtgaaaatagtaaaagtggacgttagaaggaaaagatcgactttgacaatgatacgttcaaatacgtaagaaatctttggaatagtaaattcatcaacttgtcgtaaactgagcagtgttttgagaaaaaacaaaaatcttctatatattcctattaattaattacacacggccgggcccctctcttgcgtggtttgacttttgaattgagaattactaaaaggcatgttgagaattagctcacagattaagttaatactcaatagcaaaacagcacatcaatctatatcttttgtgcccgatagttacactacaatagccgatgacgataaaggaggcattagctgctgctggctttgccgctaatattaatattgtaaacatttaactaattaaaataaatatacaaactcaaaaatttaaattgttttaatatacttaataaaatttaaaacaaagtgttagtatttaaataaatgcaatagaaaattaaaagacaacatccacacgttgaaagtgactttcagaggaaatggctaagattacatgatcttacgagatacaccccactttgcctaaatccaacttatcatccaaagtttataggcttacttatctgcacagaatagtttaaattcatctgaatagaattcaagtccattatatgttcttagaactgtaatcttgttccctatttgtaacactctcatttattaattaaaagaaaataccataaatgaattcgcgtatgtttcctttattaaaaacaaatttttaaagttgggtacctaattgaaatcaaaatatcataatttaagtaatagaaaactaaaagacaatattcacaaataagttttatgaatttgaaaataactttcagcagaagatagccaagaccacacgtagttatatgatctcacgagatatactctacactgccaaaactaaacttgccatggaaagtctataggcttacttatctgcacatggaaagtaaatatggggtgagctacaaagctcaataaaaaaaagataccatgtacaagcactcacacaacataacacaattaaaaacatcaaccatgcaataatctcatcatattcttttaaaaggaggcagccacacagatacataaatataacacacacacatgtgtcccttacattcttaactcgaacgcagtaccaatgaccactgcacccttacgtacactatctcacttaccacatcaccatacatgtatagtttttaactattggaatatattttatcatgatctagatttactaacacgtatgtttattaacattctaaatataaatttctaaaataatagaatttaaacacatataaagtttgagtaaccttacattgattgcagcgaaatattatgcctcctcccactcagatctctaacccttgtattcttcacagtcttatacactatgattgagtactagacttgctatgagtgggcatgcactcacttactcatggctcaaaaattatgaaacacaatataagagattttgaaaatagaagaagaaggaatggaggctctcaactctagttgtttgacagaatgtaaactatgctatatgaggttaagctattggataatgagaccatcctattctttttatattatttcacttagggttaggattgaattatatgtaatgaaatattataaaataattatagccgaaaattggactaagtggtcggccacatagatgggccccactagttataattttactatttttttaaccatttatcttttatttcacaaatgccatattttttaattttaatcctataaatgtcaaaattatttatttaataattataattaataataaaataaaattatcatttgtattatttattaattagactccataaaatctcttaactaacaaataaaccttcaaaatttcttttcttcacaattaagtcattgcttagtaaaatttataaataagacacagtctaattttagaatnnnnnntgattaattaaaattaattaaccgagtcttacaagcagtattacctcaactagtatatggggaccatgggcctatataatcaagcttccaataagtagctctatatgttccacgatatagatacgctatgaaattatcaattgttataatcctaataatcaatnnnnnnnnnnnnntgatctacactgaatagggacaaagttaccattacacccttcaatttattttatcnnnnnnnnnnnnnnnnnnnnntaaatgatatttcagtaaacttatataattactgaaatgagtactcaaccatttatttttattaagccaagcttgaaggaaatcatcttttcacttctatctctagataaaagctatagattctgtatctatgattagtgctcacactcaattgtactaccatgttcttaatctatatgtcacgagaagatccatttatcgactttaacgaacaaattgaagaacataaataatataactgaactagaacctaacaatctcaggattgagataatttgatttaagattaactaggtgataatgaattgaatagatattacggcaagtttattatatcttatccaagtccaatatcggtcattttcgatgcatactccatacatccaacccaagcttcaatgcccttgaaatgacacagcacttatccaaggtgcaagtaaactacattgtagattatcttatcggttaaaccctgcatactgataaattatatatttaatcacaaaatattaattactttctactgtgttgataacacaataaacaagtatatcaatgtgataagaatttggataaatttacaaatcaaacaagtgatcacttgaaccaaataacacattatataagtaatgaaataaacctgtttctttatagataaatgaatataaaaaattacattgaaacagagttttatttagggcataaaatccaacactaatcacgtccaagtacttggaacatgattaaatagccttttataatccattgaaaaatacgatttcaccgaaactatcacattctacagttttaatacaattcaacaagcttcattaagtactcaaaccatacataagaaagcacaaggaataagtgtaactatttttccttacctcaacttcattgtaattaacttttacgatatcttttaggccctatcaacaattagcgaaccctaagaccaccaataaactcagtatatccgtaattctttcaataaagtaattttagctcacaatttgactcataaaatatttgaattagatattctacaattcacaaagttttgagataattaaaatacctttctaacagtatagagatcatcaaaatcagagttataacctagaagttacgaatgttttatcaaaacagttcatttaaaatcttgaaacagccaatttctaaatttagtccaaaaataataattttaagtatagttacacctcgatctagataatattttcttcacaaaaaatgtagttattctcttaagctttaaaacgacataaggatcttttaaaatggatcaaaattgagattgatattaagtttttactgagaacattttttctgaaacaaaacataaaataaaacatcataattgagtaaagatacacatttttgacaagtaagagctccgaattaaggaaatatttcttgaaagaaaatatggattatcaaattatctttgtaatggtaccaagagcgctagaaatgaataaatatcgagagagataatgcacttttactaagaaaatatcggaaggaaatttagaaaaattattattcaacaatcaacataaaaactgaaattttgataccaaaagaatctaaattagagaaaagtctctttacaaaaaatgtggatcattaaattatctttaaaactgtacctagatcactgaaattaaacatacgaggagggagatatggtagttttatgaaaaactatttctctgaaaacaaaaattaaaaacaaatgcaaatttagattacattattgttaatacctttaaaaactacctcaatagtt

SEQ ID NO: 24344 - DNA, 1359 bp, Cannabis sativa
attttctttcttgtccttgtaataaaaaacttttgcttactccatatgaatggtttaaaacatagtatactactacaaattacacgattcatgttagtcaatgctactattcatagcatttaccgacgtgaataaaatccaaattattggactggtcttattaaaaataacactaataatatatgctaaaaaaaaaaactgaccaaataaagctaaattttttttgaaaactttctttcattttgcgtctgttattaacagaggattattatatttgtgagggtttaaaactggcgcaaaataaaattgttagaaatataaacagacgtaaatttagtaaatacccgaaaatccaacaaacacatgctactgttcatacacaatatatccaaccctaaactttgaatgctctggcgaaacctgcttccccttcgaatccggccagtcccctccaaaacaagcctcgactctctcgatttcctctctaaaattaacctcttgatccttctgattgtttgtctacgaaatctgccactcaaaaacctttccctttcgtcgtcctcttcttcatggtggtggtttaaagctttcttctggtttttgacaatggcagacaacaaaaccattacttctccaactcaatacgacgttgtcaatgccaaatgggacatgtgtttggatcttagtcttcattgtttcgtgtatggttccttcggtggagccttagctggtcatcttctctttaggagtctagttactcaatgggcatctgtagcttttagtcctgttattgggattggatctgcttacactcaatcacaacaattattatcatcatcgtcatcatcccaatcttcttttacaaaggataattaaacacttgaatcttcggtaaaacctaatttttcaattcataataatgttgatttgatgttggatttgatttgagaaaaatttgaatgttgtttctgtaacagcctaactattaaaggcgtgttagcgtaatttttaacgtactgtgtagctcgttgctaatcaacgagattattaaaaatcgtgaataattaaaattttgcttaattatttaaaactttattatttaaagtcttttcttgacttttttgttgaagtatcttgtaactcggtgttggtatgctgcgttggtgatttgcgactcagttttttttttcctcaagtagatccaaggacaattttaaatgttcatggatttcttcttgattataaaactctcttctgtcagtcgataaattcacttcaacaggcagcattgcttccaagccaaatgctagcgagaaaggagtgtgtcccgtggttgtcttcttggtagttctgtgggcc

SEQ ID NO: 24345 - DNA, 1043 bp, Cannabis sativa
tggtatttattaggtttgatgatgaatggataatatttttggaaatagctaggttgatgtggaaaataataacaatctccaacaaaagaaaataaataatgttgtagattgttatgattgtttcccaacataattaacttattagacttttaattatcacttcaaatctttcatatttcagggtcgtctttcttcttatttgttcccacatattttttcccctatataatattatttactcagaaaattgtaaacttatttattactatagaaaacttaattaaccatttaattaaattattatacatacatataataataatataatatatataacagactttttttttgaaaatataatataacagactttagttattttaaaaatacaaaattttcatttttaaaatttaaaagaaaaaaaatttgttaaacctgttgagctaattaataaccatccatatcgaggacgtctaataataataataataataatagtaataataatggaaatcattttatacatcattttttattttatttttcaattttttccgactttttattttatttttatgattcggattgttccattagttgcgatcttagttgctgtttgaataggattgtaactgttggttgcactctatttcgtaaaaatgtaagaaaaaaaaattcttaataatattaatttcaaaaccttaaattaataattaaaagaaatatattttcttaattattttatttatagaataaaaataaataaaatttaataacatcatgatttgtcacgatgtagctagtctgccatggaagaaagaattttcgtgtgacatgtatgcactacaaaaaacagttacttttagtgataatcttttagtcacaacataaattacatgtaaaatagtgtcttatgtagttatcctaataaggataattacatgaaataccattttttgtaaaaaaaaaaattatatttttatgtttaaagatttttttttttatatttttatagtttttttttatagaaacaacatgaaaac

SEQ ID NO: 24346 - DNA, 2248 bp, Cannabis sativa
tttttaaaaagttataaatagttttagtactgaaaatagagttgaaaaacgttcacttacagatcatgaatgcaatatttattatttcgaaaattattttcgatataataaattatttaaaaaatctcaaaaaacagaaaagatataaaagaaaattaggttatattctctctaactgttgaaaacatagagatacgcccctagtatatgtataatttttttttttcttttttgaaagatatgtggatataattaatgacaatattttcaacctatatatagtgacatcttgaatcttgatctcttatatttgacagtactgtacactagtggacaactaataaattatcaaatacaataattaaagtttggcttatttgaaaagacaaatactactgtaattaactagttgacaatcaacttaatatgggtcatcaacacgtgttttgagtttaaaaaaataaataaattcatggatcaatgtattaaaaaattaattatttctaattttactaaaatatccaaatgaatataaagaaaattagttaattaattaattaagtactcacccaaacaattgctttaatattgtccaatgtcaaggaaaatccattaccaccattgttgtaatacttgagaagaacatcaaacatatcttcaaatgattcctcatcaatattatcatcacttgtaattgttgactttttctcttgatgttcttcaatgactttatcaaataatcttgataccctttcacgtaacttgatgagttttggcttagatcgactaatataactaaaaagactcacagaaggaaaataatcagcaacctcaaaccctaatgaaacctccacagatttcatcaacacatataagatctcttcattattaacccttttcttatcaccacaagtagccctagaaatagtactacacaaggctaaactaaccttatcattgatatttatagccagcccttcattcaaaccaatccattctactaagccaaacaactcttgttttctaattggcttgaatatggactcaactcttgttgggttgaaaagctcttgtacaaaaatcttcctcacttgtctccaatactcaccataaggacaaaatccaatgtctgaataatcatataccatgacttgggagtaaatgatttgtggccttgatgagaaattcagatcatgtgttctcatgatctctttggcatagtctggtgatgaagctattatggttggaatttgtccaatttttaggtacatgagtggaccatgttgtgtggctaagtgtttgagtttgtgatggagtagtgtggagccaagaagttggggtatgtttcctataagaggtagtttccatggccctggtggaagttttgatgaagagcttggtttggttgtttttattagtattgtaagtaccataagaagaaagaggagagaggagaaaaggattgagaaagagggtagcttgaggaaatccattgaaattgataattagtatgctttttctttgtattgatattatagttagtaatgatgagtattaatttatgtctacatacatatatatatatatatataggtgcttctataatgtactattttaaattgggtattggtacctgtatcggttttggtatttagaaaaaaaaaattactttaattttataatcgtgtacgtcatatccaaatagtctattttacacacatataaaataagagttacgcatgcaacagacagtttaaattttattttcaacggggttaaatttttctgaatttcttaaaaaaatttagaatatcttaaataactataatatgcacaattatataaaaaaaaatatattaaaaaaatctctcagatactgaaattgataggagtacatcaatacatcacttttaaagagtttattgtaaaattttctaatctattgggtatatatagtaagtacttgtgtgttgtctagtgttattaattttcaacacgcaagtatatgtatcgttttgacaagtaatactcgcaaagagtgaggtcgattccacgagaattattgtagttaagtacgttaaaattaaatttttacttctatttggctaaatttttacttcttactttcattgttttctttgtattgatattatagctagtggtaataggaatagaatcatgtcaaaccataattaatagatacaattaaaatcgaaagccctaacttttattcattgttaatttcctt

SEQ ID NO: 24347 - DNA, 1822 bp, Cannabis sativa
tataagattaattattattattattataatttttttttttacaaaatcacttatgtaacaagatgttttcatcaaatcatgtattttgaatattattaattatttattttataaaagtgatattaatgaagaactgtatttttagccataaaagttaaagaataaatataattttcgcccctatcctttaaattttttttgtgttacatgaaaaattgcccccaaattatgaaaaggttacaaatatcctacctcagattacattctgctaatttttttttaaaacaatttacttatgtgatgcaactagagagacatttgcaacaattttttatagttcagtgaaaatttttgtaataaaaaaaaaatcaaaggacaaaactctacaatagtaaatatattcgaaggggataaatcctatttattcaaaattaaattaagtactaaataggtgattatttttttgtgcagggggtcgattatttaaagtatgataattgctacaatgatggatctaagcctcaagaaaggttaattattataattttggtcattacattagacatcaagaaaattatctatacttcataacaaatatttctacaataattattaatagcctagttatataaaaaaaaaatgattatgctatacttattgattattattattatttgaaacagatacactaagatgagttatgcattgtctaaggctggtcggccaatcctttattccttgtgtgaatggtaattaaacttattcttcatgataattatttattttttttttgaaagaattcatgataattatttaaattttattatatattagatttgtctcataggatcaaaattataagggaaattatgtactattttttaatttttttctttcaaatatacggtttgagttactctaatagtttttatgtggattgctatgtgatttttggttacaatttagattattctgttggttgttatgtattactatatagatttccgaaaagaaactgtgaaatgaaaaaaaaaaacctttaaattataaattttaatattgttaatttggaaattaattaacattgaaaatattttcttacaggggacaagagaatccggcaacatgggccggtcgatatggtaattcttggcgaactaccggagacattaaagacacttgggagaggtacaaattataacattgagttgtaataattagttgacttaatactacaaaaaataacttattttagtgacaactttttagttataatataaattttttatgactaaatgtgatttttagtcacaataaaaagtaacttatgactaaaatatagtatttagatgcaagttgtcactaatttagttttagtcacaataaatattgtaattaaaaatacatttagtcacaacaaactgtggtttttgtgactaatacttttagtcacaacataggaatgatgatttataattagtcacaatatttttacttttagttacaaattttgttgcatgtgactaaaaatatttttttttatagtttaaatactaatcattattgttaattatttgtgtggtgttttagtataacatccattgcagatcaaaacaatatttggggaaggtatgcagggccaggcaagtggaatggtaattttcgaaaaatattttacaaaatactatttttaatttcgataattatttacataccaatattttgatagggttattgttttagtataattattttaagggtaaatatcattttggaccctttattttgtaaaagttactaattggaccatctattttgttaa

SEQ ID NO: 24348 - DNA, 3260 bp, Cannabis sativa
  modified_base (1906)..(1922): a, c, t, g, unknown or other
taaaagcaattataaaattaaaaataaattttaagaattgacataaaaatgattaatgataattcattaaaaaaatatatattagactctttatttttttttttttgccctttattttttaggcccctgtgcattagtccaacttacaccccataaaagtcgcgtgcatgcatgcataatggtatatatatatatatatataataattttatataatcaagtaattgaactacaaataattaattttatattattaatcctttataataagtaacacaacttaattaattaactaattatgtaaatatttatttatttttattaataaatactaacctctcaatagctttggtgaaaagctctaattcatctaatgttccataaacatcatatatatcatcaattaatgttattagctcaagtaatttgacagttgttgttctaaaataactgaattttggctcaaatcttattccaactttccataaaaaacattccatcaatcgatctcttgcaaaattcaatttctcaccaagtttagtatgcctccaccaccttaattatatatttttatatataataaaccaagtattaataaaaaattatgaatgcataaaataatattaatattaataataatataacctttcatttaattatgatgataataatcatcattacctgaatatatgtttcaaatcttcatgatgtgttgattgtatcatgttgaaatcgagtttggcaaactcaagcaaaataggattcatgtcttgttttttcttgtacatatcgatgaaccacttagcttctattcttgtggtccttcgatgaagtgggagctccaaagcatgattcactacttcaatatcgtaataataatcataattattattaatcatcaatttcttttgctctgatatcattatgtagtttttgagacgttcagttgtgaaaattctagcttcctctaaaatgttttcgccttttttttcatagaatgaagcttcatataaggccaatactccaatgatatcaccacttatgtttgttttgaattttcctgtctcgtccttaaaataattaaaagtctctgctaataacacagatcgagcaattattaattattttacaaaaatttatttagtttgtagtttgaaataatatgattaattagttaaattaattgaatcattgttagctattttatacaaaaatttacaagtcgtaataaaaattttcgatgattatttcccaattctatgaaaattccgatttcaatcaaattgaagtatttttttttttttttctttttgccttttatcataaatatttatatatatttaattaatatatgtatatataccttgaggtacagcataaccatgttgacgtagaagcctaaattcaagagcagtggcatataaattataattagggttattaatattaccattaatattgacatatttttcttttaaaatagtatttatttcattctcaaaacgataagatactccaagtctttgtaacgtgtcaatgagttcaagttgagctaaagagttttccatctcaactagcatccttttcacatcttcgtcgagtttttttactcgacttgtataaggttctccctacacatggtataaatatatacatattatatattaaaaaaatatataattaaacataaaatactttagtaataattaatataaatttttcattacatattttaattagtacataagttaggtcaacatattgattgttactatgcaatcacaactgggacgatcgcaacatgggactttccgtcctcgctatagccttaaaaagtcttcaatctaataattatattatcgttgttaataattggtcactattcactataaaaaaatcttacttnnnnnnnnnnnnnnnnntgtgattaaaagtaaaaaaattataattaactatataatattattcttatgttgtgattaaaaattccgtaactaaaggtattagtcacaaaaattacaatttgttgtaattaaaatgtgtttttagtcacgatacttgttgtgactaaaactaaattagtaacaacttataactaaatgttatgttttggttacaaataatattttattatgactaaaaggttctaactaaaagtaactattttttatagtgattgtgagagaagggtgatcaattgccttataattgaagaaaaaaaaaattataaatatgaattaaactaatatatattgagaaataaatgatgaccttatatttgcttgaaagagactgaacgaaatcaaaagaccaaatggatggttcaaagttggctgatcttcgaacaatattagtaacagaactatcactagggcttttggctgatatgcaatccattttattgtaattatatatttatatatatataaatttgtatatatgaacaatattaataacaataaaatattttttgagatgaaaacttatgcattactttgcaattgtacgtatttatatatgttgataaagaacagttaggctaaaaacattaatgattaatattaattattaattgttattaaatgtgtacacaattaagtctcttccactttttttttcttaaaaaaaaagaaagtatcttccacttaattaatttatagtttttttttattcaaattaatttatagtttgatcactttattagattgaaaaattaaaagtcaccattagggattggagagataactcttccatctaaaaaagctagtgatcatctatccaatgactcttcatttaattatattatgtttccttcatattatatttatatatatatatatatatatatattcaagatttaaaatttgtgttaaatttagtataaaaaatgagtttgtgtaatatttgctctattatttacaattgtattttaatgggtacaatatgtaaaataaggaaaaaaaataattatattgatagtcatttaatattttattaagaatatttaaaaaattattcttttctattcttttattatttaaataatagtaatatcataaataaagaatataaagtttagtaaaagtcaatgaaacaaaataattagtggcattagagtaaataaaaaagtagcatttattgtaatattatatcttgttccaaatttagcacaattttcagcatgtgccaaatttatcacacttttaaaaataccattagagtaatagttttccctaagtgtgttaaaatatagcagtaca

SEQ ID NO: 24349 - DNA, 2893 bp, Cannabis sativa
gctcatgttttggctaagcacgctattattgttaccacaaacactgtatggtgtcccgaatttcctttgtgtgttcggtccttgattgaatctcttgggtcctcgttctgaggcacctctctcttttgaaaagaaaaaattctcaactaggggggatcgggggaagtcccccccgaccaagctgggaatgaaggaatgtactctaggggctctcccatagctccttaaaagcggagggagagacccagagagggagtgactgaatgacccagtgtatagcagaccgagggactcatgggtatgagtcccgagagactttgttaagactaagaactgcactgaaatactttatacaattatattatcgttatgatatcaaattcaaagtaaacaagcaaatactgatttatacaagcgaaattttctaattaaatcgataaatgttccaaagaaagaactttgatttgattagtgtttttcattcaatactttaaacttcttgcaggctatttcaggagttcccaagattagggagggctataatcctgctacatgggtcttagaagtgagctctaatgttgttgaaactcaacttggcatagactttgcaaatgtttatgtcaactctaacctctatcagtaagtcaactttccacttcaatatgttccttaacctcctaatccaatcaatttgaccataattaatgatctttttttacaactttttaggagaaatgaagaacttatcaagcagttaagcactccacaagagggttcaaaagatcttaactttcccactaaatactctcaaagctttatgactcagtgcaaagcttgcttttggaaacaacattggtcatattggagaaactctcatttcaatgccattaggttcttcatgacagttgttattgggattatgtttggagtaatcttttggggcaaaggagataaaatgtaagtcaaattctttaccttaccttttagtaaaaaaaaaatgtgcactcatttggtatcctgtgtttaatctaaatacagtactttgtattttgaaatcgtacatatttgtctatttggtatcctaaacttagatttgatcaatcaaatttaatcaatacggtctaattttcttctagagttctaaattcaaatttaattattttattacatataatccagggcagtttagtcaaactttattgatcaaatttgatgtacaatttcaaaatataaggtaacaaatgagcattattagaaactcgagtaccaaacatgttcttcgagaaaatataggatacaaaatgagtgtattctaaaaaaaagttattcttcttgaagtaaacttctttatgatgttggattcttgttcatatggattttttcctagagaaaaacaacaagacttgattaatcttcttggggctacttattctgctgtactttttcttggagccacaaacacttcagcggtgcaatctgtagttgcaatcgaaagaacagttttctatcgcgagagggcggccggaatgtattctgaattgccttttgcatttgctcaagtaagaaattaagtaccatttttttatgtcacatttttaatcctttgtttttactaataatgtaaattaatttttgtatgttggattcaggtggctatagaaaccatttatgttgcaattcaaaccatggtctattctcttttactatattccatgattggattccattggaaagtggacaaattcttctatttttattacttcattttcatgtgttttacctatttttcaatgtatggaatgatggtggttgcattaactcctggccatcaaattgctgccattgttatgtccttctttctcagtttttggaacttgttttccggcttcctcatccccagaccggtatgtctcttgaatcttcgttgagatcgcaaaaacactagttaacaattaaactggctttttaatggggtgtttgttatgtgaattggactttgagggaatagagttagagggtgcttagattaagggaatatgaaaagtgttggagatcgtcaattaaactttgagattctgtttggttggaaggaatgaaaacataaagaatagggatgagaataaaacagcaataggaatgaaatgaaatttaatatgtataaaaaattattaaattttttcttatcttccattagaatggtgtttccttccatttcaaatagaatagtcgttctattaaaatggtgaaaaaatcattctagtagaataacattccaatacttcaaaattcattctattaccttcattccaaatgtcacctaaaagtgggacctacttagaaatataaacttgttggtcaataaaatttagtttaccaaacatgggttgagtttgacattcttattctcaccaagtctagctagcataccaaatgtctggtaagtagttttacatgttaaagggctttagtgtaaataatttttgaggtttatacaattttagttccatgtgcttttttttaagggggaatttggtttttatggtttttaaagtataaatttgtaaaaacatgactttttctcaaaaaagttatattatggaagaattttaaaaaaaaaattaaaaaaatgtataaaaaaaaatagcataaagtacctgattaccccctaataactggttaccgtaagggtacctagttacccttactcaattttcctatattttttaactttgtcttcaatttttccataaaataaccttttgaaagaaaaaaaaaaaccatatttttgtacaaaaagtatcaaacccataaaatttgtaattttgtcttttttttaatctcaatttcaaacaattacaaataagacccaatactttgtaaattggttaaaaaa

SEQ ID NO: 24350 - DNA, 1697 bp, Cannabis sativa
aggttattcttatttataattggcccaaattgagacttgattttttcataacaaattaaaagttattcttgaatagagtatttttatatagatgttctactatataaactaagaacacttcgcgtgttgtttataaatatttttaattatatatataaaaatcattttaagtaccatttctatcttaattcacaatattataataataataataataatttactcaattaattttataaatatgccctcgactataatgactttattattgttaggttatttatgaaccgtgtctcctaatttgagcatagattttattttatttttttgagtacaatgagcatagactcttaatgtgtaaaataataataattataatgtaaaatgagaaaaataatacaaaaaaaaagtaacaattagaataataaatagaatattttttttttcccgaactatgcttttctaaactttttttttaattttttttccgaactataactatcattgcaaatgccatttttatttatatctattccttttcttaaataattagctgacatagctgtatttaaactaaacattgatatattcatataaaaagaaattttttccataaaaaaaaaagtaaaaattgagaaattattcaaaaatgggaagatctaaaacaaaaaaaacatctaaaaaattaaaactcaacataaagattaaaaatattgtttaatccaaagaagaaatatcgctaaatattataggaacaaaagatcaaaaattgaaagaatttaaaccaaaaaaaataattttaaaaaatgagaaatttataaattcactataaaatactgaattaataaaatggaaatataagatgaagatgctataataaaaaatcattaattaaaattaaaatattaaatattaagaaagaataaatatagtgaactaaaacccaaataagtggtaaatatgaaatatcatatatttttcttatttgaattttgtttttaaaattatcaataaataaaattttgaatctgaaatagatatttaataaagtaatttacattttgttagattatttttattttatttttgaatcatcagtaatcaaaatttgaatctgaaatagatatttgataaaataatttatgtacttttttttggattgttcttaataaaatatttaattattaagatatttttgaaaaaaaaaagtacttaatatgattttttgaataattaaaataaaataatattaacaataattaaaataaatcataatattgtaatgattttgttggtgaggatggttatgcgatttagttagtaatatttttttttttgtttattattagtcaatataaattataaaaagaaaaaaaatagaatttatatgagatttagctagaaatactttttattaatttaactttaataaaaaatagagcatttaaaactaagattgccatgtaacgtgcccctcaaattatgcatatatatatttatgttgatctcaataagtgattaaccgatagcagggtcgtatagatctgatgtttgctacgagttgcacacacaagaatggaaagtaataaacacacagatttgttatagaagttttacccccttgtgatagcgggtaatgatctactctcattttggtggtattgatgcctagagataatactattcagatcgctata

SEQ ID NO: 24351 - DNA, 4376 bp, Cannabis sativa
tgattttgacgagagacaagaactggatatattttgtgcttggattttgtgtccaatatcagaaacattctagtttgttcagattaatactaattaaattccaccattttttttactggaattgtgtgtaaataataataataatttttcaacttaaaataattaaaaataaaacaattggatgaggtgaggtaaacgtcatatatatggacaggaatcttagttgaggataagccacgtggacctgagcattaaacattatatagtagtgcgttgtagagagactatgactatgactatgactatgtgtgtgtaattttacgtagttattttctaattataacaaagtacacagaaatataaaacaatgatttcttaaattattgaaaattttatggacaaaaataaaaacacgaaattgatatatttaccgaaagatgctgtgtggaaagttgtcatgttctcccacacgctctttcctcctgaaatgactgttttgccctttccatctccaataaacatcaaattctttttcttccttcctaccttcaaattattctcttcgtacctgacatttttttttctttatttattagtatttcaaagtttaaaataattatttcaacattttataatgtacaaaaatacaaagacaggaaagtaactcaaaaaaggtcttgcagaactatctcaaaaagtttagttttttttccatgtaaaaaaagaaaaaactaaatcacaaaaagaaaagggtataatagtaatttaaaatacaactacttaactaaatgtagtcacatggtttatagttaggtcttatgattacgcagacgaattcaacgaaccaatcacttcaataaaaccaaatttatcaaaaaagcaaaagtttgaaaactcaatttcatgcaactaccacgcacgagagatagttatcatatttactttttactgtctatttttaccgtaaatcagtcaatttaagttgtcaagtgaaattaccttcctgccctcacgtatataatagtccgacgatcactgtactccggtgctttctttattgcttcagtaatagtcttgtaagtcccatttccgtcttttgacacaacgatatcggcttgtatcgccgagacaggtaaacccaatagcctcctatcatttcgtttcaaccatctcgggaaatctcccgagatattgtcctcctcttcattctcagccgccaataacctcctcttgttctgaatcggaactcccgagaaatcgtcattaacacttccagaaaatagcgccagacaattactcacgagttccgataagtccttcaatttctcggccacttgagtcttcacgttcccgttaaccttgggcccaccttcttcgaacccttctccacaggtctcctggttcgtcaacgccgcactcagccacgtcaccacgtcatggttggttgatcctccgccgttaccgatcgagacggaactgagcgcacgcgccaccgcgtctacagaatcgtcaagaagctcgaggcaaacgtcgtaggctgagcgcgtgagcgagtccatctggatagaggtcaactctgaggttgaatagagggctttgctaaggtgctgcagcgtcatattgaagctaatgtggaccagatcctcctccgacgcgctcatcgcgcccggaaaatcaagtaacgagttcacgcaaagattcgggtaccgtgttttgctgcaagccttggaaatcgcctgggtcggttttcggggcatggtagttccgggttgacccgaagctcgggttcggaccccgattaatagcacggctgagacagccgaagcagctattaacacaatggagagagcggctaggaaaatgagcttcttgtttttttttctcccgtgggttgcgctaggcggttggtgtgacgtggcaatttctgattcgttagattgtgccgatgcacctccacgatccgacggttctagtttgccgtaccccatttctttattaaattattcttttaagtggaaggaagtaaaaatttaagagaaagagaaaatggggctttaaatgttgaagaggttggggtatctatatatatagattttgtagtagtagtagtattagtagtagtgtttatatattataatacaattttcttgctctttgtatagatatggtgagagagaggagagagagagagtaaaaaaagttggtgtgaggtctacgtcttgagcattagctggctactacttcaccaccattgtccatttgcatttgggttagaaagagaaaattaatgtgtttgaaagctatataggaaaagaaaagagtgtgtatgtgtttattgtagttgtaatagtagtatataacttttttcttttggattaattgttaattttaattattattgaaataatcattgatcgatcactatgagtaaataagtgaacaaagagtattactctcaactttctattataatttattagaattcttgatattttttttaaaaaatattttaatgtatattttcaaatataaaaattaattttttatagtgatgtttgttatgcttataatattattcttgtaaattttttaaaaattttaaataatttacagtgtcaaaaatacgtttgaattttttttaaatgctagtggtaaattggaatataaaaaattctattttcagtatatgatttcaagtgtgataattgattaaaaaattataataaaaaattgtaattagggctcctataagttaattagaaacattttcacttaaaatgacactaagcatattttatatttataatgtgtgtgtgggggggttctcttagcacctaagctattagtggtgatcttctacttatggttctttcattcttggaatagtacaatacaagtagtagtggaatattgtaactttttacatattgtctctctataggatcatattaatctttatttgtatgtatctatctatccccttttcttttcatcataaagctaaaagaaaagaaaataaagaacttgattcaattttttttgttatatacgaataatataagattccaatattgagaagatttcatttggtacaaaatcatagtataccatttatgaagtggtatatgagtgtattattaaatatgcttatacatgatctaacttaaattctctttacaatgtcgtacgtacgtatatttaacttataataaagtttattttgtgttctttttttttttcttttcaaataataattacatatatttaaatgtgtgtatctttttctctttgttggtgtaaatgacacgagtaatagctaaattttctaaattgttctttttggtaaaagctatacaaaaatcctatctttttatatacaaaacctttacattttcttttcaaaaagtactactaacaattgggtaataattttctgaggacactctctggctagttttatctaagtatagtagaacaaattatagggttggcaaaagggtccccacctcttatttaaaaaaaggtctacatgatctttaatttaattatgaaagtgaaaaattcaaataaaaataataaatacgtatttaagtagcgtttagttgaaggtaataaaatagaatattaatgaaaaaaaaaattattctattttttttgtttggttgcatattaaattattggaatgtcattcaatgtagaatgatctttccaccattttagtagaatgactatttcatttttaaaataaaaggaaagataatatatttttaaaatagaaggaaagattatttcattctattcatattcctattctcattctcattctcatttctctttttatattttcatttctctcaaccaaacaccaccttccttctttaatactttatttgtataccattagattttatataatgacaaaaaataaaaacatattgaatgttgacctaagttattcactcatgatagatatttaatcaaaattgttttgcattttgatgaaatttttacatccaattagactggtcgaaattaatgcagttgcaaaattattataggatagtttttgtagtaattttgaccaatctcattttgtcacttggatcgagatgtaagttctaatcgagatatatctgatatcaatactatattaactagttaatatagttatgaaagattataacatcattggctatcatcaataacaactaataaaagtatatctatcatcaataacaagttttggcatcactatcaatcatagagttacaatttgtttttcactctcttgcatccattctatctgaatttacttatggtggacaatgtcccatatggaataaatagtagagaattgagccatatataagaacatg

SEQ ID NO: 24352 - DNA, 3647 bp, Cannabis sativa
ctaacaatactaacacaaacaataattcttagtacaaaatttcataagcacatgagcatcaaagccacaataaagtcatatgtttcaacatacaccctgtgcacaaatgtccactcttcttacttcagttgttgagaacacctttttgctacttcaagcacctcaatgaatttccttattgagaacaagatcctaaacattcattagcacaacaagacactaaaatatatgggcctaagatgaattaaatttccaggccctaaaaaatatataaaaaaatatcaaaagaagagttttgtgggatttgaactaatgaccttaaatattatgccatccacctcaacaaactaggctatgaatatttgttgcttataatgcacataaattttacttataaaaaagcctaatatttttttttattttgggaccccagaaagtgtgggccctaggcatgggcctagcccgcctatgcctagggctgaccctgacaaaaacctagtaaaaatacgtaacacataagccaatttcacttgcatgccacaccatacataatcatttatcattttgattcacacaaacacatattatgtactcaaacaaatattttaacgtaaaacatgaacacatacaaatatttttaacgtaaaaatttactaaaatactatttattaacaaaatatacaattatgtaattatttaccaaaatcagaagctagcatatttttaatcatttatacagatcataaaacatatccaatctacttagaaatatgtacgaaatactacccatgattatgtataaatttatatgttaaaaatgaataaaatcctaaataattttatggggagaaagagttcggcaaccaggagacttgaagaagattgtctggtgtttgggaataagcttgatctcaatcaacaagtgaacttaactcgtcctttcagcaagaaagatgtgaaagatgccttatttggaattcactcatccaaaagcccgggtcctgatgggtttggcgctgaatttttcaagaatagttggaatgacattggtgaggatttctccaaggctgttttgggtttctttcaaactagccagctcccttaggaagttaatgaaacatccatatcccttatccccaagcttgataacccccaaggagctagtgactacagacctattgcctgttgtaccacgacttacaaatgtatctcaaagatgatctgtactagacttgcggaagttcttccttggcttattcatgagaaccaaggggcttttgttcaaaagagacttttagctcacaatgttttgatcttgcaggatctcctcaaaggctacactaggaagaacatttccacgagatgcctcatgaaaattgatctgagtaaggcgtatgacacggttgattggtgctttgtaacggatctcttaaaaggcctttgctttcctgctaagttcatttcttggaccttaagctgcctccaaggtgcctcttatgtccttcttcttaatgggaggattcaaggctaggctctttcaagggtgaaaaagggcttcgacaaggggatccgatgtctccccttctctttgtgcttatcatggagtatctgactagactgctcattcagagttctaagaagaaagggttcggtttccaccctctctgcaaatcgttaggtcttgtaaacctttggtttgcagacgatctaataatcttttgtaaaggtaatgagaagtcagttcagatggtgagaaaggcatttctccttttcagtgaggctacgggtcttgttgctaacaaggcaaaatcttcagttttctttgggggtatctcttcagttgataagcaaaggttgttggaggttttagaaatggaggagggttcttttcctttgaagtatcttggtgtaaacctaagacctaccaaatggcgagcagaagactgtggaatcattctagacaaattacataaacacctgcacacctgggctagtaggaatctctcttttgcgggaaaggctcaactaattcattcggtccttcttggtgtcaggaactattggatgaatctgttcttgcttcctcagaaaatcacggcggctattgacaagtgttgtagggactttctttggggctctaatggaaataggagcaagatgcatattccttcatgggagaaagtttgtcttcccaagatttctggtggtcttggtttcagggagggtaagaagtggaacatagccctcatggcaaagtacatttgggcaatctcgagcaaacaagataatctttgggtgaggtggattgatgcagtgtacttgagaggggtgagcttttagacagttgatttcaagcaagatgcgagttggtacttcaagaagatacttcggcttcgatcaacaatcaacgagtccatagtcatggctgctgagttgagaggtaaattcaatgctaaaaccttttatttctcttactgtcaagctcagcgtgttgattatgctaggaatatatgggatagattgatccttccaaagcatagatttattgggtggaaaattgtgaatgaccaattgcttaccagagataatattagtaaaattatgtccatcccttcagatagctgcctagtttgtggtatggaaaaggaatctcatcaccacctttttgttaactgctgttatacccgaagtgttatttctgaggttactacttggtgtggcaatttctcttggccttctaacatcagggattggttttcgagctcatcaaacagttttcaggggaaagttcttaattcaattgtgttggcgactttgtacaatgtttggatgaacagaaactgttgtatctttgacatgaaatgtaaaacagttagagctatgagtaaggagataaagttttgtgttaaaactagatgtttaatgggttgtaatgggggaaaagggaaacttgataattatattctcaatgtaattgctaggcggccgtgagggctgagtgtgcagctgtttgttgtggctgttctatgtttgtatttgttgctggtgcttctttgcctgtttgaataaagattttccgtcttgttcaaaaaaaaaaaatcctaaataattaactaaaaatagcaaaagatctcaacatagtctgaaattaattctagacactataattatattttagcattatattgaacgttctccaaacattgaacacaatttttactatttattctatttaaaacctaattaaatagttaattagtcacaaacaattataataaatacctacagcaactagtaaattataaaaccttttttttttcatatcatagatagtaaataacattacaaaaatatatttttctatttcagcatcactaaactatttttcataattactttaagtattaactaagtagattcatgaaaaacacaaaaaatgatcaaaaacaaaatctaatcattctaatacattttatagtctgtaccaagccccaaatgatttactttgaatctgagcaacctaggtatttttcataattaaattaagaaataagacaaataattcatgaaaaatataaaatagattgaaattcaaatctactaatattgtaacattttatatctcataactaatcatataaaataaa

SEQ ID NO: 24353 - DNA, 2706 bp, Cannabis sativa
accaaaaatttggtaactatatgagttactaatgattttaaactgcattagatttgtatcaacagtttggtatatgtgagttactaatagttttgaagatataattaaattaagcaccaataatttgaagactatttattccataactaagaagagttagtaatggtttccaatagatattgatttagtcagcaatagttaggtaactattagttactaatttcaaatagcagattagttggtaacaattttaggatttgtttggtattatttttttttttatttttttttaaattgtgtttttaaatacgagatatcacaaaacagccgactgaaataagaaaagactgaatttttatgccgcttacaaaataaatttctctcacaaaattatttgtttttaaaaatattgttctatgaaaataatttcaaacaaacaatgattatggtgttcactaaaattatttttagttatggcaccaaacatattctatttagtaacttttaagtttttgacagttttgaaaatttatgagattgatcaccaacaattaatttttttatttcaatttttttgaaagggtcaccaacattattgtatattatattacaagttacaagtaaattggtcaaattattgaattttgtcaacaatagttttgtatctataaagtaccttccaaagggttaattaatggattctcatcaatgattttgttgctatttattcattcatttttctacaactatttgtttttttttttcttttctttatgattgtgattattagttttattaatttggtcttaatcaattaatttggtaatttttcttgtgaacttcatacattttttttatttttttaatatgttgatagtaattagctagttaaaggtatgtgttaaattaattgtaattagtttccttaattgttaattaattttttacgagaaaaacataccttatgtttatggtttggtgcagtttgttggtacccattgttaagttcccttatgcagtggtaaaattttgtatttttatctgcgctatatttttcttgtaacccttatcacacgtttattaaactgtagcttgaatcaaaataatgatttataggagaaaaaaaatcaatttaaagtataaaataataaaaaataatattttattatggtatttattaaattagaaaaccataatcattttattttatttacatagtatattgtagttgtaataggtaatgagaaaattttgaataatttatatgttgtggcattaaaatttaaaataatttattgaagcaatataaaataaatcagacatgtgtatttaattttttacattttatttttaatattgtaaaatattattcaaaattttctaaataaatggtacaatactttatgtactacaatatttacatcattacattaaagaaaaaattataatttctttatataccaaaaaaaaaaaaagcaaaattataagaggaaatgtaacaaaatttatataatccaattcaattcaaatatagagagatgtggatatatacccctattttgcatatcaagtggatcttgaacactctttgcttataaaccactacaataagtaccattaattacaacaaaaatgggctttagaagatgaatctctttgtttaaataattaataatgctaattacttttttttttaaacaaataaatattacatctttgtaattatacttgatatgtgtgtctaaatactaaactcactctaatttctttttgtctacttggtgaatggaaaattctatattattagatcgattgaataaagattagataattatttgctacttataaattatgagactttacccaccaataaaatatgtgaaatatgatgaggaataatttataaattacaattatcataaattttttgaagagataaattgtgtaagacattaactaaatttgtaaattttattttagatttgtgtttagtaaatgttattgatcagactatttgatttattaaatgataatttaaattttgtattttttttttaaattgtacaaaataataccctcaccttaattttcacctaataataatctaacatagaaatattatgactagattgattatattttttttttttgcacctactcatacaaaaaaaaaaaaaaaaaaagttaaaggttttattttatactattttataaagtacaacgtctagtttaccatttaataaaataataaattagtaatttttataaaatttagaattcaaattaatatttacagttaattatatgtataactaaataacatgcatttttctctaaataaagattacaaaaatccactcattaacaatatctcaagctatatagttattagctacaagtatttattttctttaatctttaaatatttatttttttaaaaaatctaattatattaatagtaattaaaaaaaagtgaccaccctattaattccgacactgaatatataccaaaatatatgcatgtgttttcaccaaaataaatgaataaataaaatagcataatataagaaaaacacaaaaaaaaataaacctaagatcgaaatgaagagttaattaacaacaaagatctatgcatgtaatattaactataataaataatattataaaagattttggttagtgcctttaaattaaaacaaatatccc

SEQ ID NO: 24354 - DNA, 4203 bp, Cannabis sativa
  modified_base (3037)..(3039): a, c, t, g, unknown or other
tcgggactcgagcatgggtacattgcttacgaaatgtgtatcaaaagtcaaacctaaattgtaatattcaaataaaaagtagattactattattttaagttaaaaggcttaattataaagaaaaaaaaaatctaataaaatttcaagtaggcaacgtggtttaaggtttaagccttttcggtactaagtaatttgaacacaaattggaaatcttctttcacacttaattttggcaattacaaggttaattttttttttttaataaaattcaagcttcattaaaaataaacatataacagttcaaaagaagcattcacctccaaaaatatacgatggacataacatcaagactgttaactcaatttttagaacgtttgagaaaatgtaaaaaagaattactcaacaaactccttacacgtactcaagaactatttgaccaaataagaaagagatcatctccatattactttgggacagcttgaagaccaaaaggctgtactgtcagtctccactaagatcttccaacagtgatgaagcttcaaccaactaataacaacctcctttattagtgtactattttatacaaaataattcccaaagtataaattcattattaaatttgtttttctccttagatttctagcccactgaaatccctgccactgttactggaatatctatacattatacattgaaagatcttgcagtagttcttagccttttatgttttaaagattaaagaatataattcctttaaaaataataataatatataattaaagaatataataataaaatatggtatattatcacttcgccactcaaattttatttaattttttagaatgactaaactattaagtcatcatcttaaatttgtatataatagactataatatggtgcatcacttgccactcaaattttaaattacgaccatgacaatcttgtccaaacttttctcttctttttcttttgagctgatcctaggttgatacagtcatatttgtcttgcctttaattaatttatattaagtaccatatgtcacctaaaaaggtaaaataaaaagaaaataaaaaaaaaaagaagaagaattagttccaaaccaattatgaaccaaaaaccaaattatttatgactaattagagtttttgattataaatttattaaggacggagttggtttgttgacagatgtgatgatcagtcagaattatttaaatatagggtatattatattatgaattatatcgttttagtgttgagtgagtggctaagaaagttgatattatgaattgcaatatcattggaaattaattaagcattaaacaaatatagaataataataataataatggtgcactttagagcaaaacctttaaattaagaaataaaaaagaagctataaatccactaacgaggtcattatgatattatgtctccatgagtggaccataagttaattaaatagttaatttaattttcaattcaaaagatgccaaagttctttggcttgaactgtttgtatggcttaaataattcacttaggttgagataatcatatacatatttgctacctatggttatataatatgccttatatatggaaatattattatagaatagagcctacattaattattagaaattaaaccaagcatagcaacagatagttccctatagtcccaacttcaataaaattaattatagtgtttgctgcatttgtttttgtcctataattcgttgatttcaaatgcagttgacaaaagatttaaaaactttggtttcttattcctatttttgacaaattaaataaaatgtagtttagccagacaaaaaaaaaaaagttcttcaagaagaatctaagggtgcttttgtaagtaattaggtaattactaggtagtgtaattacagagttagtaattaccctatattttaaaatacaaggtgataattacttattaattctaaatgttttgtttggcaaaatagttagtaattatacaagaaaataataattttaaactagaaagatttgagtaattacgcactgtaagtgtaattaattaatatctctcaattacctctaatatacatcttgacggtataattatatgtggtcagacaaacacgtaaaattgtgtaattacctttaattacacccaattctaattttctcgtggctttctaaatgcgccctaacaatcccctcacaaaataaaaaaatgaagaagaaagtaaaacatatatatatatatgtgtgtacactcttaatagggattattaatacattatgggatatatgggatcgttgcttaatacattatgtctggtatgtacacacaaataatgatgtataagaaatgaagcattattggaaatggggtggagtctgtatagcaaactctaaactattttaaatcttcgtcgattgatgctcttcaacggtagtgtacatattaaatcgtgttcaaaccaaagttatttctcaaacatattttgagttgtgataaggttaaaaatcgactttatagaaagtacaaactttaaaaatacttgtatatagttagagtataattgtgaaaggtaaaaactgggtccaaataccataaatatacatttcatcaaaaatgatatagggtctaagggttgcatatttttgttaaccatttcacaacactagagttatagaaataagaattgacttgatcagtgggagatcgatccaggaacataacttttgaaaaagatcattcattaataccataaacgagcatttcatcagaaatgatatagggtctaagagttgcatatttttattaaacatttcacaatactagaaataagaattgacttgatcagtgggagatcaatccagaaacataacttttgaaacagatcattcattatttttaaacttccacgtgtcatcaagtattagattaattatgattcacaacaacccttaagtttaatggttattgtgaatccataacgaatcattaataatacacaagtcattgataaaattataataannnatgttatttagtatttgcttacaatttctaaacaacacatatatgttgtaccattcgctctttaaagagtttgttggtccaaccttaagatgacttattagaataataaaatcaatattttctagtgattacattatgtacaataaaagttcaactacgatattaatttaagacacaaattaaatgtgtggaatgcaagaattaatgttgtggtacaatatgccacgaatgaagaaataaatatcctaaagagcaatggagtctatctttagtaaagttccctaatagggtggataacattattaagcataagtttttcaccaataaatactcattagacaacatggaaaaacataaagatataaaataagattcattaccaagaaatttattttgaactaagaatcaataacaaaggagatttacattctcacttgtctatataaaagattctattaaagtaaccttaacttttgttgctcgtttcaattcttcatcaattctaaaactgtaaaatagaggagaaggtacacagacaatcataaatattttcctctgatggtggtgaacatatacaagcttaaagagtctacttttagattaaaacaaatttatcacaattggtattgcatcttgtcatccttttctttatttttgaaaagagttgtggattaatttaatataccaaaaggtcagtgggagtaatatttattttatatatagatagtatattacttgcaagtgatgatagaagtttcctatataaggtgaaataattcatatatcaatttattatttttttgagataaagaatataaaaacataaataattttaactaattagagagtagccacgacatgtttgattaactaaaattatgtattattcatctcatgttacttttatctttaagtatgataaattcaattcaaatcagcatctgtaaaatgatttggaatgagaataaattaagaacattcatttgcttctatttttagaagtctaatatatgtctaagaatctgaataagaatttgtactgcttttatttcaggattcttaagtagtatcataataactaaagttaagaccactttttttttcatacaaagtgacgaggtatcttaaagatactaaatattatattcatacatgttttattga

SEQ ID NO: 24355 - DNA, 1919 bp, Cannabis sativa
aataaagttcctccctattcataaggtcatccaatttaagttctagagccttcacttcatccattcgaacctcaagggcattagcactcaagagtttgtctatctccttctgtgtttctacaacttgcttagataaagacccaaacctttgcttattccaagttgaaacaatttacacagtaatcaagcgactccccaagtttgaaccagacaatataccactgattcgggcccatctaacgtacatcttttccaagcctcaaccacaatagatcgacaatcctcttctttaagccaatgaggttcgaaccagaattgtcgcttaactcacgcaagattctgtacaacaacattctcaagtttcgtaattatagtatgatgattagaacaaagaaagtcaccatggcacactcgaactgaaggaaacaactcagaccaagcttgattgcaaacaaatcgatctagtcgttcttggacatgtgaaatgccttgtctttcattgaccaaggtgaaactcggcccttcatatgtaccccaagtcgtctaacatacaatcatcaagaactttttgaactcactcattgccataacattgtgttccatcccgccccttttttttcatacatagataaaatcgcatcataatccccccacaaatacatggtagattaaagagttattttaaacgtcgaagaagtaaccaagactctttgcgaaggtgagcttttgggtttccataaaatcccgtgaatcgccacaactcactctctggacattgtacaagagcatcaatatgtccaatagagtaacttttaatagtaacatcctaatcatcattccacatcaataaaagtccaccattgctccccacacaatccacttgaaagttattagcaaaattaacatgtcttcgaatactttctgcccagtttccacaaaacttagtctcggacaggaagaccaagcttggggaatgcttgcgcataaaagtttgcaatgcacttactacaccagggttctccaattcccgtgcattccagcataagatactcattgggcctggcaagtctgctccgcagattgtgccatttcatcatcaaccaccataagactaacaactagtgaaacattcactttcactcttcactcttctatcttgccatcagtatcattctttcttttcacaccactaggacacatcgtaccctaatttggttgtacagacatcccatcagcaacagaactactagcaccatgtccatctagggagggagtgcacctcttccaagttttcctcttttgggctttgaccaacgactcaaaagtgctttgaaacaacttacccaccaccctctcagagcagacaacaacttttcctttatcacggctattaatttcagcaatcccaaaagattcgccaatctgttgtacttgttcagggggtaaggggcgatgcaccccttttggtggtgatgtagcaacccctgaattcttcatcaagttattgtcagactacagttaaacatctttcagtggaaataccaataaaatgataggtgggcattcctcttcagtgttaagttgagcaggtgggacagcaggatcaccatgtcccatagtttggattgaaaggatctccccagttatagcctcattacccaaagtaatgcatatctcctactctcttgcttggctttctaagccagatattacagcaacctcttccactaagtttcttcttcgccaggaacttttaacagcctccactattttacccacttctttcatgttcataaaatgtgactcacccccaatctcagtttgtttgcttccaccccactgtctctgaactctaggcggagagcttggagcagacatccacggcccatatcttccactttgaattgcccctattttat

SEQ ID NO: 24356 - DNA, 4423 bp, Cannabis sativa
aataatactatgttaagctagactcatttatcatggttttctaatggataagtgataataacaatacatgcattttgcttaattcttaccgaagtaccgtaagcaagtgtctcttttcggccattgataagtatctcccctgtttgcttggtttgtgaatttagtctccctgcaattaaatacatattaatatatactgctctctatctttggggtcttatgaaatccatcaccttattttgaggtgtgtcatacttctaattggtttttcaacctgatattacacattttttatgttagagaaacaatattttataaaagaaagaataatttaaagcggtactaaagtaaattaattttttggtgagatgtatttttagtgaaggaacatgttttgagatagagagtattcaattgtagggtgaagtgtatacgtgtctcttgtaatgtgattagttagagagctgttatttttgtttgagttagttagggagtcctaaccgactctatttgctctgttttgtgtctgtatatatatcctctcttataccacttttccaattaatgaaaatacattctttcttcttcatcttcttactgttaaaatggtatcagagccactcgactgagtgtgctcttctgttcttccgcttgttactcgttcttcgatcatggccagaggaggtggaactcagacccgcagtaccaccaacaatggtgattcgaatcgtttttctgttcttgatcagagtgttcgaagctctgctgatgaccctcgcagtccgtatttcttgactcatggtgataatctgtctgttaatctcgtccctaagattcttactggagctgagaattacagttcttggcatcgttcgatcgatgatggttactttacttgcaaggaacaaggtgaaatttagtaatgggaagcttcttgcgcgagatgaagaagatgaagactatgaagcctggacaagatgtaacatcatggtaatttcgtggatcttgcactttgtctcgagctccattgtcgaaagcctaatgtacatggaagatgcctcttgtattttgtatttggtttgaactacaggagagatttcaataaaggaatgccccgagaatctatgaggttaaaagattaatgcagctcctgactcaaggttccaatgatgtcacctcatattacactcgtctcaaaagcctttgagatctttcacaagaatatagaccacaacccttgtgttcttgtggtgctatgaagactatccaggcttatcaagatgaagacaaagttcttgaattcctaattggtctgaatgagtcatattccagtgcaagatcccaaatcctcctccaagatccccttcctaatgttaacaaggcctatgcctctgtcattcaagaagaaagacaaagaggtattactaatcatcaatatgaagttactaaatcttctaatgaaaatgcaggccaatttgctgggaatacgtaaggaaatcgaggaggaaacagccagaccaatgggaaacccatatgctcacattgtggaattgttgggcatactgcagctaagtgctacaaattacatggatatcccccatggcatcgtttacatggcaaagtgctcaaagatctccctaataaaccaagcaatcaacagcgtgatcgatcctctcaacaacatgatcgacctactgcaaatttttctgggcacattgacagtcaagatggacctcctggagaacatgatttttcttcacaatgccagaaactcattgccatgttggcaccaaaaagtgcaagaaaccagcacctcgaatcagcctgttgatcaacccattctctccaatatttctggtaataattttgtgttcctaaatctacttggataatagacacgggggccactcatcatgtttgttgtgatcctaccttgtttcacagcgtgcaaaataacattaaaatcagtaatgttggattacctgatggtagaagtgttgttgttccttttgttggaactatacacctatctaatcttgttcttaaaaatgttctttgtgtccctaagttccattgtaatttacttttggtcacatctctttccaacacatctaactgttcctttctttttcttccaaacaaatgtgtgattcaggatatttccaagaatcaagtgattgggatgggtgaacgtgttagaaaattctacctcttgagacacaatgctttacctactgttttgtccatttctaattcgaaaattagtaatgatactatatggcattatagacttggccatgcttcttgtgtaaagactcattctttgaataaagatctgaattttcaatactatggttgttttgattttcattgtgctatttgtcattttactaagcaaaagaagttgccttttgtgtccaatcacaatattgctaagaagtgttttgatttgattcatatagacatttggggtccctatcatgtgtctactattgaaggattcagatatttcatcactattgtggatgattgctctaggtatacatgggtgcatctcatcaaaaacaaatccgatgcacaacatgtcataccaacttttattaagcttgccaatacccaatataatgccaatattaaagggatcatatctaataatgccaaggaacttcagttccctgaattatttagttctcttggtattattcaccaccattcttgtgtccaaacccctcaacaaaactctgttgttgagagaaaacatcaacacctgttgaatgttgctagggcactcctttttcaatctcacatccctttatcctattggggagaatgtgtcaatactgccacttatatcataaatagaacacctactccaaatctcaaacacaagtccctttttgaaatcctaaattctaaagtccctaactacaatcatcttagagcctttggttgtttagcctatgcctccactttaggggttgctagaactaaatttgctcctcgtgttgttgctagaattttctgctctagagatgttgttttccatgagcagattttcccatttgtgactgctggaaccatgtctcatgagtctatcgatttctttcctttttctgcatcccatcacaacaaccatgacataccacagcctgctataccacgtgatattatcccaaacaaacccgatactacaccagaattacatgacagcagagagcaacaaaaaccaacagatgtttctgctaacatacccattagaaacactaaaaggacatcatatttgaatgattaccatgtttttttgtcaactaacagtgtttattctcagggcaattcttccatcacagaacatcctttatctcaggtcattaattacaataggctgtcccccagattttgtgccagtatattagctatttcgagtttatatgaacctgaattttatcatcaagctaaaggaattccggtttgggacaatgctatggcctctgaaatacttgctcttgagataaacgggacttggattattgtcactttacctccccatcatcatgcaatcgggtgtaaatgggtgtacaaaataaaatataatgctgatgggagcgttgaaaggtgtaaagcaaggttagtatccaagggctatagccaacaagaggggatcgactataatgatacttttgcacctgtggctaagttggtttctgttaaattgattttggctcttactgctatccaagggtggtttttacatcaattaggtgtaaacaacacttttctacatggggatttacatgaagaagtgtatatgactatacctcaagggtatagtcctaagggggagcttccatctcgggctgtttgcaagcttcaaaagtcgatatatggccttagacaagcatcaaggcagtggtttgaaaagttttcatcaactcttattaaagaaggattcagacactctgcctcagatcattctttgttcattaggcagaatggatctagcttgattttgttgcttgtgtatgtggatgattttattttagctggcaataacatcaaggatcttgaagcattgaaaatgagactcaatgacagatttaaattgaaagatcttggagaacttagatactttcttggtcttgagattggaaggtctaataaaggcatttttatctcccaaagtcattatgctttgcaattgttggaggatttgaggtatttgggttgcaaatctgtcaatactcctatggagattaacttgaagctgagccaagatagtgatgacaagctagccaatcctactctccacagaaaaatcattgggaaattgcaatatttggttataacaaggcctgacttagcttattcggttaacaagcttagtcagtttcttgcctctcccaaaactactcatctaaatgcagct

SEQ ID NO: 24357 - DNA, 2757 bp, Cannabis sativa
atttataaaaacaattaaatgttatttttctcctccttcgtctcctttgattatctctgtctacattttttttcacgcttctttctttgaacaatatttgttgttagatttatgtcgtagaaactgtcaaaatcaaacaatacaattcactactatcaaactaatgctttttatataaatgaagaaatcatttcttgtagctttttgttttcatggtaaatgtaatatcaactacgaagtacccaaattatgaattgttagctaagttctctatatcagagaatgaatttaaaggcatctggtgtgaaagcccttaaaagaatttttctcaatttgttgtggtaatcactatggttgaagaatatagcttgtttcctcaacatcttttccttactagctgagaatgtgggcttgaatatgtttgattttcattacacaaaattgcaacttaaactctattgcattaacatttcataaccttttatttctggagactaattatgtagctgaattcggcatatgtatgatatagttctcttacacccgagaggcgaagaaccaaagcgttttgagttgccagcttagcagaatacacacacaaagctttatgttatcaactctgtttgtcttttttagaaatgtaattttatctttgttaagagagatttactctcctttgttgatggtttggattctcaagctagaaccggtgttgcaaaatcagactgatctccatgatcaatttgctctcaaggatcttggtccagccaactacttccttgattttcaagtttttagagacaaaactggtatttacctgaatcaagctaagtatgttcatgatcttctggccaaaaccaacatgacagttgcttctccaacacctacacctatgtgtcaacttgaagggacatgttagagtacattgtgtgattagtttaagcttagagttcattagctgagttagttagcttactaaccaccttggttagttagtctagttgtattccctatatttcagctctaacaaaattagtagtagcttcttgttattttcaacagatccaaactctaattaaaaggtctcagctcaattcaagagcctgagcacaattaattcatttcctcattttgtcttctttcaccattttttatttttctttgtgctcaaagcagcaagccaaagcttccattgacactaatagaagcaaaaggaatacatgttcttaatttcttcaaattccagattattttttagacattagtttgagttgaatttatcactcttaattaaagataaaaaacaatacgaggtgaataatatataattttatttaattaaaaatattgtggttactctttaactaattaaaattatatgtattatctatactatttatattatttatctcaaaaataatttcaaaatgaattatttcatcttatatagtaaacttttatcattattcaggtaacatatcgtccacatgtaagagaaaactgaaagctaaaaaacagtggtgtaggactctaatgaagattgtacatatctgactgcttaaacatggagggttgagatctgcaggagatctaataaacctaacagtgtcgatttcttatttgttgattttaaagtttaattcttatccaatatgaaagaacacatatcagaagatacaaattttacaaacttcatatgaccctggaaactcattccaggcaactattgcttgggttcccttgaaccagggtaataacatccactatgaatttaatcaatttacaatatccagtcttgattacaatttcttaaaagtaatcttagaacaattcatacaaggattaccctataactttgaccacgatcaaatctaacagtccaagtctccttagactactgaagcgaagctccccttgcttccttgcagctgaaatcccttcagtaccttgatctgaactctcttcagataaaataagaccgttgattctccttcagctcctgaagatccaaaagatctgcaaacaaaaccaagaaacaaagaaattgatatgccctaggagcaaaattaattcaaacaaaaacactatcgaagaagcagagttagttagaaaattggtaatccttgattatattactaactactctactaataacgaacttaacagctcagcaaccaacaagcgacagttgtccaaagtttttatgccaactaaagctgacctgttaagtggaaacaataacaacctatattaagctaaacgagccagatgagactagccaacatatagatgaccagaaacacataatttgccacacaaaacaacttggatcttacaatatcaactggcatagttattttgttttcttgcttaggtcgacacttttggagttattatattatattatatgtatcttttgattcttttgtaagtaaataacaagatcatgactttgtacatattaaaagaagttatttttaagaaattttttaattattacaaagtatttcaaatatacttttaaaataaaatttctttgatcagcgaatgttagtatagtaattagaaatcaagtaacatatctaaaatactaaagtgttagatgaaaataagtttgaatttttttttaacatacatgataatatgaaaatgttcaaaaatttattgttgaagaattttttcaaaaattttaataaaaatgatactgcaactataacaaacattgctatgacatttttttagaaaaacgtaattcca

SEQ ID NO: 24358 - DNA, 2186 bp, Cannabis sativa
aacttaacaaaacttttttatcccaacattttgaataattcacgagaaagtaatatccggcaaaaaaattcaagggcataattcacacaaaagtaaaacatgtaaaattgtactttttttttacagttttatagactatattgtacttttttacattatttttcttaattatatttttacgaaatctcaaaaaaaaaaacaaaacatgaaatggttttattgtgccagtgttaacttctttttttttttcataatgataataagacttgtaaatactttgatgggcctggtaaaaaaaatgaaatattaatataaaaattgaaatattttttaaatttttttaaaaaataaaaaaagtatttagtaactttttttttaatttaagtgaggagagaatgtggtgagaaagaaatgaaataaatgttgataaaaaaaaaaaagtgtactgtgattaaaaaagttatttaaacactttcaaaaaaaaaaaaagtaatttaaataaattttgaaagcaaactattttataaaaaatttattctttatttgtaaaatgaaaaccttttatttttattttttatgacaaaaaaaaatattaccaacacatataaaattaatattccatcatctgtgtataaaataagacttcttgggtattttctaatcatttttgttaatgtgggaaattaccttttttcttagcctaattaaagttagtgatgtgtcatcagtcaaagtgtaccaaattacgtttaggttgacaaatgagtcaaacacgatataaattcacacaaaatgaataaatttaaatttttatttaaatgagtttggattatattctgatatcaacctgtttattaaacgagttattttctaattaacacgcttaacttaaaaataatacaataataatctaattaaatacaaatttagttttcatcaccattaagatcatgtttgactgacacgacatgaatataagttgtcaatataaattttcatctctagttacactacactttaataaaaacatgaattgaattttataactttaaaatttgtctaataatatatatttcttcataaatcatcaaataatttagtttggtaactaaccttcttaattttggccttgattgattgattgattagtggttgcaaatacattttatttaactaaatttgtatgtgattgtgttaaaaagctatttttctttgcacttgattctaaatccatgagacaaaattatgattagattcagtggcagaggcaacaaaaaatgttatagaggcataaaaaatctacaaagattgcctattaataaaaaaattattatttttataagaaaaaaatataaattttttggagatataaataaatatgtgagaataaaaatgccatatatgaatatatatatatataaataaaaattaatttataaaaaattaagtggagtcatgtagtcctgactagactcgattgatacagtaattgatattaagtattaatgatgtttaactttattaggagataaaattttataaataaggataaatactattttagaccctgtattttgtaaaaattatcaattggaccttttgttttgttaaatgacaaaatcgatcatgtattttctaaaatagtacaaatataactctgaactgatttttatcaaaataaaatttaataataattcgatctaagggtgttatgacaaaactatttacatatctattcgtgttaggaattgttttcaagatggttatattaaaaaagaagttgtgaaaaattaagctcatggtcctatttttaccattttaaaaaatagagggtccattttatcatttaacaagacagaaggttcaatcggtaacttttacaaaacacatagtctaaaatagtatttactctataaatattaagtaattttttataaaaattattaaaaattaaaatatataaaatttaattcaattttacattaatacagtatgactcgtcgtaatgattagtgtccttagttatttcttatggaatatccaaattatactttattatcattattagaagagagagtgacatatcaattgtgaggagaggacttctcattgtcttttcatttggatttttcctcttaattctttatgttccatcctttttgtattttttgttgtttttttttttt

SEQ ID NO: 24359 - DNA, 4494 bp, Cannabis sativa
taagctacaacttacccagagtggttcctgccgttgcgatccgaactccgaaaattgacgatcaacctcataagttaaatttcaccgttaggtcatcatctaacgtaaataatagtcaacttatattttttattattttattcatatttttaaggacctcctttacctataaaatgatagctcctctagctcatttttaatattcagaaacgtagtcgtaagattagagcattattctctagaaattagaacatccagacttagccatttctctataatctatctcgtgagaataaaaattctaagtagacgcagtttcgttactgtcacgatgcagggagtgaactactataaactgttgtgtctctctatttatagctaatatatattttattctcgtcaatctagcaagcgggtgtggcttagaagtttgtgttcaaatttttgagtcaacagtcaaataaatatgtagtttccttatttagaatattttatcttgactttttatgtttaaagaaagtattaatatttatattattttaattgatctaatttctttctcaagaacccttgtacaacttgtatgtttaatgtgtatcttatttccttatttatataagaaaactttgctagaaatctctcaggcacagtaaatatatttgaaccatccacagtttatttgaacaaattttgatttttctttttggaaatatttttaatttattctgtgattatttccttacttgtaaagcacgacctgtggtgtattaattgagaatatattgctactcaagttgtacttttatacggtaagaataaaatgtttcattataaaataaatattatatctatctatggtatttatttataattaatttgttttattaagtttctattatgatctacattattttctcccgctagcattaattcatagtatccaaagaagaattattgggatgtacttggctttaatgaagtctagattcacaatgctgactagacagatcaagattttgtctacaccactttccatatctgttgagacagaattttgtcattcattgggtttttataaaaaaaactaattaatgacttctctttgtattcatacattttgagctcaattttgggtaccatttatcattataaatttgatctaaaccaacaacaaaaggttgaactcttctgttttttaatttcttataattttaagaagagtgttttttaaaggatagttgttttgttatttttagaaaatttgtgtctttgtaattaaaattgtgtctttgtgattgaattttatgttcttcactttagtatatttctgatttatcaggttcggattctattagaatagattttaattctattcaaataattttataataattacacattaattaattaaattatttattaattttatttattttgtaatcataaaaatagaatttcatatgtgtgtgagagagatttgacatatcagttaaaaaaaaaatcgaccaaccaagagaaaccaacccaaaaaaatcattgtttcatatatatctatatgaaaaaacaaagtagaataatttcgcatgacattttgattatgttatcttcttaagtagaaaaacatgcattgcattacatgtattccctttgcacaagatctaaatgaatgtgatatcacaatcacaactaaatatataataataaaaagtaaaagaaatgctttgttagtaatcatcagaatccttgaatccctttggtaaattataaaggtagactctcataagtcaaattatgataagttgcacaaaaagcatgtaaattaattaattaatataatccgtttactaattaaaacaaatggtaataatgaaatttattaatagtgtctaaatttgttgatggtgacacactctcttaagtccaatcaacataggcttcatttgtagtggaaagtatagtgtggttgtgattagatgcccacttgatcatcatcatgctcattttaaatcaaaatctgactcatcaccacctacccttttttttcaattttttctttttttttttccacaacccaaaagacaaaattagtcaaataactaaattacatttttttttaaaattttattttatttataatattttttaatcaatatggatcacaataaactagttgagcaaattaacatgaccacaataaaacatcacatgtaaaagtcaaatctaactccaacaaaaacaaataatgagctgttttaatatttatgtattttcgttttacttatattttattaaaataaatgtcctaaactttttcttccactattgtttttttaactgatattttggaacggtatacattttcaataaaagctttgttcattgtttagaaaaaatgaagaaaaaaaaaattggacttttacggtttgcataattgtagacttctactattttatcgaccatttaaaatataataaataaaaaattaatttcaatatataaaaggaaaaatatataagtccgttttaaatgaaaattgattctttttaattaattaatttattttcaaaataataattggaaaggtgattgaattttaaattataaaagatgagaaaataaatttagaatatttatttttatttattaattaattaatataaaataagaaatgtaaacaaaaatagaaaatagatatgattgtttagaatgtttttagactcgctatcaccgtcaaattaaaaaaaataaaaaattagtttatattaataattattaattgattaaaatagattaaaaaatgatagaaaagataaataaaaaaatatagatttagtgagagaaatttcatttattattttttaacaaaaattcttattacaaaaaatacccctaattattttatactattttatcctaataattttcactttacccaaaaaaaaaacatccttcctatatttcaaaacctaaaaaaatctctctctatatttcccttctcatcagataccaccttccctcctctccctatttctccgcccaaaggagtcgttgtcgtcctccattgaagcccagacccctacctcctgtctgttgtcccttcgtttcctgaccgtcgaagacctgatccgcaccaccttctaattgaaagtcggagctcttgagttaatgagtaagtattttttaaactattttattaaaaaattgtaaaagtatagatctatgtagttgttgtttgtattaatttagttttgatatattttttgttgaaatcgtgatatctaatttttaggagtattctatgtgttcgtatttttgttgacgcttttttaatacgttctcgacgggttctcgatgcaaatgtcccaaggtcagagaagacctctcctgacagttttttgatgggttctccattatttatcaaaatggtgaatgattttgcattagcaaccattcttgacatgttatctacgtgttctcgattatttgtcgatagttttttgatggtgtatatatttgtcttttcaaacttccttgcccatgttatcgacgatttctcgactgtttatcgattgtttctcgacgattgactgtttattatttcaacagttatcaattacttttcgacaggttttcgattggttctcgactgtttgtcgacactattttccattataatttttttgttatttttgtttttctaatttagtagtttctggtttgcattgaattgtaagatcgcccgtctttttgttgtattgtatgatagtgtttggagtgttgagggattttattgggtgtataaaagggaaggaagtatgatgttaatggttgaaactgacacaaccttacaaaaaatgcgtaacattttatatgaagagttagaggttgacccattagagtatgatttgaaattagtgataaaatagtaacacagtctcaaaattgaggcaactatggcggttcgggccacaacaaagccacatgaaaagcccatgtttgaggcatagctcaattttacttggggtccaaaaatatttaggttatatttaacgctaataaaatttactatggtaaaatttttaatatattctcgatgtttttttcagcacttttaataatttagctgaaatgcgttttttgatggcttctctatggaaaattgatgtattctcgatgattttttgataatatttcatgtgaaggctctagatgctatctttgcaattttaaaatttaacgatggtgtattaatatgttcttgatgctttgtcgatgatttgtgcggtcctttacaaaatttaataaatgcattttatgatgttttttcgatggaaatttgatgtgttctcgatggtgtttcgataatatttcatatggaggcttcagatgctattattacattttttaaaatttaactatgataataagaaaaagttacactaattgtctctaagtgtataaaataatacgaaatattttctaatacaaggatgt

SEQ ID NO: 24360 - DNA, 3358 bp, Cannabis sativa
ttttataaaaatacagtatttgtgaaaaaaattccgtgtgacagtatttttgtaaaagctaactaaaattccagtatttttgtaagtttctcaaaaaaatatgcaacccgtatctgttgggtcgaaattgggctgattctttttgaggcccattcagcccaacccgagccggcccactatatatatacactctctcataaaaccctaatcctaacgatactctgctgaactcaggcaaaggcgcttccttttctctaaggtatattctatgctctcttcaactctaatctttctttttttcatggctgcaaagaatccaatccaatcttagtctcatcctcgttttttttattggaaaatctcaggtaacaaggtcggccggagtgcattcactcactcaggtagtattctttactgacattgttgattatacagaaatttagagatctacaatcgcttcgttcatattatatcttcgaatagattaagtgagaagcgagacaattttttaaaaaataagtcagaatttctttgcaaaatataatcaatttatatgtatatacataatttatacatatatatatatatgttagaactattacatgttctttagtgtttatgatttctttgctttttttttttaggaaaaaacagattttgttcaatttttggtgtttatgtgatttttatgagtttattttgttatgttcttatcttccattttagtagttatagtaaatatataataattttataaagatttataagaaagttatacaagttttttttttttttttctgatttgaattgtttgtaatcaataggtattgtattatgaatggatcactgttgtctgtaatgattaatttttaaatggtttgatgttggaaactttgaaatgactttctatatttttttagtttagattgaacttgaggtcatattcttactttgagatcattgaatgggttagaattttttaggccgatctaatcgggtttacttgtatggatagactcagttctattaattatttacaaattcgatattatcattactgtgtatgtaggttatcaaaaatgtattcaacaaagaagaagatcctcaaggatggcaatgccgagcctactgagtttgaagaaacagttgcacaggtataataatatatatttatataatatatgtgtgtgtgtattttttgtattgttttatagtgtttatcatactgaatttattggtgttgatatgatgcagaaccttttcgatttggagaacactaaccaggaactgaaaagcgatttgaaagatctttacatcaactcagctatgtatgtttagaatgaattttttttggggttctttgtttcatatttttgttggaaattttactaatatgaagggagtttatttttatttttaacagccaagtagatatctctggaaaccgcaaggctgttgttatctatgttccctacagattgaggaaaggtttccgcaaaattcatttgcgtcttgttcgggagttggagaaaaagttcagtggaaaggtaacttattgtaaattattcaagttttttattatgatgatttcgatagtcatggaaagtttccatttttatgcttagacaaaaaataacaaaaatacttcaacatggaatttttgtgcttagaattttgtatttgtagtaatgattttgtaaaattgtaaatgaaacataaaaaaatggttttttgaaaatttccggtgttcttttgttatcacataacaggatgttgtcattgtcgcaacccgaaggattgtgaggccaccaaagaaaggctctgctgcccagcgtcctcgtacccgtacacttacagctgtccacgatgccattctagaggatgttgttcatcccgctgagattgttgggaagcggattagataccgagtcgatggctccaagataatcaaggtaaaaatattttttgaaagtaaataaatttgtcattattaattttctcgcataattataataatgtgtgttgatgacaggtttacctggatccaaaggagcgcaacaacaccgagtacaagctcgagacattatcgggtgtttacaggaagcttacgggtaaggatgtcgtctttgaatatccaatcacagaggcttaaggctctttcattactagaaagatgggttctgttctgttttgatttattgctgttactttattttagaagttctcagataggtgtacttttgaaattttgactagtgagatttttttcatattttaagcaaacttggatgatattttgttccaactcttccttcttatcttaatgaaaaaaaattggattagaaacattggtgttaaatattattagtaatatttttaactaaggctaaatataatggctcatttttgttagagttggtaattctggtcatgacataatttacaataattatctgggttggattggataagaacataaattaatccgtttaagatattctatttacactttgatattaaaaattttatcaattttaactttatatattgtttattaagtatattattcaaatgagttcaaacaaagtgatattagacaatagacatagtaaggtgaaaaaagaaccaaatttaaaagaaagaatctttgatagaataataatgatttgattaattagaagggtggaggagcatagtaagagaagaaaggtcttccattcgattagatttttatcgatatatgtaatttattatgggatttggattaatggtattattgttgggtttgggagagtgaaaaggtttttaggttatgttaataatgcttggacgctattaacaattttgggattttgagttttggttacgttttctttttaggtttttatttatttatttacgtaatgataagaatcactcatagattctgtattagcgtagaatttttcttgaactagaataggtcatcgtttaattcaaggacatgttttatctaattatgaattgctatagtaagtgagcaagatgggacaaaattatctccagaaatttaaacaataaagttatatatattcttaaacaacatactaaaagagttagagtttcattttgtaatatttagaaaatatttacaaaacgaaaaagataaagacaagtgaattaattttttaccaatgattagggatgcacatttttttcatggggatggggcgtcgcggggacttgccgcacctaatggggccgggattccctgtttaaatggggaacggggacggggatcaaattttatccccaaatgttaaacggtgcggggacggggatgacatctccgcctcgacggggacccgtttaatttatt

SEQ ID NO: 24361 - DNA, 3272 bp, Cannabis sativa
ccgtaggagattcaccaaaaactctttgagattttctcttggaatgcagttagctctgcagttgaacataccaccgtaccacaaatacaaagaaaaatgacaatctctgaatagatggagaccatcttcgacatctacctggcaaaagaagcaatctttttctttaacaaaaggaaactttattttgacaggaagtgaatcattgaagcatcgccaaagaaacaacgccacacggggatgaatcttgggaggccaaatatgttttctgattatgttgaaatctttgaaacgattttgttgatccttctcgtacgcttttctcatagaaaaaacgcccttctgtgagggtttcgacaccatcttctcgagactgtggtagtcgaggtatattaagaatgagactccccatctcatctccaaacatctcaaagactttatggctacaccaggagttaccctgagatagatcactaatggattggacctctgggaagcttggcctaagttgattcacaagcctttgaaactctccataatcaagccagggaatccaaggttgattccaaagatcaatagtcgactcatcagccgcaatcgtatgagctccttatttaatgatgtttctttcttcaataattttcttccattggagcgaaccactctatcttcgtttaaccccctagaaactttccttgttacagtattttttgagtaaacattgaacccacggtttatgctccgtacaatccaaactcgaagccaattttgcaagcaaggcatgatttgcatctttgaatcttctgaaacccaagcctcctacacacttcggttggaaaatgttgtcccaagattttaaagcaagaaatgtatcctttaccaggttccccaagatccagaattttctcataagaccatctaaacttctacaagtgctgactgggatcatgttggttgacattgcataaattggtaatgcagaagcgacttcttttagtaggacagttttcccactataacgtaaaagtttcattttccatccctccaagtgcctcatcatcttagcttttaatgattcgtactcctcccttcttcacctattaaacacaaaaacaaattcccacgtgcttttcttcaccatttgtttccttgaccttcaattccttcagaaatgtttgctttcggttacagttcaaattgttggagaatagaacacttgttttggatatattgcaactttgtccagaccatttctcataaagaggattgtatcgtgtgagaaatcggtggggcatcccgagatattttaattccatggataaggtccttagcctcagctgtaataggagtttagataacacttcttggcaaagtaagaatagaaacagggataagggatcaccttaccgtaaccctctttgaggtaaaaatttctttagaaggctcccactaaggagagtcgagtaggagacactgcagacacaggacattaataagttacagctcttctcgtcaaatccatttgcatctgggatttgtctaaggaattcccattccattctgtcatatgctttataaatatctagcttaaccgcccttaagcattctttccccttcttctttctaatcttatgaataatctcttgagtcaatagcaaagattctgttatccaccttcccagaataaaggccgactgaaccagattaattaaggtctccaagcaaggacgtaatctatttgataagatcttagcaataatcttatagatgaaattgcacaagcttattggtctaaatagatgcatccttgttggattcttcactttcggtataagacaaataaagctataattaaacttaggattcagagtacctgattgaaagaattccacaatggcttagctaactccttccccaacaatttcccaatttcttcaacccatcaaatttgggggctttaagagggtggagactaaacacaacgcttttaatttcgcccaaagacggtgtttcctcaagcatactgttagtgctggtatccatcttcttgtcgaacaaactaccaagatcatccgttatagaagggttttctgaatgaaaaagatcctgaaaatactcgttgacaatccctattaagtgcttatcaccctcccatctctttccgttcttgtctagaagtgatgagattatattccttcttcttcgaacaattgaaataaaaagttttggactctaatgtagtagtatgaataaaattctgaagtcctctttcttgacaagtaggacttgttcagttctaaaattatagcacataccgagttgtgtgctcatattgaatatggaggtctatctcgggaggctaggccctttaacagtgagcaatctctacactagcctaacaatgctacaaaaacagaagcgtaaatggagaacatgaatgttaaccaaaaatgtcccaagtatagataattccacatacacaacaagatttcacgcctttttttgggtattatgtgagggcgtaagcactacggagaacattgttatcgacatatggtcttttataatcagacaatttgattttcttctttcttcccctgtctttcgcctttctctcctcaaaccctaatccaaacctaagctttcttgtttttccacttatctatatgtaatttcctactagattaggtacattatcgtgtttcctaagtactatgcacttcatttctaatcaaggagtttgttgaaaaatgtgaataattaaaatattcataattaaagttaaacttaaatacataagtacaatacatattttgggatctcatttttataagttacataggtttacaaaataacgatactacaaaagttatcatctggcaactatcaaaataaagcccaactatcttaaagatctaaacactccaggtataactgcctcgatataacaatcttaatcgagcgtgagctcactaccgctcagccttaactttgcctttacctacacttgtaaataatatatgtgagtcgacatactcagtaagaaaagcataaacataaaaataaatataaaaccagattgtggcaggcgcccatacacctaatcacctaatcacaatcctatccccctatcccacatccaatgcgtactaggtctggaacgttcgtaagatagtacgattgactataatatcagcctatacttggtactctagtcataccaatgttatagcatcaatccatactttgcgaaatatatatttgtcgatattcag

SEQ ID NO: 24362 - DNA, 4336 bp, Cannabis sativa
tatcaaataccataaaaaaacctaaaaataaaaaaatactatataaattggtcaaacttaaatgtgtcatatttatcataagaactttaaaaaaattccatcgtaagtataatttcctcatgaaactatgagcctgtttgattatgtaaaaaagaattattttctataaaaattatagttttaaaaagcttgtgccaaacaccgttaagttttattttttatcattttaaaaatttaatggtgtttgacacaagttttttaaaactatttttattttttttttactataaaaaattaatattttaacaccataccatgacatgaacccgttcgggttcgaattcagattcggattcggggccggccctgaaatttagtgagtcatagggaaaaaaatatttttggatcctcatttagaaaaaatgtggtattttttaaaattgataaaaaaaaatgtgtaattttaaaaggagataattttttttgagcccctgtgcttaggggcacaggcctagcccgcctatgctcagggccgaccctgggattcgggttcgagtttagttccgggtctaagatccgagtatgtgagcaaaaatgtaaaatataatatgtttgtataatatgtttgttaatatgtttgttaaaaaatgttaaaaaaaaaataaaaaaattatttttaaataatttttccaaacaacccctattaattttcaaagctgcaaacaacttttaaattatgaagtgaaacaacccttaaaagtttgaaaagtaaaaaataaaagaaagaaaatctcgaataaatcaaaaaataagaaatgtattgattatgaattttaaatatgaaaagaataaacttactaaaaataacttacaatcagttattaatatttttaatacaacaaattaaataaaaaattttctaaacattatttttgaaaaaaattataaaatgtatacattaataatatataaaaatattttcctttgccctctctcaattcaagtttggaagctttcagatttttagaatttcgtcaaacctagtctctcttggaagatcatcgacattcttaattatctcatgtcagtattttccccacatcagttttgtgtcttcattactctagcttggggcatttagactgaacgtaacaaggaaaaacatggtaccccaattaagaatgctcccgcaattttgagttgggcacttcaatattatgatagttggttttaggctcagaaatcacataagtatacagctaagttttctctccgcccacgtgtttttctttgggttgcacctccagcttgttcgttaaagttaaatgtggatgctgctactgatggtgaaaacagtactattgggttaggagccttggttcgtgattctgatggctttccgttgggatgttttgctaaatctctgactggttttttctctcctaaagaagctgaagcattggctatttcttatgctttaaaatggtttttggaattaggctttttcgtttcttttgtagagagtgatgctgaaatcattgtcaattcagtcaactcttctttagaatgtgtttcccaatgggattgtattgttagatctattaggtccttgttatttgtcttttcgggtgcatgtcttcttcatgtaatgcgaaatggtaatactgcagcatataggttagcaagatatgcactacagatggaaaacgaggtttcttggttggaagaagaaatttccttgttgtataatgaccaatgtattgtttgactctcaggaataaaattagttattatgataaaaaaaaatatataatattaatataataatgttaaaaataaatgtaaaatttagtttttatgaaaagaataagagataatcttaaaaatacccaaaaactaaacaacgtttacgttttacagaattctgagtcttttttatatatttatttttgtaccaacttttttttttctttttcaccgatgatagttttttaatattttaaaacaaatatttatatgttatttgtagaaatatagtataatgttacgacaacataaaaataacattaaaaaaacacaaattcataaaaatgtaaataaataaaacgtttgaaaaaattataagaaaattttgttttgaagtgtattgtataaatttcttaaagaataatatatttattataagtttgaaataacatcttgcacaatcaaagggaaaatgaaaaatccgaccaaaaattaataattaatttcacgaaaaaaaattaaaatagaatcttattaaaagaattactactaatatatcttttagtttctaataatctaaccaaacagtgatataattacatatttcaatctaagagatagggtcttgagctaaggtgagttaggctcgatttagtgcccacttaaactcagagtccaaaatttttatatagtatatttttttgaattaaaaataatgataattttgtaaacttgtgtgaaaagatgcccaataatactcatactttacattgtatatccactgtattttacatgttttaatttttacttttatttttatattctttaagatatatccacttttataaatgatgtctgcattatacccttaaattaatgtaaattatgtgcttgctaaacttaagtgtagagtaaaaatatattcgacaacccactcaaaaattatattttaataaaatataatataaagatattttgattaatagatacaaaacaagaaatattctacaacttatctcatttaaaattgaaggcagacattcagctaaacatgcacttaaggagactatgaactttttacatggaagctacactgatttttgttaccggttgtctttaaactctattacttatccctacaaaaagaataaaataataccacttctttttttagaatgatttttgtttggtgagaaggaaatttcaccatcactaatcgcttgaatttcagtagtgattggagtgagagacaggttttttaatttggattgagacgccaccaccttccctcatgatcacgaataacaactctgaagctgcagcagccattcacctctgaaatacaaggcatcgacattcacctcgaagcattgggggcagggaaaactgtcatcaacattccccagccattccaccacatcagcagctattcggggggccgcctttaccctgaacaaagccattccaaatgtactaaatttgtcaggatattcttttgaaaggaatgggccaacttggttaggcgtggtgtgcacaataacatagtatggtcgacttttatgaagagtcaaaccccatggggttgtgaggagctggctatagcagaggaagctttccttatcacaaccatgtaacttttatgaattttcattttgatgtttaagtgctctagaaatggagaaattgattttgtgatcgtcaaaataagaaaattcatgagaatattaggtgcatacgattgtgtcatgggctatggatttccttgacaaaattccacttggcttactcactctagcatgggtgacaaggcggcatccactctctccaagtgtgtaatttatttccatggtttttttttctgtcttcaataagtaaagctatctaattcaaatcaaaatttggcaatgaattgaattttcctaaaaaaattaccaatgaactcgttcgttcatataaatatggagtgggtgttgagttattagccaaaacttggtgatttttcatatggaccattttaataccaaattcttcattttcatgaagcaaaaagaaacccttaaattcaagcgcatacctgtaattattgaggagtttttaacaaaggttgcagattgttaaatgtacatgttaataacttaaaagcaaaacacattccaataaactaaaagaactatcttcatcaatcactaaaactaaaagaaaaacccataaacgaaatactaagcccgagcccgaacctgacccgcaaccggaacctgagtctcagcttcagtcattaacactttaccaatttcaaacgaaaggtaagcatcaacgcatgcgtactgaacttgagaagaattcagataaggattatcccacctactcatggtgatcctcttcggcttctcgatctgcattcccagcacaaaactagctaaccttttcagccccgcattcttcagacttcgatccccgtacttattcgccgctagatttcctaattcaaccggctttcgcacagataattggtagtccacaagtagcttctctacatcggctccaaccccgactccgacgaagctgtaatcggcgtttccgaggaactcgg

SEQ ID NO: 24363 - DNA, 2461 bp, Cannabis sativa
tatatatatgagttatatatctatgggtgtacatgcagggccgaccctaagcataggcgggctaggctcgcgcctagggcccactcattttagaagcccatataaaaattataccttttaaaaaatatatactttttaaataatttttaaaaatactatttatttttataaaattccgtatatggcataaacaatacaccctgaattcaaataaatctccataaaatgacaaatcataattaataatttagtttcataattaaaccgtaattatctgctaattctaaataaaaactaagcagtctttacacatgatatattaggattgtcctatgtgtttatcgtttttaaaaccaaagcatgtaaactagctaagattaatttaaaattaacttagtaatttaaaatgattttaaaatgattttaaattataaattaaaaggttaatttagatttgatgattacgacagaaaatttattcataatttgaggcttttattataaataaattaatcataattattaaagtagttaatatgtattaattctgagaattaataaaacaaatacattacccttaaaatagtgagtaggagaaggagtacatgttaatgtaaccaacgatctccattattggtcaacactgagtgcgtatagactggttttgagacgggtttgttttcatccccctaaggaaggtatggatctatactattgctcaatgttgatctcttgactaagataagaagaaataatgtattttcatgtgacatcaactcttaaggtgacacactaagttaagtcataaaatttaaaataatgggttacactcacaaagtgcaactaaacttcatagtgttagttgttaacttggtcaaaaagtagtaatttatattttgaaaaggaaatatgagatatttaggttttaaaataataaagataagaatagtctcataggcttaatgaaattgattcgatatcgatcctaagacgatgatcaattgtcaaagagctttatcatggaataacttaaaaagattttatgtattttacttgtatacgctcatgcatcacatttacagtaattttaaaataatatttattattcatgaacaatcattatgttactttattcatttcagtcatgtctacaatgccaaatccctttactactttactagaacttgaaaaaactgaatggtgctaatttttataaatataatttgaatttgaatttaattctagtttgtgagaattataaatttgtcctgactaaggagtgtcctaaggagcccactaccaatgcccaaaaaatattcaagacatatatgatgtttggattcaatctaacaacaaagccaaatgtttcatgtttgtaatcatggacgatgttatgtgtaagacgcatgagaacatggataatgcatctcaaataatgaattctctacatgccatatttgggcaacaatctaatcaaacaagacataatgctactcgtagctacatgaattgtaaaatgaagaagggtgtccctgtacgatctcatgtattgcacatgattgagctaatacatgaggcaaagacacacagggctatcattgatgagaggactcaggtgactatgatctttgagtctctatctccttgcttcaaggctttcaccataaactacgtgatgaagaagctagagtttaacacgattcaattattgaccgtgtttgagaacttaacaaggataagtccaaggaaggtgaatcaaacatcgctgaagcaaaatccaactatctttcttcttttgataagaaaaggaagtggaacagtaaggccaacaatgatggaaggcccaaagggaagaagtcacccaatgccaagaagaacaaagccagacccaagtctaaggacaaaaaggcaaaatgcaagtgtttctattgtggcgtaatggatctgaaaagagaatttctttggatcaatctcactacattgagaaggtcttaaagaaatataattacttgtactgtaaacctgcttgtacaccatatgatcccaatgtaaaattatttaagaacactggtgatggtgtaagacaatctaaatatgcaagcatcattggcagtcttcagtatgccactgattgtactagactcgacattgcctatgtcgtgggattattatgtaggtttactagtagacttagtgcagagcattggaatgctattgagagggtctaagatacctcaaaagaacattgaccattggattacattatcagaagtttccaactgtacttgaagggtacagtgatgttgattggaacactttatcaggtgactctaaggcaaccagtggctatatttttagcatagctggtggagctgtttcatggaattctaagaaacaaactattttggctcaatccacaatagagtctaaaatggttgcactagctactgctagtgaagaa

SEQ ID NO: 24364 - DNA, 2249 bp, Cannabis sativa
cattttacgtaaattaaatggaaacaaaagggtaattagggaatcatagctgaggagctgagcgaatgcgaatatagataactgaaagagtctctctattcattcaaagcttatattattacaaattagagagaagcacgagcaaactgaatttcgggtgagaaaaaaaaatcatattaattttgaaataactgcttttttttagttagggaaagggtagggtgacagtgactgtcaaattaggtagatgctaaagaaccaatgatattttgtgagggacacgtgttcatcatttgctcgatgggttatttttggaatttaacggtacggtgagttaattaattagtgaaatgtgagagtgagtgttgtccacggtgttttctgtgcgcgtgggatatacagtgaaagaagcacgttattaagccaagaaagattgctggtccactctacactggtaagataaggagatgatgacttatctaactctattcaaaacattaccaataatttaatggtagatgtatcttaattttataaattaaataagcattccttacatctattaatgccaaatatattccttcaatttaaatccaaataaaatatttaaaaccattaataattgctcacttaagaatctccctctctagccccttcatctttaattaaatacactgttttggaaacttaaaaaggaaaaaatgcatctttttgaagtagtgtagtagtgtttgataatcacagagtagcaatcgaattataggctttttttttagtatagaaaatatgcgttatatgcgctatgtatatagcttgggattcttttaataagtttgtcaatattatgtgtcacttaaacgcatagtgcgtatgttagccgaaaccacagatggtcagaagcttttgatagagtttgacttgtttgggttttttctaaattctatgtgcttttatatgattttatttttgacagaactgttttgtcaactttcttctcattccgctgattttctacctcaacatgtctaaggtaaaagccttgtttttttttttttttataaaccaaaagtaaaagccgtttactttttttgtcaacataatcctgaaaaacagtttaaagccctttatacttcttttaagcaaaaatgtaattcttttaaagaaattgacttttcaaagcaaaagtaagattttacttttatgtttagtttaatttattcaaaaagaaaattaaaaaactttgctgttataattgtaaataaatatatatatgagagcattgtttgtagcctatatatatatggctcctaaataataattttaaaaaaataaaaaatagaacttttttaagtctaaataattatagtttgaagcaaaatatgcaattaatttgtttataagttataagttataactaattgaaagcaactttcttccctttaattgtttaaagagaattattttttttccttctatagaatttgtttaaatagatagcttactagcttagtaagagtatttataatctttatgtaatcaaacataattgagagactttgaatattttaattgataaaactcgtagatatgacttaataaattaaataattttgtttgtctttttataaaattagaatgaataaaagaaggaatggtagagtgaattggagaggtttgactttttgtaagttggtaaaaggaatattatctgggatgactgagaggctgagacttgttctgtgaaagttgaaactcaaaaacatatttcaaaaaataatatattattttttgcaataaaaaatggcttagggtttacgaaatgagaaggagaaagaaaagacagagaataaaacaaagagctaacagccgaggctgaagaagacaaagtgagtgagagaaaactgagatctcattctcatgtgagtcccacgtacgacttatcttctctctttcatatttctatattaacattttttattattattattatcatataatttacacattatcctaaagcctatatattcacagccacatcaaaaagcttattactaataaataaattataataataaaaaacagatgccattgaagttttatctttttatattgtactgaaacattataactgaaatacatatatatatatatgttagtgcatcttcaaggagctcatcaaatttagtgtcacactatcattaaatttgatgttaaaaacaatcttcattccaaccacaacactaaaaatt

SEQ ID NO: 24365 - DNA, 3000 bp, Cannabis sativa
ttgattgtgtatacttgcgtagtgtttataattttcataacagttgttgcttgacgctggtcaaggagctagcttccaaattatagtccttggctgttataaactattttctaaacattacctataagtctctccaattgtaaatcgatcctagagacaacctcttccactagtcctctgcagacttacttaatgtcaatgaaaaacataaatattttgcatctcactagccttggcaacttgcatgatgcggttgtatttggaaaaatggtccctagggtccatccatccttcgtacagttccatctggggcatcctaaaatgctccgacaatggtgcatcagtaattctcttcacacaaggctctgtatcctcttcctctgagtcagatagacaccactttgttttctagaaatctttctgtgatcttcatcaactcctcaactttacgttccaggcattgagtcttataatttgaggattctcttctgcgaacacgatcattgatgtggtttatcaaatcatttccacggggtcttactttttcaactttggctctttccttcttggcatttaatcttctttggagatcattagtggaaagacttctgccattatcatttgatactagatgcacttcttcaacaccttcgtaatgattactggaatcactaggagggggtgttttttttcaagaccctatattttgtactctggcctctatcttatttttctgcgtgactctgcctctagaattggtttggtaaccgtgcccggaggcgtggttccctttcctcttctgttgatattggtcagcagctttagacttcttaggctgttttgcaaaaagagtcttcttaggtttttccaaagcaattcctttgcctttgtctttatgaactcctaaagtccttgggtctttcgaatctactttctcaagtgcatctgtggttggcggagctagcacgtcaggagatagtttagttagggcagtcatcacagtctccattctggtcatcttgccaagtaacaactcgttgaattgatcctgtcgagttaacctacttttggccaattgaagttgttgtgggatgatgaccacatggtttgactcatctggatagctcttctctctagcgttatcatcatcgattttgtcctaaggatcgtcttcatggatatcctccggtacgtcttcgatgttaacttcagcatcctcgaaactactttctctagacttcgcatcctcaatgatgggatcgtctcgattccgatcttcatctcgacgacttttctaatgactagtcacctcttgggagtcactagtatctccagctttggcattagggccagtgaaatgaaggccagatttggttctagtgagagccatgattactcggacgtaatctgcaagtggtctcactgctttctccagctcttaataaaaataccaaaatatttgccaaaatttttggaaatagaataaaaataataagaactgaagaataaataatcaaaagagaaagtataaaatgagacaaacaatttttaacgtggttggagcgttaactagccttagtccatgagtcagtattatttagtaaatcttttgcttgaaatgccttaagaaatacacaagatgtatgttctcaaatattcctgagcaaagtttgcaagaggtttcaacccttaatccatatgattagtgaggtatttataatagtttgagaattacattaggtttttcatttccctctattgggaagtttacagtaaataatattcttggactttcttgtgaaagccaatccatggagaagacgatctgctgactagacggatcgaattaggattgatttggtcaacatcgcatacattgttgtgagcaattaatctgaattaattgcataatatttattgtaggaagttttcccttaaatcttgatacgatgcactgttgtgatctaacaactagagtttccttatttgtgtgaaggattataaagggaaactggaagggtcttccaggaatgcactatattgccactttggtctcgtagtaccgaagatgtctttcaggtatggcttgctgagggcaggaggctttacgagtgcagaactaagatacgttcctggaaggacatacctagatgggcttggccgattttatctttgttgagggtcctactgataggttctgactgctgacctggagtccatgtgtccaatgtcagaaatgcagataacaaatagcaatatgtggagaaataactcttagacatctgtaaaccaacttaaatatcaaccaattgaatatattcatataactaaccatgttataaaagttttttttaagagatttctctttcactgacaatataaaacacttacaaatttaataaccaccgttattatgttatcagtttgtaatcattgatatgtcaagtttcagagcattacaaaatcttaatgcaactataatgcaccttttcaaaaacataaaaaactagaacaatatttcgacatatgtgactctagatccatgtgaatatactatactattcgtgatttgatatgaataaactcaccattggaaatctgaaaaaataacatcaatgcaatgggataaatattaactacaatattgatgcatttttttttattataccccatttagattgattgggaactctagatctatttattagagatctacattttatgaatctaaaaattgaaattaggaagattaattttctgcgatttaaattgtaattcatggttgaatttatatttcaaaccattttttttttttgcataattttgcatccattagaaattgtagatggttggattgattctgatcttcttctcaggaagtcgacagaattaatggtaggtttttgcctgatcgggtttcgtttcggttagcttgttgggttgatcgattgaagcttgtgtctgtgaggattttgtttcgtgtgtattttggtaatatag

SEQ ID NO: 24366 - DNA, 2544 bp, Cannabis sativa
  modified_base (942)..(943): a, c, t, g, unknown or other
tctctctctctctctcctctcctctcctctcccaatcccccctctctcgatctcctctctctctctctctccatcgcggtttaccaacgcacaacaatgacgagccatctaaagctgtcagtccttgaaatcaatgacaccatgaccctcaacggtgttagaaacttcgagttccttggttcccaatacccttagtcgttctgtggcgttaaaaggtcattggagtcaaagtttttagctctgatctaatcgcatctgatgcttgttgagaacaaaaaatttttttcttcttaatgtatatatatatatattaataattataattaaatttgtttagtatccattaataggtaatactcattaagaagtgttccatctatatatatagagatacttttaatgggtattatccataaatgagtaattttataaaatttgagtttttgtgattaatttttctatttaattagaaaaatttctcatttttacattatctgggatggggttattccatcagctaaaaaaataaaaataaattgttcttcgacaaaaaaatgattaaaaaaattgaatttgtctgaaatattttttcatatatatatatttgtgatatagtgtacaaatatgtattttttgatttttttttaattaagtaactaaattaaatataaaaattaaattttctcttttattatttgctatcggactaaaatctaatgatttaatatttttaaaattaataattatagttatatttgttttttatccattaatgagtaatacatattaagattccatatatatattttacttaaaaaaaactacttccttaatttactaacgattttttactcataacatattttttttattaaatatgacttttagtcacaaaaaatgttacttgtgactaaaacatagtatttacatacaagttgtcannaatttagttttattcacaacaagtattgtgacttaaaatatatttagtcacaataaattataatttttgtaactaatttttttagtcacagaccttttattcacaacatatgaataataatttataaaagtaactaatacttttagccatagacctttaagtcacaataaattatgagttgttaccttttagtcacaagttttgttatgactaaaattaaatttttttgttgtgatttatagatatatctttagaaacattcttgataggtggccttaatcattttgtctaataaaccaatgccaactaatttggtatattatttccgtaatttggtgaatgatttattatttctggtttaacaaaaactctaataattcataccaagtatcataatatttaaaaaatttacattatttacattagtaactacttttaactaatttatgataatattatctatattgtcaaaaattaagtaatatatttttagaataaattaaaagaataattagattaaaaaatatcgtgtgcaatttcatatataatttggcgtctcctctaaatataatgatttgaagatttcacgttgattttagtaccttcctttgagtgagctcacattttatttagctcttactagaattggtcactctaaatattaagctcttactttcttccttttttttttctatgtataaaagtcattaactaattattacacttaaaaaaaaactattcttagagcatttctaatagaagttgtctattgaaatagttttgctgcacatacaatatacaatgtggttcaactttaattttaagacaaattttaagaatatagatattgagtgttgtccaaaatagacaatggctatgttatcttttgttccttttttttaggaaacaattatttttatcaaaaaatttcattaatttaatatttaaaatatgatatgtgggagcatagtagtaacttttggaataatcaattattagattactttttgtaaaaaatatactaattcttatatagatgagaaaaaaataaaaaaaaaatattttgagatgatgtgttaaatgattcttaaatcttataacatacaaaatataattattaaataattttataatatatagatgtgtaattaaattgattattgtcaatatttaatgtacaggaagtttgggtgctcatgtgtttacaaagtatacgtgtacaagccggagagaaaggaggagccaccattgtttggaaaagtgatatttaaaaaatcatcaataccagctatggttatgggaaatcgaaaccaagttaagtttgtggtcgataacaagcctcttcgatgtaaaaggtttcacgaccgtggaagtagtgcaaggtgcaacaacaacaacgtcaacaacaacatttacgatgatgacgacaacatcaacaataaaaattacaataacaattgaacccaacattcaacaataaaaaacaaactgtaatttaagtttatcaggagtaaaaaaattaataaagttaaggttgagaacttaatttgttattttgggtacgtaatcttatgctcacactactacaatgttggtaggct

SEQ ID NO: 24367 - DNA, 3394 bp, Cannabis sativa
  modified_base (3227)..(3229): a, c, t, g, unknown or other
ataattcaaggaggcctactggagtttaagactgagcgctgcctgactgagtagaagagtttgcttcatccatccattccatggtctccctgtaaaggtcatggtcagctctcatactccgtatgatatgggccttatgaacattttcgtcttccagctactggttctcttttcgcagaccctaaacctggagcctggcctccatgagctcagccagaagggtcacgttggcattaagtaattcacagttatcttccttgacgtactctagtttagctactaacaagctggtttccttggcagccctcttcgcgagcaaggcaacctgtcaaaataggctaaggcaaagaggccaaagtatcagagcaggaggcagaacataaaaagaacaaagaaaggtggaaaaaattacttcaaggccttaccctaactgcctgttgcttggcagagtgggccaacgcgaaagcatccacgctactacaggaagcctaggtctccatggctagttcagaggcgctcccggccacctagttcagaagctcagcgacaaaggggacagattctttccccaccttgtatgtcagctgcttctccaaggccttaacttccttagtatgccccgcagggggcaaagcgtgcataatgtccgagattttggccttgcgaaccgctgacagcacggctgccctccagcagacttgcagcctttctgcctccaggtgcccctttagggccttgtttacttccttctccttctgcataatgaggggatcgaaaggaacaaccttcctggggaaggtaaaccccaccggaggtatccttagcagagctgaagggtgagaagaccgaagctggcccaacctcaataaaggatcatggtactgggggtgggcccccactccaaaaataggtgtctcgagcctctgcttttttctagaagaagaacagtcgcctgctacttcagaggaacaattcctctccattgtagacttggtatacctaccaaaagtcgacacaatagcaaaaaatggtcattgcatgaccccagaattcttaaaaatgacagacacagaactggtatttttagggaaaatgcacccttacaactgcctcaaaactttacaataagtaaacggagaagaaagcataccaattgtcaagagaaaaatggggctggtaatcttggtgcaacgtccttgccggttgaatcaatgtctgattgtaatgacagtaaagtctcacaagataggggaagacttggaactaaagaactctagtttgataggcaagaaaaatgaaaaagtggaatggttgctgagggtatttaatgggtaccaggaagaggcaccttccacgagaagcagacggttcaactcgcttgcctaatagacatctgatagttggatcagggggaagctgagaaggtatatcacctcccagcagtcggcttccatcattgcatgcattgtgaaaatgctcagcaaattcgaagattacgcagatccaatcaccatcattttagacatcctacgggacacgcgcctagcacgcacgcaaaacctaaaagtcagcattgaaagtcatgacaagaaagaagaagaaattatgccttctgaataatgacactttagattggcagctagggacgttgtgtaataaaaagtttgtcataagtcccacgtgcacaaaatctctcaagaaaagatactgcaagttcccagaccatagtacgccccaaaagcttgggggtaaatgttattcgcacttttgcaaggatgacacatggatttttatcaaggatggataatgtgtcaccagctagccaacttcctcaaattgatgctctgggaagacaagggcatcagcttcgcgagaagaggttccgtgataaggagtttcctgactactagcaacgcggaaggtaaccgcgaaccacagtctcccttcgttctaagaacaaaagacatctattaccgcgaggaatatggattttcccagaaaggccaaaacacttcgagaatgcatcagtccagggtacgcctttggcccgcggaggctctacccacgtgtgtcaagctacatatctaatgaccaggctttttcatatacaatgtcagaggttgtctcccacgacacgctatcgtacagagcatgcatgtccttgtatgtcaggctaaatgatccaacgattagggataagagaaattcaataggaacaaccctgaggcgacacgcgtccgaggcccagcctgtacaaccagtacaacctaacacccttaaatgccatatgggaagtacaccacctaccaatccaatagtcggattttaccactatgatgatccatccaaggctgcccaggtacagaagttggcctataaataacccaaaaaaagcacaaggggggaccctttttcgagacaggggactcattcttcatcgtcccaggcaaacacatttctgtaatcctataattaactctaaaatatttctactaagctttcacttcttcaagaggaacacggtggaagggagctttagtccattgtatctctacttgtttaaacagttgccggccaatgagcctaataaaatggactcgtggactaaggatagttaacgcctgaaccacgtaaaaatatttaatttccaaaatgttcagtaaacatacataaaaatattttgtaatttaaaatatgatgactctaaattttatatttattttctacaattcttgctctttttttttatatatatttctcaaacttaataagattatcttagtaatttaattttttttatttgctatttttggagttatgtgttttgtttttatttttaccaatttttaatatttttgtccttttaatgattttttttaatctttcaacttttttttttttccattttcttaaaaaagctctcatgtttttttactctatttgtttttttaagataccattttcaccctttttttctcctatatttttttttaatgaattttacttgcttatttttttcaagtttttctttttatttgtttatcattaaatatataatagtgtaaaaatgatatgagcatacatatgatattaatttttttttgttgttcttcttttttcataagttttaattttgttagttattatttttttttcttctaaactttgcttattagtagataatagaaaaaaaaatcaaatgagtttatgttgggctttgtgccctnnntaaaactctatttcaatgtaatattttaaattcatttatcaataaagatagagatttattttcattacttatttaatgtgttatttagttcatgtgatcatttatttatttatttgacttataattcatccaaatccttatcacattgatgatattgtttattgt

SEQ ID NO: 24368 - DNA, 5554 bp, Cannabis sativa
  modified_base (5503)..(5519): a, c, t, g, unknown or other
atttacagatgatcataaataactgcaacatacacaatcataaataaaattaaactaaaaaactcttataatgtctaaataaattagggtataaaattaggcaaatttttttatatataaaattcatcaaaaatctcaaatttatccaactaagctcctaaacatgttagctggaggtatgattttcataggtgatgacttgtgaaatagtcctaacaacaaattttgttacactaatacaaattacaatttctcttgctagaatcgattttgttgttgtttctccatggatttcgttgagaagaattgtgttggagtctcgtagatgatgaactctagctaaaaataaaaggaatgagttagcgatttcacagagtaatgacaagctaacaaattagaaattaaattctacagagctcaattcaaagtctttcatccttcaatattcttatcatctgatctttatatgtagttttcagactttaaaccgagctcgaattgtactagacttaacttcgcctttagcaatttttattttttctcctattagatgctttattttttattttttttttaaaaaaaattaaacaggatattttaaataatataaaaaataggagttatttataaaaaagtaaaatttctctaaaattaccccttaattttaaagtatttgagtttggatactttgaaacaaatgttcaatcccaaaccttcattcatcattttttatgtttaaatctgtccttttcctttctaaatatttacataaaaactcaaattttcttttattataagcacataatcctaattcaatagcaacaatatctaccacattaaattgacacacctaattttgaagatcaaacatctcttaaacacaaattgtgttataaacttattgtgacaattttagagcaggttcaactcctgagtataagtgggttagacctgtgtctaaagcccacttaatctaggagcctgaaaaaagtttttttttttttttttttttttttaaattacatatttttttattgattttaaaaaatattacatttttctttaaataagggctcaattttttttatggttcatcaaatttcttactttaaagtattaagaactaaaatcaataatgaaaatggtatatttacaattttaacaagtttaatcaataagataaaagataaaatatctatttactaatgaagtggtcaaatatatgatgtaaattttgtatcacatgataaacattatcttcattgtgattattataataataggtgataaggttgaaaaggggtcacaaatcatattgctaaaattaacttaattaaggcataatcttttattagatatataaagaagaaaaattgattggtcaaaataaaaatagaaaaatataaatataggaatgattctatcattatcatatttgactaattaaagcactaatttgttgctattgccatttatagttaattgtcaatatcttttctttcctataaattgtaatcaaatgaacctttcttcctcactcaataataatttcatttcttaactatttctcttcacaaataagtatagagttaaagagaaatagatcatcatgaagctattgggatttcttttgcgtttgtttttcattgttcttattttccatacatctaattcttttgctggcaggtaaaatctatacatatatatatacaaatcaatattaattataaataattaaatatatgtttagagcaacttaaaaagctcaaaattttatcaagataatataatttgttttcttctgcaaaagatctttactatattttttttttgttataattccattttagatagaaaaatttacaaaatataaagtcaccaatatattctttttacttacatttaattaatataaaatttaatggtattaatcgaatttgtaatgtacaggataaatggtcaaatatattttccatcgccacctccaccaccgcaagtgaacatcccaactgatgatcttccttctactaatgcaccgaccgttcttaatggtcacaccgttcttgatggtcagctttatacaatgaagactgagacatgattaaaaaaaacataagatcactcttaaacctaatctccccttaacatatatttgcttgtattgagattagacatataatcccaaagtgatgtcttgtatcttttgtttttgtttatttaatattatttatcatgactatcaataaaagttatgggaaatagttgtttgttattaagtataaatatgcctaatatgatattgtgcatttaaatatcatatgttgtatcttatttaaaaaaaaatattaaaaggcactcgtaataattagtaatatagttaaatgttgctattaatgcaattaaaatacaaaaatattaaaggatagtgttcaatagaacattactacaccatatcgtgtggcgcgttgcaattagtcaacaacttttatattatttattaaatgaaaatatgtgggatctgatattgatttgcaacaataagatgtgatctcttatagtgcttggcaccactcccatttattagtacaatttagtaatagatattacatatttaaatttaataattagcatagaaattgtttagtacttgtaacaataaaaatatatttcttttttttatcgttaatttttattatttgtattaataaaaatatttatagacataatatttaaataaatcaaacaaaatataaagaagttagtgtataatataaagttaaaatttaatgtacaagaaataatataaaattttaataatataatttggaagattaagttgaaaaactattacaagtgctcttagtaaggattgagatgagagattgaacaagaatagaagtgtaaaatctatttatatttttcttcgatttttactctcatattttacaaagttaatacatagttatcctttttattttttaaagagtttctatacatatttttttatatgaacaagagcaacatgaggaaccggaggctcgcgactatttttgtcacaaaaaatgtatgtcatgtttaaaaaccgcttaagaaagtttgaaccatttcgaactctcaagtgaaattgtccaaagaagtatgcattgcatttgcattaactagtttttgcaactcctgtccaatacaaactctcattttaggattattgggagccaaaattgaaccttctatctctttttaaatacaaatatttatgctttgattgatagaacttttgtgtcatgtaataaatattttgtcttcattgcaattataattataggtgatgaagttgaagatggaccacaaatcataaaagttgtttaaagcataatcgtttattaaaattatgttctatgagaagggaaaaaatttggagaagtagaacttgataatttacatcattatagctagtcacataattaattaatattttttaaaaaggatttttcaaaaattaagtaatatgaaattagttaaattattattaaacttataatatagtaatttaattaatatattacaagtggtaatttaattaatatagtaacttataatatgtgttaatattgttgttggttcaattaagtatcggatcccatatagtttaatataataacttttaaggagtagcgttagccaattcgcaagacgacatatttaaaagtgctaggcaccattggtgtccaatagcaatggttcattttaaaatagtgagtgagaaaaagttgtcatatgaaactcatgatctcgattattagtccaacacaccgaggttatggggggtctcgagacggctttattttcgtccctctaaggaatgtgttgaaccatcaaggttgactttctctttaggataagacaaagtgatgtattttagcgcgatcctaaggaagcgttactaaattaagtcatgaaatccaaaatattaagttacagtcataaagtaatgtttctatctttgacaatatgggacataacttgaccaaataagcgatattttattttgtaaagaaaataagagttattctaatcataaattaataaagacaagaatcacttgtagattattcgatattaatttgactagcctgtgacgaaattcagatgaaaaaaataggaaaaagagaaaaaaaatattcttttatgttatttggtaaactaggagagaaaattttcttctatgaaaatgactatcatgtgtatataattttaattttaataataatttttaaggatgatttagtaaatttatatgtatatatttgtcttctttttctctccatttttgggtgaatgaattttggtggccctattcctatttttttttcctctcataccaaacacccttatttttatcttctctttacttttctctaataatttttattttcttctatttttccaccataccaaatatagggtaaaggtatataaagaaagaaaaatgattggtcaaaataaaattagaattatagatataggaataattatatcattatcatattgttcaaaaaaaaaaaagattatatcattatcaaatttgactaattgaaacattaatttgttgctattcctatatatagttagttgtgtttatcttttctttcctataaattgtaatcaaatgaacctttacttcttcacacaataataatttcttttgcttaactatttctctttacaaataagtatagagttaaagagaaattgatcatcaatgaagttattgggatttctttttcgtttaatttttattatttttatatttcatacatctaattcttttgctgacaggtaaaatttatgtttaaagtaacttgaaaagttcaaaattttgtaaagataatatttggttttcttatgtaaaagaccttcaatattttctttgttataattccattttagataggaaaatttacaaaaaaaattaaaataatttaaacaattttcataatattgacaaaaaataaagccaccaatatatattttttatggattttaatccttgtattttatttttattttttgttaaacgatgggtatcaaattaattaatataaaatttaatgtgctactaattggttcccactattaattttttttactttattagtgatctaatagtagcttgttaagaaaatattaaaaatcgaatttataatgtacaggacaaatgttagtcaattacttttatcgccacttccagcaccgcaaaaaaacatcccaactaatgatcttccttctacttatgaacccatcgttcttgatggtcgactttatacattgaagacggagccatgattaagaaaaacataagatcactcctaaacctaatccccctaatatacatttgcttgtattgagattagacataatcccaaagtgatgatgtatgtagtcttgtatcttttgtttttgttaatttatcatgcttatcaataaaaattagggtaaataccannnnnnnnnnnnnnnnntgcaaaagttatagattggaccctgtgttttgtta

SEQ ID NO: 24369 - DNA, 3071 bp, Cannabis sativa
agtccacgtgtcaccattctcgtgatgccacgtcagagtgccagatttgggataacaaactgattttttataatacacattttttgagtataaaaaaaaaataaaaaatatttttgttgacccatttattattttcttttgttctaacgaccatgagcttcttcaaataagaagtttagaaaaaaaaaataatataattgagtattgtgtcttgaaaagttaagagctttaaagaaaaaaagtgagagagaatgtttaaattagttgaaatccttttctataatttctctccaatttgaagaaaaaaagtaactaaaaaatgaataataaagagttattaatttggattgcaaagtaaatagaaaaatataaatatctcttgtgttttacattaagtggggaatacgataattttgtaataaaagtgaggcacctaaaaggaaataaatttatggtataattgagcttaaatgatatttttatctacctttacataagcctgacattataacttgtaaaaatttcttttaattttaagcatttattgttgacattagtaacaaaagttaaatgatgcaaccatattgaaaattcagttttggaattgtttggtatgttgcgcatatatggtggagtttaaattactgtggtcatttgcacatgtgtccaattagttatttccctaatggaactttaaggttaaactttgcgacagttgaactgaaaatttgattaaaaagtgcaattgatatttcatagtaattggaaacaatgttagcatatctgtgtgtttgtttttattttttctttttcgttagtataacttggtctttaatcgagggcgagtaaaggttaagtttgggaaaatattttaggtttattttatgcagtttttatagtctattttagtgtgtgttttagtatttttattactttattgttcgaatttatttatattattttgttgtttgctttttaggagaaatgtttgaagatctatatttttggttattttggtgttcttcaagccttttcgagacaacaatgggaaattataaagaaaaaagaaaacgccaataatatttagttggatttcttgttacctcaatttggtcaaagtttacattattagatctaaaatttgtgatctagagtaaagagtgatcactttctaaaaataaattaattttttttaagttttggatattgaacactctctatttgtgactgaaaataaagttaagaacttcaggctaagttttgactatgatcaattcacttccaggaaaaacttcttgaatgaaagaactagatctctcttttatcttttcaaattatattgaattgtatgattccaaataaaagcgagagagttatagataaaactatatatagggtatcgtagcagaattttagaatagctccattcattggctcttacgaaaaaaacaagaaacttcccgaaatttctaaacaagttggagctaggttttctttatcattcgaacttaaagacaaattttgggcgttggaagattttgaaaaacctccctaatggtttatttaaaggggatgagagcttagatctaacacaattcgaaaatttagaaaattctgagcataaaggaaaggctatgagcagaaggcaccattggaggactccaaacagtgttctatatcctccatctctatcttttatgtttttaattaaatttttattattttagaatgtcttctagtacctaatttctttttacgaattattatgtgaataatttgaatttattttaatgattaatgtaattgttcaatttcttcttctctttattcaattctatacaatctgttttagttctagaattatttactaataatctataattgttgtctatgattcgaattgaaattctagaaagtgagattttaatatgctctgattgttatagatgcaaattgatttaagacaaaagtacgtagattgtttgtatgattttatttgttgctttgcttagttctatctttgtgatgaaactttaccatagaaatattgggatttttcatctagattgggtttataagtcataaccagattataaatttcttaactcaacttatcaattgaataggaagaagagaaagtaggtaattacattaggaagtaaaattaaggatagttgaggattataataatctttattttttgttgttatttcttttatgatgttttaaatcattgtctatctctattcaacaatttttattaatcaaatagaatcaaaggatgttattggaactttttcggcgtgtatggcactccctacgattgtgtgaaggagagcttttggaaaaaactggaaagcagggtgctagattgtcgattccctggctcattatgggggatctaaattctattattagtctggaagagaatagtgggggcaataaagcatcgtggagagatttcagatggttatcagattttcttaataatactggtagcatagatgtgggttgtaaagggggaaagtttacatggaaaaaaaaagattcaatagaggtttaatctgagaaaggctagatcgtgcgataggctcctttgattggatcagtctgtttcctaaagcctgtgttactaaccttcccatcatctcatctgaacatgcgcccataatccttgattcgacggctgataattcaaagggattcaagcctttccgattttatgaagcctgatgcaaagagaactcctgcagagagaccgtggaacacgtgtggaatgagaacactcaattggggataactaactgtcttcagaatataactcagacctacagtagttgaaaaggaaggtttttggtgacagtgaacagaatatcaagaacatagaggctcgaataaggtggatacaacaacaaagtatttccaatgacttgtgttaggaagaaagtagattgcaagcaaaacttgaagaagaataccgtagacttgagagtcaatggcgtcaaaaatttagggaggtttggctcaaattgggagatagaaactctaaatttttccacctgtccacaacg

SEQ ID NO: 24370 - DNA, 2514 bp, Cannabis sativa
ttttttttaaaaaaaatatgaatagctttcccaacgacaggcaaatgtcgttattgataccctcattttcaatgaggatttttagacattggtaatagtggcgttggtattaaccataattcttgtatatttctgttgtaccgcttgatattatttagagaaatactaaagagtatttatgatgtctagcatctttatgaagtataatatcactattagtgtaatttaatatcagatctcacttattttactttaataaatattataaaaaatcactaattaatttacatttcatcgtggtaatcatggtgctagacaccatacctcttaacaatgttcaattatttagtactacatacactaaagtggtattggcacggcaccatataatataccttataataacaattctttttgaaacaaaactattggctatatatgtacacccatatacaacttacaaggccggtgtgaaacccccaacaatagctacctagtacgtacgtgctacctatagccctagctagcccttcataaatgttttagttgtaaacaagaaacacatgataagctacgtatgtgtacccatgcatatatattggtcatatatgatatgtattgtatgcattccactgtttttataattattgttatttgttaataataataacatcataagttttgtatatgatgaaaatgagatagagagaggtatgtatgggtatggtgaatatataatatcataaatattttatagttctgacaagttgagtccatgtgttgctcacatgcatttggtatactcagccgtatgtgtctttatcaacattttatttccctcttctactaacctccttacactgtcttctagtgtttttattatgatcataatttaaaataatataatttaatttacatgcattttcatatcgtcatcagcatattcttcatccatatttgtgaattttttaaccatatcattttcctcattaattaatacttatctttttccatctgaaaaagaaaaataaaagatttattttatacttatctgtatacgttatcatatatatgtaataaaagcactgaaagaagagattttgcttccaaagccattactgatgctctttctggtcataaaaaagatattttggtttttggtgacattattaaacaaatcaagaatgctttatcttatttcccagctgctcggctctcccatattaatcgggatgctaacatcctggctgataagttagctcaccgagctcttgagttagatgaagtagccatttagattggagacgacccctgtaatttctttgtttttctgtcttagcgggctcctttctttcaaaaaaaaaaaatatatatgtaataaaagacaattacttatatttggagaaaaagaaaataaaacacattatcttacaatgttgaaaaattatgacttatgaaacatgcatgtagcattttatttttataaaataatgaaccatacttagcttatacaatattatatcatatatgtatatatattgatttgtatatatatgtttaatttaatacattcttgcatatatattattaattaataataaccaatttataattaactatatatgtttaagctagtgtctaataaccattgcgctacggtacgtatgattatattattaatccttcaaaaaattataattatatatataattaagaagatctaaacctttaattaagcattctaattgttacttataaatatcaaaataaaacttacagttgttaaataattgagattaatattagagcggatcgaatcacttaattatatgtgcaaatatattttttacatagaagtataaacattcatgagcatgtccaccatccgaataattgtaataaataaagaaaaaatattagttttatataatgcttaactaatccattagttaaaaaagtgttacaataacaaacaagtaagcacaactacatagcaaacgacaaaactcctttatttatttttttaatgaaaaaattccactattatattttaatatggtagttagcaccggttggtccagattatgggaggaggggaggcaccttgtcatttatatatataataatagtattaatatatatatatatatagtactctattgttttgttattacataaattaaaaaaaaaaaaaacttctatatgttgtaataaaagaatcatcaaaaatatatattcatacaaaatgataaaaacatttgactataaaaattgaagtcggataataggttgaaaaccttggcaacacttctgcacatggcagtccctttcaccaacagttttccttgatttaaaaaaaatatattaattaattatatactctatttgtgcttggagtggaatttatcaagtataagggagaccaacaactttatagtttctagttgttattattattattattattattattaattatcactcaaaattattttgaaaatctatagttggtgg

SEQ ID NO: 24371 - DNA, 3964 bp, Cannabis sativa
tttttcaaattttagtaaaaaagtctaacatgtatgaaagtttagagggcataacttagtacatgtcaaagttcaagggacatgatttggtagatatccaagtttgagagcataatttaatacataaataatctttgaaatagtaaaattgaataaaatttgacaaaagtccttaaatccaaaaaattcaatagttcagggaaagttcagggagttcagggacaaaaatcctaattagccttttatttatagaatagacaacacactgaaaagtatgccaccaatagctcatgtcaagacctgaatgatcaagcaatgttaatccaatttctgtaacatgtctatgtctcctttacattcttccattttctcatgagtgtgtggacaagatagctaaaatttgattccttgatcagttagaaaattttcaaattgatctccttcatcagcttgcactcccttcattggtaggttaaattgcttctcaactagtcttttaaatcttatgaaaacttcaaaagcttgagattttagtgttaggggaaaaattcaagagaatctgtaatcatcaagaaataaaatgtaatatttgtagttgtctttagacacaacatgggaaggtccccaaagattagtgtggataagctctagtggttgagaggctcttttgggggataaggaaaaataaagtttgtgatttttccctagttgacaagagttatagaacttgaggtttttaagagagtgtgctatgattgaaatggacagtattttgcttaaggttgcaggtgctggatgtcctaacttacagtgcaacagatatatattattatgcaaagttttgttatagacagtaggagacaaagaagaaaaaccatctttattgacagaaaaatggttacaatttgagattgcagtagaagttgagttacaacatgtagtgtaatattttgtttcattacagattgaattgcacgagtctataccaaaagtggaaagataacattcgagagagtggctagacaatttggagtggtcatcacctaacaagtacaaatcattcatgaggatccctttgagtaggacaacacccgattttttgtccttgacataacaacaagatttgtgaaactcaagaaaaacatcatcatctctagataatttggaaatactaaccaaatttttagtaatggatggaacatgtaagataaattgaagtttttgaatttaaagaagggagagtagttttaccaatgtgagagataagtaatttcttacaatctcctatagcaatagattcctgtccattatagggagtggttgaatcaagattttccatggtgaatgcaacatgattagttgcttcagtgtccacatacccgccagcatcatcactaaagtttgggagggtttgagtgacatgggcttgatgatcaaagccaatactttgttctgtcagattgacttgaggttgggatgagggttgctttggagttaccctattcttgtcaaatctgtaatgacagagtggtgcagtgtgcccatatttcatgcacaattggcacagaggtctgttagttgaagaaggtctaccatagttttgaggaggcaatcttgatggattctcattattattcattctcctagaggcaaatggatgtctataagggtcatttcttgagccaaattaaggtgagattagcaaccattttagtggaaagatccatcatgaatgtgtgtctttcaaggcgagtctcatgagacatgagaagggcttggacttcttcaagtgtaagggcgtcacttcgagaggtgatactagaaacaacaagatcaaacttcgatcccaggccattgagcaaatgaagaatgagatcaagatcagtaattgagtgaccaacaatagctaaagaaccacaaattgacttgctcttgtcaacatagtcagagatgttaaggttacctttatgaatgttggataactgtccttttgagctaaaataacctagctttggattgactggaaaacttttgcgcaagagccgtccaaacaacatgggaggagttgtagttggagacagttccaagaatcgcttaagtcatcgaggatcgaagccaagaaagtaacaaatgatctttcttttgctattgaagatacataggattgggatcaccactgacgagtttctgtggaggactaatactgctgaacaatatctcatcgaggtcatgtccaatgatcgtggaacaacttgggatttccaagcaagaaaattgacttgattgagcttgattgtaagggaagaagtcaaagaattcgagaaaggattcccttaaggagcaacaacatagggtggcgcctgaggccgaggattagtgacactaattggaaacgagttgtcgcccatggatgtgagtcagaggtgctctgataccatgaaatagaaacttaaaacagggtataggaaatgaaaaactgagagagatgaaagaaaagcctcaaaactaagaatgcttgcttggacattctaaggaggaaacattttattttataaggatttgtacagtcaaaatacagttaagaatttagttacaacagaattcgttacaagtcataacacataggaaaaggctaaccaataaaactaactattcttttattggctataaaaaaggaacaacattcaattataattcagctaattgttaataacttatcaaaaaataaagttggtaataaaagtggaattaaaagagaaccttttatgccgatatggaatttgcacccattttgaaagttcatttgcttgtagttttcccttggcaatctctttgaagagggaataccaagggatggtctgatgtttctccttattactcttccaaaaataattcaattccatcttttttcttttctgaaatgcacaaatattacattaataatttaataataagaggtactatattataaatctctatactacaaaaagtatctttagtgaaaaatgtcaaaataataaattattttgtattttaatacctctcggaaagtttatagtacatcatttaaatgtgaatttggtagacattctttcgacatttatgagagttttttagttttttttttttttttttataatcatgtatgttataattatttaagatcacttataaatttttaaaaaaattgaaataatttaccgtgttgaaaataagattaaatgttttgttgcgcgtgtgattttttttacacacataataaacaatgtttgagctataattttggtattgtaactatttagaattatttgaaattaaattcacaagtaattttaaataattgtaccggatcataaaaaaattaattaaaatactctctccatgttgtactagaaagggtgctatcaaatacctcttttatgtaatttacaataaaatatcaattgtgataaaaaaaaaaaaaacttatttaatcacaaacagacacaaatatagtttatgttgcgatacttattttttttagtaataaagttctttgtagttgaaaatgcatttatttacaacaaagtgttattttgtgacaaatacttctattggataatacaaaaaaggtcccttttggtttaagaaattatggaaaggaccatttgttattaaaatagtaatggttcccaaacaaaattttaatcttgattaacaattacttattattatttttttgaaacattcatcttcattaaatagaacaatcacacaacaaaacaaacaataaatcatacaaaatagaatcttccatatcaataagccattgaaaatttctggcaataaaatgtgtatctcactaacaaaaaatagagaaacattacataatgatcccaacaaagtttttccaaatagcctccactatcacactacaaaaaattctatttttagtcacaaaaaaattggtgactaaaaataaaaa

SEQ ID NO: 24372 - DNA, 2936 bp, Cannabis sativa
attttcagataaccaaaagcttatttggcaaaaaattctcttacaatgttgctttgctgtctatcaactactttatttggagttttttcatagatattgattgtgctattttggtacttgcagacacaaaggtcccatgataaaaagtcgaaacaaaagtaagtaacaattctgttaggtaatattgttgtcttctttgctagtttaaattctttttgaagttagattttgatacattatgaacaagtattatgagtacattgtagtgatgatgaagaggacgaggtagttttgaatgtggagtgccattttgctcaagctaacattcggagtcgcatatataatcttggagattgtgcttatatacaggtaactgcctttacagtacatgcttttgctaaaactaaatttctttcagggtacatatttcttagatattttctttcttatttttcatttatcatatgcatcttaaagctttggtttaacaaaaagttgtactatggttgtgcttatctatttgatgttttgttgcatctcattgtagatgtgcttaatctagagatatattttctgtgggaaaaaaattgtcaggtgacagggtttgagtcacatatgcatttttgttgtgaaatcagtttaggagttttatgatttatgacataataacagggaaaggagaaaagtatcaacaatcccacaatctaaccaagtttggattctcagattgtttattattatctatgatcataatatttgggaaagattgcaggagagaacaaaacaaaagattaaggttacatgtgtagggtctaagttttgttttctggcatttttgtataactcttgtattggagttttgctttgttaccacggttttcctctgccttaagtaggctccctaataaacttggggagaggccagtctaagacacatgacctttgtctcttaaaaacaaaagattgccaagcatcttcatatgtttcttatagtagaacgagggttggagttctacatgaaagtaaatgttttttgcataaaacaatttatttctccagtagctataattaaattgttactgtaaagacttgcagtaacagattggtgatttgcgattgcagaagacttgcaataacataaataaagtatgcagaatttaaaacttaacacaagagatttatacgtggtattagtattctttcgaatactacttgtccacggggtcacgcacagtgaatgaagtctcaaaaattacaaatacaattgactaaaatattttagacttcctttaaagctttgccgcaatcttttgtatccaatttactaatataatttttgaaccacaccaaacagtaaactccctttagcttttgatgcggctcacttcctcccgaagtgagtctttgtcaagttttctcccaaagacctttctcttgttcaatgaaaactcttcaacctaatctaagaacagtaagagaacaatatcacaaaatcaaaacctagttgaacactctaggtttttacatagaatactcttctcacaaagatgaaatataaaataataagactggaagagataaaatgtatggctgctatctaggttttatttatagatcataggaactctaaacacagccacaaatatgtttttacagctgttagaagcattccttgaataaaagccaatcatccttgaaatctgccagatctgccgtagcagaatcgcaagctgcagtggcagatcagacaagatcttcctttatttgcatataaatctaaggccaggattttagctctaattcatgccataaaaagactaatttgtcaaactttagagagataccaatttgtcaaaccttctgaggccacatggtcaaactttagaaagatatcaatttgtaccagattggatagattcttatttaccaatgagtgaaatatgacattccctttcgtgagacaagaaatgatgatgagattggtgtaagaacataccttcacttcttggatatcaatgctcactatggcatcgaatcagaatggatgcatttgtggaataacataccttcacttcttgctgcatttttcggagttttaattttgttcatctctttcaatatattacaagtgtatcattattttatacaatcttatgcttttgttttagggtgacggtaaaaagaaacatataggcagaattgtggagtttttcaaaactacagatggtgagaagtacttcagagtccaatggttttatcgtgttgaagatacagtgagttaattagtattattttttttaatttgaattgggcatgtcataatgcatttctagtaattgttattttccaatttattgtattgaagatgcaatgagttaatttgtcttttttgtcccttatttgtcctggttgtgtcatagtgctttttccactgatatttatttcctttttgcgtattcttgtcaggttatcaaagaagtgggtgctttccatgacaaaaggcgtttattctattctaccataatgaatgataacatattagactgcattatttcaaaagtgctagttacgaaagtaacacctagggtatgtatggtctcaattatttttagtttgtagctgcttgaatcatgtctcttttcttgttttcttgcatggcttgattgatgtttttagtaggctgataaggaccgatactctaaactcaagaaaaggaatagaacaatagccaaacagtaggagaatagaagagtgatattgaattcagtaaagctagttactattggagtccttaggctcttgtgatgcaaagagtgactactcaattcttgcataccctctctatttccttactcagttatttatactatcatattctctactcagaccccctcaatacaatttgtagacagattttgtattggaaatcaaatcag

SEQ ID NO: 24373 - DNA, 2714 bp, Cannabis sativa
aaaatgaggtagtaaagtactattgttgtttaacttaacctaataataaaataaaataaaaatattagaaacacaaaagaacccatagaaacggggtcgtgtcactagagcggtacggtactcaactagtctcgttcgttctccttcgttgttttttggtggtcactgagacttgggaagtcgctacggcacttggaatcggaagaagatgggtactcaacccagaagaaagtccaataagccaccgctcaaccccaactgggctaatcttctaaaggtgctttcttataagttctactctatacaaaccttatatatcatataatatgtcacttcataaccttcttcttaattttttttttttttttttacagacactgcctagccatggctcaaaaccttcaaaacaatctgatgacacagaagaatcggagactcgcatattaggtacctaaaaaatgtttctttactcaatttgttattatgactacttttttgtaacttgctttattagctattgtttcactttaagaaaatttgttttctgggtattggggtcaatagggttaacagtttatttgatgattttctttgttttgatgaattgattgttttttatttttcagggaagcgaaaggagaggtcagattcccaaatttcagtcaatcctcttactcctgttaatgatgattttaggtaattctactgtaatggtttgtctagttgttgtgaaatatttatattatatatatttgtatatgaatatcttagtttggtattgggaaatatgtagtttacaatactagaaaatgtgtggagcaactattgaaacactctcatttatagtaatcctgtctttagcttggactcacttctttcgaaaggacaaaaagaaaatgtcttgcttctgagaatctgatcttataatatttttgacagtgtaacagatgccatagccatggattgtgaaatggttggcgttggtcaaggaaacaaaagcgctcttgggagagctactctggtcagtttgtttttcggcacctcctgctcattgtatactagactctttgattttgatacttgaacttgaaagtcctgtgttggtatcttagtaacatattagaggattgtttagtttttcccttttgcagtataagactaaactagttggaatgtacatgttatgttactgtcttattgtgtgagacagcgtattcttaaatgtcaaattatttagcaaagcattttgtttactttcctgtctctgactagtgttgcttccatgccaggtcaatcagtggggaaatgttatctatgatgagtttgttcggccaatagagcgggttgttgattttcggactcaaattagtggcatccgaccccaggacctgagaaaaggttaattttgtcaaatttctctccagcttgctatttagaaatcatacttttattttgtgttcgctttcagctagcatattgactgcttgttaaagttgaatgctcaatgggacttctggaaagttttgactatcatctgtagctaacagtttctctataataatacaatataattggataagttgaaaattaaaaacataacaaaaggaatcatagtaatgataagggctactactattatcatgtataagcccatttcccactttttttctttaacttatctttcaccattttaaattttgtcacaattccatgattgatttttgataataatgatttggttgttaaaattggttttgtggttggaatttgtagatttgcaaaccaatttatctgtaaattgtattcatatttaaggtgtgccttgttcatgctttgattttatctttcagcaaaagattttcgcacagttcagaataaagtggctgagttgactaaaggaaggattctcgtgggccatgccttgcgcaatgatcttaaggtatctagttctggattttactatgctttagagaaatatatacgtggattggaaccattaatatgagaatttttgttggataggcattgctactaagtcatcccaagaaggacgtacgagatacatcagagtatccaccatttctaaggtaaattatgcctctcctatttatacttttgcaattgaaagttgaaatttgttgctcttcacctttactacaacatcggctaatatacgtgtggggtttgttgagcagagaggggagcagcagggcacttcggcatcttgcagctgaatttcttaatgtggaaatccaaaacggggagcattgcccggttagtgttttgaacttaggcttacactacttttctgcctgatcattatattccactaattaaataggaacattattactaccttggttaacatagatcaatgccattccttgaatcaatgaaacttgtagaatgatacaaatctgttgtgtgattcttaatactgttttagatacaagatgctcgtgccgcaatggtgctctatcagaataacaaaaaaatatgggaaaaattggccaaagatcagataagactcaaagaaaaacagaacaaacgaagaccaaaaaagaaaaggaaactgggagatgatctgaatgctggccctgctccaacttccctatagtcttgatagtttatcccgtttaactgaaaaatcaacctttatcttaaagaatcaaagcgcaatcaattgcaaaatttcatgacgggggaaggaagaa

SEQ ID NO: 24374 - DNA, 2874 bp, Cannabis sativa
tttaggacataaaacccaacagctacctaatcaataaattaccaaacaacttcaagaccccacaagagttatggacaggtaaacacccaaacttagatgacttaaaagtatttagatgcactacatttgtgcatgttgaacaagataagttacagccttgagctttgagatgcatgtttctaggctaccctaaaggggttaagggatatagagtgtggtgcatagaacctggattcaagaagtacttgattagtagagatgttattttcacggaagatgaaatggccatcaaaaccaagagcacttccaaatagaggtgttcaaaaaaatttacaaatcctactcgattaaactgcccacactaaaccaaataaagcaacaaaaacacaatctaaataacccaacaaaaaattcaaatcgctcaatgaatatattggatgtgttgaatattattattaacccgcctaaataatccgaataaattgagtaacatatttttactaaaaaaattatgatatgttacataaattatgtttaatagttaaactatttcacatttaaagttttaactttgtagtgtttaattaaaaatttagactttatagttgataatgttaattgtatttgaattttgaagttgacatttagattcttacatcaatatatatatatatatatatattctatttttgaaataatattatttaatactttattgtttaattaatttatatttgtcttatatttaaatttttaacatcaatttaagctataattaatgcatttaatcttgaaatatatatactatatatttattttttctaaatctatttatttgaaaactaaaaactaacaataataaaaaaaaaacactaaagattagtttggacgagttaactcgaccaaaccgacaaaatcattgaacgggttaaactttttttattttataatttggcgggttacaattagatatttacaacctaaaatttatattggattggtaaaatatactacaacccgaccaaaccgactgatgtacactcctacttccatagacagtgaacctgtatcaaatgagaatgtctagattgaggtagagcaagttgctcctacaacaccagctaatgatgttccagatggaactgaggtaacagaaggagaagacaatgaagatcaacaagaactaagcatatatccattagctagagatagagagataagacagagaatagcccttgaccgttttggttacgctcaatttattgcatatgcacttataatttcagaagaggttgacagttcagaactcactagctttcaagaagctatgagaagtaaagatgctgcagcatggctataggccatccaagaagagatgccgtctcttatgaagaatgaaacatggattgttataaagaaactagagttttacaagctgataggatgtaaatggcttttcaagcataaagaaggttcaacgaatgaacttaccaaattcaatgtaaggttagttgccaaggggttcactcagaaggaaggcattaattacaatgagattttctctccagtggtcaagcaagcttcaatcagagccatgatggcaaaggtagctagcatggacctgtagattgaatagatggatgtaaggataagtttcttacatggggaattggaagagaaaatctacatgaaacaacttgagggctttgacaatgggaacccatatgaggtatggctacttaagtctttttatggcctcaagcagaaggcagctaggtaatgaagtttgaggtttgacacctatatagagaatattggatatactaaaagtaagtatgactcatgtgtgtatttcaataatcaaacctatttgctactctatgttgatgatatatagatatttagtaaagtaaagtaagagattgaaaagcttaaaaggaaactcaatgatgagtttgagatgaaagatctgggcaaagcaaagataattcttgggatagacatatataaagagatcaaagccaaagcctggcatgataatactttctcaagctacctacctacaaaaagtattaaataagtttagcatggtcaagtgcaaactaatcgcaacaccatttgctcaacacttcaagttgtctgcatcttagttaccaaaaacatatacaaaaagagccaagataagcaaagttccttatgtaagttgtgttgggagtctcatgtactctataatgtgttctagacctaacttagctcatgctatatattagtgtgttcatcaagtacattttagaccctggtcctaaacattaggaagcactgaaatggacaatgaggtacctgaaaggtactctgaacactagaattgtgtttagtaaagagaaccagctcaaggaagaaatcattggttacgtggactcagattttgtagcaaacctagacactagaaggagcctaacatggtttgtgttcactgctattgggggcttcattagctggaaatctaacctacaaaaaagagtacccttatcatcaacagaagatgaatacatggctactacaaaagtcatgaaagaagttatatgctaatggcattaacaaaggagttaggtttcaaaatatgaggatatcacagtagactgtgacaatcaaagtgctttgcatctcatgaaaaatctaatatttcatgagaggtcaaagcacattgatatcaagttacacttcataagggatattgtgtcatccaagcaagtgcgagtgaagaaaataagcacacatgagaatcctattgatatttttgctaaaagtgtaactagagtcaagtttaagcattgtctgaacttgttaagcacttagtgttgggttttgtgccct

SEQ ID NO: 24375 - DNA, 4527 bp, Cannabis sativa
tgtactcttgtattttgaggaatagcaatacatctttttcattccttctgacatggtatcagagccaaaaggctctccatggcatcaatagagtgtaccagctcaatcccacaaatggaaaatgaaaatacccaaaacccccttccaaaccctactatcactaacacacaaaaccctaacactacagccgccacacccctctcggcctcgtcttcttccccaaccttaaccccaaattttccttccttcaaccaaacaatttcagtcaagttagatgacacaaattacctagtttagagaatgcaaatgcaaaacataatcatagccaatggacttgaaggctaaatcgacggcacagtgttccgtccaccccaatttatcgacgaaacattgagccaagtcaacccatccttcacggcttggcacaggtacaaccggttgttaatgagctggctatatgcctcactctccgactccatgctcggccagatcgtgggcttcactactgcagaagaaatctgggtttctcttgaacgcacatactccgccgcctcgtttgcacggagctccgactttcgcacggcgctgcagaactttaagaaagacagagtcagtgcatcagcttatctccaaaagctaaaaactctctgcaacacccttgcttccgttggagaacccatctcttctcaagaacatttaacttacctccttaatggccttggaccagagtataatgcctttgttattcccatcttagcttgatcggtcaaacccaccattgaagaggtacacgcccttcttctcagctacgaagctcgtttagaacgctaaaccgctgctgcctcactgagctcccttcaagccaactttgccaacctctcgtttcccaaacagagacctaaatcctcttctccacaagcctcttctcaactgcgcttctcgtcacaccctcagcaaaacgcccacccaatctaccttcatttcatcgacctcgcaaccactatcccacccctcctcgatctccaacaccgtggcttccctctagttctccccgtccccctttaagaccactgagatgccaaatatgtttcaaaacagggcatacggcattcatgtgtcaccacagaaccaatctcagcttacaacctccaccacaacgtccatttaatgcctatttcagtcaacaacaaccacaaaccccttccccaccattgcctccttcaccagccaacactcaaccattacttcccactccttcatccacgggtgctctcaccgatcccgcttggtatatggactccggagcttctcaccacttcactcccgatttgaatctccttgaattcgccactatgtatcatggtaatgaccgcattactatgggcaatggtaagttttcttcaatttctcatgtgggtactgcatgtctaccatcatcatcctttcctattattaaactcaatcgcacttatcattcaccttcattgtccaaaaatctgcttagtgtatcccaactttgtttggataataatgcctatgttgagtttcaccccactttctttcttatcaaaaatcaggccaatcatcaagtcattcttaaaggccttcttgatcaaggcatctaccgtgttcacccagcccctgcctcaacacttgttgcctccccacaactcctctacacttccaagaattctattgacttatggtagtctcgcttgggtcatccagccgctgagattgtctctcgcatttcatctacttgtaatttttcttttccaagaagagattgcctaactttttgtactacttgccaattaggcaaatctcatagacttagttttaacaactttgtatctcgggcttcaaaaccctttaaattaatacattctgacatttggggtccggccccggttacttccatcactggtgttaaatattttctcttatttattgatgattacacacgtttcacttggttttatcttctcaatacaaaagatgaagcattcactacatttcttacctttaaaaatcttgtttccactcaatttcaaagcaccattcaatcggttcgaaccgattggggtggtgaataccgctctttgtctcggttcttcactcaacatggcattcgccattatctctcatgtcctcatacacctcaacaaaatggccgcgtagagcgcaaaaatcgtcatgttgttgaaaccggcctcactttgttagctcatgcccatcttcctcttcttttttggccttacaccttctccactgctgtttatttaatcaatcgccttcctactcgtgttcttcattatgacagcccttattacttactttacaacaaagctccaaactattcattactctgagtttttggctgccaatgtttcccctttcttaggccttataacactcataaacttgagtttcgctcctctccttgcactttccttagctatagcagcaaacacaaaggctatctttgccttcatcccacctctggacgtctctttatcactcgtcatgtcatctttaatgagtcatgttttccctttgccactccctcggccactttaccaccctctcatgctcctccctccgtcattacagccttacctctctcggttcccaccaccacaaatattcccaatgttaccccaactcatccatctccccttaatccatccacacacatctcttctcatcattccccttctcctccatcgacccgaactcaaccatttcccacttccccctctacatctcatgttactcctattagtcctcccgttcatacaccctcctcacatacatcttcttcatcatcttccacggcctccccacccatcatccctatgatagtagatttgcaagacccatgtgctcttcccattgcccatactaatgtacaccccatgattactagagctaaatcgggcatcacaaagcctcgtttgttttttagtgttgccgcaggtacaccggttgagccatcaaactttcgagaagctagcaaagatcccaaatggcttgcggccatggatactgaagtggttgacttaaaatctcaaggcacatggattcttgttcctccaccctccggttttaaagtaattggttgcaagtgggtgtatcgcatcaaactaaatgcggatgggtccgtggaacgctacaaagctcgcttagttgccaagggctttcatcaaactcaagggcttgactatcatgaaacttttagtctcgtggttaagccgaattccattcggttggtcctctccttggccgtgtctttcaattggattgtgaagcaactagatgttcaaaattcctttcttcatggtgacctcaccgagactgtgtacatgactcaacccgagggctttgttgatcccgttcatccacaccatatttgcaagttaactaagtctctctacggtctcaaacaatcaccacgggcctggtttttcaagcttagcactgccattctacaatggggatttgttgcttctcaagccgacacatctctcttcatatacagatccgattctgtcatcatagtgctcttaatttatgtggatgatattattgtggctggctcatcttcctctactattgttgcccttcttacatatctctctactcggtttgtagtcaaagatctcgggcctctccatttttttctcggggttcaagttcatcgctctcccgccggttttcacttgtcccaaacgaagtatatcagggatctcctcactaaaacatgtttagttgacaccaaaccggtccctacacccatggattttaactctttatctctctatgatggtgagccccttaccgatggtactccttatcgcagtcttgttggagccttgcaatactgtacactcacacggcctgatatttcaccgtcaacaaactctgccagtttctccatgcccccactaccatccattaccaagttgcaaaacgagttctccgttacctgaatggcacggctcaccttggcatcctccttcaacctgatcctacaagagaacttcattgcttcactaatgtaaattgggcttcatgtcttgatgaccgccgcagcactagtgcttattgtatatactttggattaaacctcatctcatggtcttcggctaaacagaaagttgtctcacggtccagtacagaatctgaatatcgcgctcttgcaaatggcgcttccgaggtttcttggcttcaatcacttcttagtgaactcggcttccctcttgctgcaccgcctactatgcattgtgacaacatcagtacactacatctcgcctccaatcctgttttacatgctcgtaccaagcatgttgaaattgactatcactttgttcgtgaacgagtaaagaacgggcttctccaactttgctacactccctccgaagaccaagttgctgattgtctcacaaaaccactcactacttctcgctttcaggaactccgcaccaaactcacggtgcttctaaccccgtgagtttgaggggggat

SEQ ID NO: 24376 - DNA, 2330 bp, Cannabis sativa
  modified_base (2193)..(2232): a, c, t, g, unknown or other
  modified_base (2274)..(2298): a, c, t, g, unknown or other
tttttttttttttttatttcaaatattttataatgtacaatatttttatatttgtttaatataacaagctttcattttatgtgtcaaaatattagaaatgtattttatatatattacttttgttagtaattaattagctatttgaattttttttttttgttgagaaatttgcagttaaatcatcatatgttttaattagtatactcttaatcttttaaattttttttggtggtaatgcctccttatcttcaattatgttacaagtttgatacatatgttaaatttatgttaaatttagatgttaagtgccaactaagattgtcattgtgtacacatgtatacatatggctttttgtattggtctaattaatataataatataaaaattaaaaataaataaaccaataatatttttcttttatttttaacttaacagttttttttaaacaaataaataaagaaattaaaaaaaaacaaacaaactaaatccaaaataattaatctttaaatctaaatcctttactttcttctttctcactatctctttcttcctcagtccctctccaactcttctcgtgtaggggatggcggaggactccgaaggactgcaaatcacagagaagagacgagattgagatatctggaccttggggaagtcgtggtgctccattcatttgtagacggagaatcgcgttagagagaagggaagaatgagagaggaatggagctttgggggttctcagagatagagtttcgaaaagtagagaggtcattcgtggctagggatgcacatttcctcgatggggatggggcccgctggaacccgcccctaatgggacggggattccccgtctaaatgggaaacggggacaataattactttttgtccccgaatgttaaacggggcggggacgagaatcacactccccgccccgacggggacccatttagcattttattttatatttttaataatattttataatttataatgtatgtttatatttttttagtatattagtattcttttcctaaattttaaattgtgttttggataataattaatttattgaataataattaatgtgttatattttaatttttatgtaatttaatatttttatatatttaaatttttattataaactttatttgttttaggggattctccgcaccgaccccgccccctttaggagatttttcaccctattcccgatgggcaataagcaggaatagggacgggggagcactccccgccaattccatgtccattgtttatccctattcgtggcctttgtttgctcatcgatgccaagaaacgatcaagcttgatgggtagaagcgtagttgatggatgcgaaaaagaggacagagagaggttcagatctaggtttaatgatttttttcttccttttctatttgtttcttcattttttgtttattagattcagatctattccaatctcatattatttgtaaatttcattttgtattttgtgtttgaatttgagattgagattgtttaaaatacattgtggtagtggcgggaccgtaattgtgatgatggtggtggtggtgagtggtggtggttgtggaggtgttcttgtaatggtgattggtggcgttcatggaaatgatggaagcattagtagcaattttttttttaactaggattaaaaatatctgatgatggaaaattttgtttttaattatgtttacaatttaaaagtaattttgaaaattaaaactatgaaaataaataaaaaagttataaaaaataataaaattatttggatcaataaaaagtgtttcgtatatatatgtgtatatattcacaattttagttggcatttaactttaaaacttagaggggcttaacccttattctttttttttattatttgataacatatagggtatttttttggtggggtgtacgaaatagcctcaccagtagagatagaaatttataccgcggggatggataattgcggggacccgcccctaatgggatggagattccccgtcttggtggttaatagggcggtggtgggagacaatttcaatacccgaaacgggaatgaggcgggagcggggataatactatccgcaatatatccgaccccgatatagatatatataatttcttatgtattcttaacatatataatatatattgttgggttttatgcnnnnnnnnnnnnnnnnnnnnnnnnnnnnnnnnnnnnnnnntaatatagattagaaataacattaatgttgcatggttcacannnnnnnnnnnnnnnnnnnnnnnnnataatgtatgaattcatctaaaacccttttca

SEQ ID NO: 24377 - DNA, 5428 bp, Cannabis sativa
gggaccacgcctagagaatgaaatttattatatgaatctcaagtgattacaaaaccaaattgacttatacaaataaagactccctctttaaatttggcgcaactgttgtaatctattcttttaattaaatttctgaagtgtcgagactttgaactcccttgaaatcgtagtaattgcacacctcatcctgaagagtgactcacatgcaatcttcctcccaaagggtgtccaacttgaaatcttcctctcgaagagtgactcatttgcaatcttcatcccaaagagtaactaacttttagtcttcctcgcaaagagtagctgacttgcacttttcctccccaaaaaagactcacaaacaagatttctcctgaagcttgatgaacaatatccaaggtgttcaacctgcacaatttcaacaataagcaatacagaataacacattaataaaatactaagaacttgttggactcaagttcttcacacaacaaagaaaatactctttaaatttaaaagtaatttaggaaatgatacaccaagagagctaaccaataccaacgacctaggggtatatttatgcactttaaaaaccctctaggtcgtggtcaaacaactaacaaacaattaggtcaataaatgaaaaatcttcccaaacaagaaagacaaaatctatttaaacaaacagtcaatctgttcaaataagtacattgaaactggacaattttttaagatagttttcttaaacaaataaggcaactttgacaacctttacacacacagttgtacacggtttcttggtcaagaaattagataaaaaagaagtaaatatgattaagaatttccttaaaaatacaaagataaaatcaaatgttctaaataaaaaaaactcatatttaattcacaaaagtcacaagagaatagaatctgattttgaaagccttttcacactagaaaaggaaactatatcctcaaaaataataaaaacacaattaaaatcaattttaaaatactacaatattatttttgtctattttatcaaatataccaataaaatattttacaacaggaataatgctatcaaatggaagtaattttcataatttgagtacaactttatatgtgtacaagttggaaaatttataatatttacaattttaaacttatttaataaaaattaaaaataaaatatatatctatatcaatatttattatattgtttataatattgttattcatgtaatgtgttaaccccaaaaaattattaagtataatttttggagactctagattaatgagagggaaaatcccaaagtacacttggaaagtgtatgagcaagaaaataagaggccaactaccttggcgagacaccacacaagagggagagccaacatgaggaggggccaaggcaagggttgagctcctcatgccatacttcccacactggagctccccgctccactccctctcttcccgctctctctgcgtgttctcgctctctctctctccccgctctctctccatgttccctctctatctccttgctctatctctctctctctccccccattcctactctccctccccgctctgtctctctcagttccctctccccaatctctttccctgttccttctctatcacccttgttcccttacttactcactcactctcctaatcaccacctaacaccacctgctctatacagacgagcaataatacttagagtatatatgttacaatggtgtgaccaccaaaaaagattaaggagaatgttcctactaagtttaaacaacaagactcacctcccataaaacccatcacttagctaaatttcctaagttttatacttgtaccatgagcgtaagctataaagagagggatgccaagggaacagaccacaaaggatgaagtcgttaaagcatgcacacctttgagaaattagtggttttacaacaagtacaagtagaggagacactatttttctcactcggagtaccaactgacacccgacaaccacctctccactacccatctgacatgttgatcttcatggcacaaaagtaattttgtcccctagtttttgggaccacttgctattttggagctattagagctccctataaatacctctctcttccatggaagaagggattggaaaataattatttgtaaggaaatttaaggattcaatacaataccagttttctccattaatgttatgagtttgtcttaagcttttcatcttcacccttgtgcattttattttctaactaaagtttagttgatgagttcttatcgtcaacagtttggcgacatctgcgggaatgaaaagttctagctatgttagttcatcaaccattcactataatttttaagatgtcaagacattcccatcgtctctgagaaaatggggttcactcagatgaaaaccattcagacaccatagtaagagaacatcaacctcctatcgttggagaaggccaaagggccccctgcaatacgtgacttgataacaacatcgatggctaaccttatcgatagaagtattcaactatcgagaaggccatttctggtgtggtgccttctaccatctgtgccatcaaaccctaaaactttaaggcattggcccaaaaaggaaaagcaagtgtactcaatgagttcaagctcctaggctcactattatgaagtggaaataagtgacctccattggaagaacaagaagctagaaagtattgtggctggtatgcaaaaagtgttgagtggcatactcaaaggcaaaacccaagcatcgcatttctatcacaaaagccaccgagtggggaacaagatctcaactgcatatactagcaaaggtaattccatgtcatcccttaatagcaccccaagagatgaacatggaaggagattgtcgcgagagaagagcctaatgggccagttgaagcaactcgagcctacccaccatgaggagatttcattgaggaaaacaccccataacctaaggaagagacttcacccaagaggtctcatactagggggcacctcgtctatggttcctccaagagcaaggtaagcaaaaggccttgtccattagctttagtgataattcaaacattgattggacaagaggagtacctctcatgggcccaatgcaaaccacacacccatgttctacctacaaacctctgagagaggatgagcaaaaggatgaaggagttggaagtagaaatgcaagacctacgtcgaaagatagctttcgccacacaggaagacttgaatgatgatgaggagtttgatgaagaatcccctctctcgagggagattaaaatagaaccaattccaccaaacttcaaggagtcgcggatgacagcataagatggtaccactgatccaaagtaccatctcagctcatttaatgagctaataaagatgaaaaatgtgtcatgtaaggcaaggtgttaatatctcatgatcacataaaaaggagtcgtgtataaatggttcaaacggctaggaccggggacgatcacatcttggaagcaacttttagaagaatttctccaacaagatcaggttgcatgtgataacattatgcttgtcagaagtatcactaatgtgaagcaagggagaaaagaaagtttgtgaagctacatccatcgcttcaacgcgaaagttaccaacgtagggaaagtgtctaaagatgatctcaagtttgccacaaccgctggagtatgccctggagatggactatggggaaatatcctgaaagaatattggatggcttagaaaacttctacaaaagaccagagaaatacatttgtgtggaggaaagaaataaagtattaagagaagatactagtgagtgttcttcgggaagcttgtcagatccctacaaggtctattagacaataatcataagtcgacacattcaagtgaagccttcaatctatgacccttacaaattaaacatccaagatgctcctcgaagtaaagttctaccgtacgagaaatcgttcctagcaatggcaagtttacctttagtacaatacactaaattaaagaaggcacttaggtggacctctgaacatatcatatgtatttggaaaatcacatattttctttatcaatgaaatgttaagtttttactttacatatgacattcatcactccttacatgtctatttaacttgctcataatacttgtcaattaaaattgtcaaagtgaacgaagaaaaaaagaagaaaaaaaataggactgcagggattgactacccctatcagtcaaagaaaagagtgaacgcccaaatatagatccacaagaaagagcactgcaataacaagggggtgctcctcaaagttagtcatagagcacgcgtagggaaacaaataaaagttaagtgcaaaaggttgagttggttcacagaaccatcatctcccttaaaataagcaaaaggttgagtcggttcacaaaaccatcatctcccttaaaataagcaaaaggtcgattcggttcacaaaatcatcacctcccttaaaatattgaagcaaaaggttgagttggttgacaaaacccgcatcacccttaaaatattaaaagaaaaaaaggaatcaaatacgaatctgagagggaaacctctctaaaaggattattaattttctagcattcaaaatgtgctataagtaccacagatacaatgtaggggttgagcgctgcctaagaggccacaagctcccccaatacaattttaaatctagaaaaaggtcaagcattgcctaagaggccacaatctcccttatatccaacgagtaaccgataagaggacaagactactctctaccctaataatcactcaacgaaaaggttacacttgtgataaataccaaccacaaaagggatcgagataactcgtaaagcctacactctcccgtgaaggataacgaaaaaaatgaggaagaaaaattaagtcgtaaagataaaactcaccaaacttagtctacaagaatcattgaaagaattcttacagattagggggcaagtgttgacccctgaaaattactaagtgtaatttttggagttctctagattaatgagagggaaaatcccaaagtacactttaaaagtatatgagaaagaaaataagaggccaactacctaggtgagaaaccacactagagggaaagccaacatgaggaggggccaaggcaagggttgagctccccgcgtgaggagctccccatgccatattgctcacactggagctccctactccactccctctctccacgttccctctctatctcccagatttctccatattccctctctctcctttctctctccctgttccctatctctctctccctgctctctctatccgttccctctctctcacctccattcccactctctctcacatctctctctctctctct

SEQ ID NO: 24378 - DNA, 2850 bp, Cannabis sativa
gagagagagagagagagataaatgtagtgtggtagtgtgagtggtagtgtggtacgagagacggagagagaaagattaatattgaaattgaattattgattgtgagtggtggtgagtaatgagctgtgagaggtgagaagagaggagtcactgtgattgataggttaaatcaatgaccttttatttattttattaataatttaatattttttttaaaaaaaaactttttgaaattgttaattctgacaaaacttttttaaaaagtaacgattatatatataaataaaaaaagtttaatatataatatattatatatataaatgttagatagattggtatattaaattaaacggtcagttacaattataaccgccagcctattagcaaaaccgtaaccgaccgtcatttacagcggtgtggtcagtttttttttcaaacggtttcggttatgacgtggcgccattttctcggttttttaacagtcagtttactggtcggtgtcggttttgcagtttgaatgttcacccctagtttggacctgaaatcaccaaacttgctgctgctaatcggtttagtgaagaagtttgcaatttgagctgaggcagggatatgtttaacctgaatttgctttagtgaaaccttgtctcaaacaaagtataggtcgattttgattgctttgttcggcatgaaacacaggattggcagccaagagaacagtgctttggttatcacaccacactgaaggagaagcaggaatacgaatgtgaagctcttgcagtaaggattgtatccatacaacctcagtcacagcactagcaaggctttgaaactcagcctctgttgaagatcttgatatagtgacctgcttttgtgacttccaagcaattagattacctccaaaatacacacaataaccagtggtagactttctatcatctaagtctgatgcccaatcagcatcacaaaacacttccaaggcaaaatctggagcaggtttaagataaaggccaaagtcaagagtgcctgcaatatatctcaagatcctctttactgttatccagtgagaaaggagaggagcatgcatatattgacagaccttgttgacacaataagaaagctcaggccttgtgattgtagcatactgaagagcacctacaatggatctgtaaagggtgatatcaggtgctggttcactgccataaccagacatcttgagaccactgttcatgggagtggaccggggattgacattttgcattccagccttggtcgagagatcttgaaggtacttggttagagagatggatacctgctgtagttcttgaaacttgaatccccaaaaaataatcaacaagaccaagatcctttaaagcaaaggtgttgctgagatctgtcaccagatcattcactaagttgtcattggagcccataataaggatatcatccacatacacaagaacatagatgcagcaattggagttggctttgataaacaaggaaggatctgacttggaaaagtggaaaccatactgaagaagaacattagagagtttctcaaacctgaagaagatcctttaaggccataaatggcattgtttaacttgcaaactctatcaggatattgaggatcttcaaacctgggtggttgaatcatgtaaatgtcttcttgaaggtcaccattgaggaatgcatttttgatgtcaagttgtctaattacccacccatttgtaacagcaatagtcaaaacaattcgtatggtaatatgtttgacgactggactaaatgtttcagtaaagtcaaagccaacttgttggtgaaagcctttggcaactaaccttgcttttagtctatttacactcccatcagcattgtattttattctatagacccacttgcatccaataggggttcggtctggtggtaaaatgacaagatcccaagttctgtttttgctaaggctttcttttctgtgcacatagcattgaaccaatgaggttcttgaagggcttgtttgacagtcttgggttcccaaaaaaccagaaacaccttgggttttcgaatgccagacttggacctagttgtcatagggtgtttggaggtagtgggatcatgggaaggtgcaacaggaggatgttgattaataacaggtacatcagtaactgtattgacaacactggtagagatgtcttgagcaacagtaggctgctcagatgggataacagaggcagaagcagggtgacatgggaaagtacttgtgctgacacttggtgagtgagatgaaggtggagagagatgtggtgattgaatgggaagttgagtacagagcagaatgggagggataccagtggtggtgggagtattcacttgagtagtgtgtgaagatggggaagtagtgttggcaaaggggaatttggactcatcaaacactacatcacgagagatatacaacctcttatctttagagagacacttgtagcctttgtgagatatactgtagcctagaaaaatgcaaggagtagacctatattggagtttgttcttattataaggtcttagattaggatagcaaagacacccaaaaactttgagttgtttgtagtctggtttgacagagaaaagaagctctaaaggggtccaattttgaagagtgggtgcaggcattctattgattagataagtggctgtcctataggcttcatcccaatatttaagtggcaaagaggcttgagcaagcaaggttaagccagattccactatatgcctatgttttctctccacaactccattctgttcatgagtgtgtgggcatgcaagtttgtgaatgataccactgtgttcaagaagagtagt

SEQ ID NO: 24379 - DNA, 3850 bp, Cannabis sativa
gtcgaaataccacacccaataacactgttgttcagaatacatgtttgtaatataatcgtacaaactgtttataatttttctatgaaaagaagatgtatttctcttgttggttttgatgcattatatagggaatgcacaaaaagtagtaacggaaaaaaagacgtttctgatcatgagaacgttaaaacaagagatcgtaagaacaacattgaaaatcgaaacaagaaaatgttttcgtttaccaattaattaaacacatttaaaaactgttttaattaattaattaaaaaataataatttaataaataaatttttttcaaaaaataaagtgcaaagctcaatcgaacagtagcatgcgcagtgttcagatgagcctttgtatgattccttccttttccacaaaaatgagtttaagcccaagccaattgctcatatgatcatatctatattatatataaacttacaaataagtattcccaagaaatagactagtcctcaaagaacttcaaaatgcacatttccattttttttttttttttttaacaattcacatttatgttccaacatcaacaactacattatccaccatatgtatgcttaaaagcatatccaccatatgtcacagctcacgactcgcgagattgaatgagcccccatgaatttttttaacacattctatgataatgatatatttgtttaaattatatactgaaagtcttttttttctcttctttttttggttgcattcagtaaacataagaacactatagcaactccaaattaaaatttccgaattactccatttgttggaaacttgtacgtcagaatcaacttaccttgatcagagctggaaaagtgaagattaggtaggctaagtaaaagaacaaaaccagataaacatgtctttaagtatctcccttctcaacttttctgcacacaagaagcaccaaggtgagaaaaatgtcctaccaaattccagttcattctgataaatacatcataactaaattggagtttttaatgcatactcgaagatggaagttccataaccgtgccacaaaataatcatttaaaaccagacacttttctggctggtgataacatgcatcatttcagtcaagaggctgagctttagtaaagacaaatactcctcctccaccgactgagcggcccaaaagcatgttggaatccaagtaagaaaggtaatatagaccacctactgatcgtctgcaattcgggtatgtttaagttttaaatttaacatgcatatctaggagggaaatgttaaacaatgttcatgataacacatgttgtaccttcctgaatctgtcgcagaaagagctctatttgttactggaaattgagctttgaaagaacgaaggaactgcaaaatctgtaagagaggattcataagctttcatagccagaggtagctattttcttatcctttcaactaatgcactccaatcattagataagttctcattcttgactatagaatagcataattctgtaattgacgtaagcagcagttgaaatttgctaagatgtaatagtgctaaggttttattcattcaggaagcatatgatgaaagaaaaggggtctgaaccttcatgtagaactttatttgcatattggtaattatgaactaaacttcagttggcattagagctttaaatacaatccagtggattgaagatgtaatatcaccatatgtgaaaggaaatgaacagaacaatgtcgtttaatattatttacctgcagacttaattagatcacatgtctattctaaacgataaagaattttatatatatatttactaacaaacaaacaaacaagaacaaaatagttatagcatggtagctaattagaaatatttccactatgttcatagatgaaaacaaaaacgagcagttttgttcatatcccctcaataagatttttcattttctcatgaattctataactgtgtttaaatatctttaggagaatcagctctttgtttattaggtgacttagttcatttgctctatatgcaaaaattagaatttagcagttacgatttattacgtactttcgttgataattgagtacgtctaattggaaatgaatgaaattgtgtagccaaatttgtattgaaacagaggatattactttaaaagtaagtacatagtaaacttatcttactgtcactgtaactgtttgatcagtctcttactgtcaaaaaaattaattagcagattttttttcttctcaatttaataaactaacattacttgatatcttatacttgttagtacagtgtaattactatgatgttggaagacatgtgatcttattgtaacttagtgatctatttgggttttgaaatgggaaattgattttttttttattctttaatgggtgcagtaaaatagtgaaaatgatttttggctcagcttattgtaaagtaaatattcccaaacctacatctatagatagtgttctgctaggttaggaaattgaaatagcatagacttaattttcaattcttcctcattcgtttactatagatggtgatcgataagacttggacgacattgaatcgttgtgatcctgctttctggattggtctccaagcttttttggcaatggcttcacaacacgtagattgtgatgggagaatcaaatgtccatgcgtcgaatgcttgaatctaagattgcacactttagatgttgtgcgggctcatgtacacagatggggtttccaacaaagttatcaacaatggatttaccacggggaagttgaagtgggtgttgccaatgaggaagtggatgataatgacatagatgagatgatcgacgtcattgatgattttctcccattgacaaatgatgaagaagtagccggtatcgatgggagtcgaatgggtcggtattatgacgagttgttcgaggagattaaagctgagttgtatcccggttgtaattggatatcatccctaaactttttagctaagctgatgcacttgaaattaaaaggaaagatcccgaacaacatatttgatgaattattgaaactattgaagtttgcattaccaaaggaaaataaaattcctgtaacacactacgaggccaaaaggaagctcagccgactaggattgggataccagtccatccatgtgtgtgaacatcattgttgcttattttacaatgagcatgcatctaaagattcatgtccagtctgtgggagtagtagatggactaatgatgagaagaaggagggaaacgcatgtatacttcaagacatacagcaaaggagatgatatggcatcatactggaaaatcaaagaaaaatgggctaatgcgtcatccagttgatggaaccgcgtggaaagactttgatgtcaaacatccagagtttgcaaaagatcctcgaaatgtccgtttaggcttggctgctgatggatttaatccatttggcaatatgtctcaatcctacagcatgtggccagtggtgataatagtactacttgtttgtactgtagagcaataataatagtactcatcaacaaaatcttaatgaacagacccttgttaagtactacttgtttagtactaaacatggtcttgtttagtactaaacatgggatatcaatatcattttattttcttccactctattatttcattttctgctgtaaaaaccatttgttagtgggaaagttccttttagttttctttgcttgtgaatctgagaatcagggagagagcttaagaatgatgaactcagttcttttttctttatttaggatcccttttgtgcaatagttgttcatatctcttaagaaattaatgccaatgttatt

SEQ ID NO: 24380 - DNA, 4107 bp, Cannabis sativa
ctttcaatagcaattgtactttagattggtatgtatgtatatatatatatatatagtcttgacttttctcttaggtcctcttttggtagctaataaaagtttcttaaagctaaaatagacattaaataatcacattttgatgataactttgacaaattaggattcaaatatttttgttataaaaagaagaacttttccaagattcccttcaaaatatagaatagcaaaagctcaaaaaacaaaagtaaatgtcttactcaaccaatgtgaaattggaaccaaaactgccttcaattcatagttcatacctaccaaaaggctttatctatataaccttcatatatgtatatatatatttctctttctttttatatacttgaacaaaaaatatagtaaaactcttattatagctatataatactctcaaattgcttgccaaagaatatgaatgaaattaactcttgatgactctatttaccaaatttgtttctccaaaccccaagcatttcctcctcggcccgaaccactttggttgttattaaccggtgcgcagttccactgcctcctcctccctctatatccatattctctctgctgatagtgattgcccgaaaatcttgtttttcgatagccagagttctgccaagcatagtcatcgttgttcttccaaccgttcgtattccatgtctgtctccgttccctagaagaagtatcggctttgaaatcttcttcagcatcaccccatccagttggggcaatgtggtcaaggcttaggttgatctggttgaggttatgaaggttaagaaccttctcatcgtgattagtgtaatcagacggttctggttttctctccaaatcaagaagtagctcgggatcaatctccgagttccaatcaacttcatcaatgtagatatctggatcaggtaatactacttcagatgcaaggccattaatgtgtgcccaaaatctgttttttgcttgtctgaacgcctcttctgaggccgaatcgttccattttacaatattctcatgtaaatgaatgtactttttcgtgtccaatactttcctccatggaactgaaccaactgtgtaacagaaatccttttcccatttcggaacagttgactgccaaatctctacaaaacataaccgaaaatcagacaaaaaatgctgcaacttagtactaaagcaaacaacaagcacactcagaagacatttagatagattatagatatcaatatcgaaattaaacaacttaaggttgactgtcaaatctctacaaaacaaaaccgaaaatctgacaagaacctctgcaacttagtactaaagcaagcaacaagcacactcacaacacatttaggcagataatagacatcaaaaccgaaattaaacaacttaaggttgactgccaaatctctacaaaacaaaaccgaaaatcagacaaaaacctctgcaacttagtactaaagcaagcaacaagcacactcacaacacatttagacagataatggatatcaatatcgaaattaaacaacttaaggttgtttagccaaaacgaaagtgcagacaacaaaacacaacataaccgaatcaagcgaaaacccgaatcaacagagtactaaagcaaccaacaagcatactcacaaggcaattatgcagataatagatatcaatatcgaaaatcaacaacttaaggttgtttagccaaaaagaaagtgcagacaaaccagttgcatatacacctaacttcatactgattcagacaattcgataactcttccttaccacattcctatttgggcaaaattcaggcctaattagctagcattggcttttcccaaatatagacattcctaaataagattcagtgctattcttagttaaaaaaccaatctcatcaaatttctcctccaacatagattcttcttcaggagtgaaatttgacaataactatgattcaattcaaacacttgtacacatgatcagtcacaattcacaaattacaatatccttaaaagaaacataatctgattttaagcaattctcaatatctgtagaaacattcaataaaggacttaactttttaccaaccccacaacccttttaacatgggattgattgaattcattcaaaaactcaaatctcaaaaaggaaaaagagaaaaaaaaaaataataatcccagcaaaagggataactcaagatatgaaaaattaaaataaaaattcaatctttaagagaatcaaatatgaaaacaacaaaagggttaacaaataatacataccagtaggttgatttctggtctgtgatctcattccatgattaaaactttctacatgttcttttcttctccaactacccataataataacaaagattttggtctcagaaaaacttgggtgaaaactgaaaagatcggattttgattatacgggaagatgtgatttttaaatataagaaatgaaaaagaaagtaggaggcgttagaaagaaagagaaagatgaaatttttgtatgatttgattatgatttttttgttattgtttgggggagaagtgtgtggttttgttgttggtatttatagtcaaagacagagtcgccgccccttgtttttgtttctttcttaaaacatattttcacattctacttcgacacgtgttgaattagagataaggaaaatttaaggtatccgacggctgagattaatcaagaggtaattagggttaaaaaatagtaacgtaccttgacactcataccgtgagattcatctaatatactactaaatacattccgtgaaagtacatcactggacaaaatcgtttccctatatatatattttgtgttttacaccatgaaatttctaacttttttatttttattatggggtagatttttttttcaaaaatattgtgtaagttttatactgtatactgtgttaagtttacattgttgttccacatttgttttttaagttgttccactattgttttaattgttttattttgttgttttataaaaagacagtatttttgttaaaaaaaattgtgtaacaataaaattgtaaacttttatccaaaatttagtatttttgtaaaagcccctatttttttagcattactattgggcactagcggtcagcacattctatagatagggtcctatgattggttaataatatttcttaaaagttatcttttttaacttatataagactcaatacttaattacaccaatagcagtatgacaccgatgaaggtattagagactagtaatgccttttagcaattctatttttttagcattggcactattagtgtccaacaccttctataagtcatgtcctacagatacagtcagccctaaaatttagtgggtcatagaaaaaaaaaatatttttaggctcttatttaaaaaaaaatatggtatttttcaaagtttataaaaaaaaaataatgtaaattaaaaaggagaatatttttttttgggccctaggctaggtgggcactaagcacaggcctagccaacctatgcataagttattgtcttaaattatatgagattcgatacttaatttcactaatagacaccaagaatcgtgttagacattagtggtgtcttttattatttctcttttattttttcaaaaaattagataggtgtgtttgaaaataactctgtaattactaaggtcgtaacactaaaaacatgtttggaaagctaactatgtaattagaggtaattgcatgattctgcatgtttgcctgaccatgtaattacattataactgtgtaattggtggaggtgatcgaggggttctaattacacttactataacttttcctttttaaatattaactaataaaaagtattattttcttgtgtaaacactaacttttttgtcaaacaatatattagaaattcatatataattaccacttcatatctaattttaaaatataatgtaattactagactgtgtaattatcaccctagtaattacaagttacttccaaacacaccctaatattttaaaatataaagtgtgtttggatacacggtggtatgaattctttaatttcttgttcaacaaaatagttagtaattacaaaa

SEQ ID NO: 24381 - DNA, 7470 bp, Cannabis sativa
  modified_base (4931)..(4936): a, c, t, g, unknown or other
atataggtggcacttagaaataaatagagcataacaaacttcacttaccaaatcgttccgaacattcagacgatcattttcagtttcaaccttgaacttttccaagtagtagttttccttccaatcattttccccaaaattaatctgtcaaagaaccaaaaattttaaactatgagcacaaaacagttcaaactaatatacaatatagtaccttgaagtgtgtcatgtatacacctttttaacttcagtagatgtgctaactgatgttgtattgtctggtgcttgcttcatcatagcacttgactggctcaaattagatttcatgacattaaaaaataacaataataaaataaaattgaccgtggaaatatgttactgttcaaactcaagctcacaacatactcacatttactgactttgaacccaaagatgtctctgtaacagttttattctgtgaataacgttgatcacggatagcccattcattttctacctgaaggataagcatatacaaataaaccaaataagacagcataaaagcatcgaacaacggatctactaagagatatctacaaatcagtaacataaaaacaaagattaacaaaagctctagtattgatgcagcaggatgttagtaacaaaagatcaatttgattttcttctaattaagaaaaatataagattagcgagcaagtaaaccagctgactacatattgaaaaacaaattactaaaagtagtttcgcattaaaaacaatatggaaaaacgcaatggtcctaaacgtgattgggttactccatttagaacaaattgtttaagatggaatccgatacacacttgtgcaccaattcagttcttgaaagaactatgaaaaggtagtttattaataagagcaagaacaaatacaaaatcccaagttattcgagaaacttggtaaactccctgagtaatattttactctgaatatttcatacaaaattcacacccctctcacaagactagcactctctatttataagctaaactaacaaaaaatcttaactagccaaccaaattagaagacacaaacttagaaacgctgaacacggccgctaaagatttgacaactcaacttccataattctaatgagttgtactagcgagactaacattaaggcctaatagaatctcaatccttctctacaaaagtctatcctttcaaattgtaatatggtgttaaagactttaagttttctcatttctccatctttgacctctatttgggaccttcaagctgatgttagtcaatttcttttatggattcttcgatttgtttaaaaccgattcgaatgatgtgtatacccacaagttccgtaatccagccttgtggaatttgaatacatacacagatttcttattgggctttgatggattctctcaaataccactttcagtgatattatgtttaaattcattcactaagtctacattcttggtgccaaacataggagggtctattaaaatagtcctatattgaaatgtgccatcagcaatactcgctctcttctcataatctccctcatgcctcgattgatgttatccatattctatattatcccatgaagttcagtcatcgcattaagctttggcaagtgtcttagagtcttaatactcctgactatatttggatccataatctaattttgtacaacccacaatagattctcaaaattaactaaatttaacatatatacatagcacaaataaatcatacttacttggtaacaagttgatcatcgcagatatggtgtatatatcgtgtgaatttggaatcgatataattgtggctctaataccattcacaatgcccctgcttcaactgcgttacacagttgtgatgattctaagactgtttaggtatgggactacccagctgaaacgagcattacacatctgagacgggggagttacatggtaagagtcacaattatatcgaccctaaattcacaccatacacaccattgttacaaaggatcatcttgttgccaagtaagtatgacttagttgtgttatgtattatacgtaaaatttagttaattttgagtattaattgtgggttatacaaagtcagcttatggatctaaatatagttaggatcattaatgctttaagatacttatcaaagtctaatgagagaaatgaactgcatgggataataaagaatatggatagcatcaatcaaggcataggagagactatgaaaagagagcgggtaatgctaataacacacgaaaaatatttagttatgtcccactcgctcaaatcgaaggaggcaaagactcacttaaatcaaagtaaataaatatgaatattcgtatctagaatatttgaagtatgacacattgattaagcgtttcatcgatactttttctacattggaattgaaaatgaatgaacaatgtgttagaaccataaactacctttcacttgatgaaaaacatcatgacccttaaactgccatccaaagacactagcaagcatttatcttgctccaaaaaattttgattacaagccaattacaagaggcactttagaagatggggtctgacatagaaggccctaacgaacctaaacagacggtacaaccaccaacaaatcctaagcatgtggaacaaaggatccataagaaaatccaaatgaggaatatatgtgtaactttatttaattttctttctcaaaagttgatttttacgtaagaagtttaatgagcctcgtcaatttaatttcatttagttaattcttttggagttagagttttattgtaagtatttctattatatttttttatcttgaatgaataaaagattagattatttatttattttagtttgtgatctattgcttgagtaatatatcaccataaattttatttaatctattttagtgtaaagaaccttcattttttgtgttagaataaatatttctctatttaaccttcatttttcgtgttagaataaatatttcactataaaggtttaaatggattgataaatactacttatgccagcaaaatgcattttttcggtagcccatcacttgaaaactccaaagtcaagcatgtttgatttagagcactcttaagatgggtgacctagaaagttttcctaagaattggagcactcttaagatgggtgacctcctagaaagttttcctaagaaacgtgcaagtgaggataaagcatgctggaaatactcgtgttggtttataggattagtcgacattttaggaagcacccaaagtaacgtacgtgtaactatggaactacaaaactgaagcacgagcgttacacaagagtcaataactccctctccacacattcatgattcaatcaaactaaaatagagtgagataacaagtaagcttgtccaaaaaacttcctcaagctccaagataaaataaaaacgatcaatgttgattgtaaaatacaatcatcactcatgaagagaacaaaaaattcatagacattggactccaagtgagtggacatttaaaattcaaatctcttatttatttctctttttcttttttcttatttatttatttattattattttattttattttttttggttcaaactccataaaacaaagtggacaagattattagagctaattgtcatcgaatttatttatttatttgtctattttgaaatgcaaataaacgagaagtaaagcaaaggatcttgacaactatcaatacctggacacgtttttgcaagattaatccttcataagatcccaccactcctaaaaaatgcttcatcctttccaaatttacctataaatttttataaaataaactattaaatatatgtactcgtgcaaaatctattaagaatacaaactttacacatatcaaacaaaatcataagatcggtcactttaagaacacaaattcctatcagatagtagatataaaagaaacgtttaaatcatactcacctcaaaagaatttgtcaggtaaccacccattgttacaaattccattttatagattgtcagaagtaattcaatagccccctgagagatgtgaagcacccaaatcaagaactattataacaaacaaatattggataaagtaagaaaagtaaaagacaaaccatggataagacatacatacgtaacactataatatcttaaatagttattgtccatggaaaaatgtgttggagaagaaaattcaaaagagagacgttatacaaacatgcataaactaaccaatgtgacaaatcaacagtgaataattaaagattcatttattaggttcatgtaattttcagcaaaaaaattatatgcaaaggttaagagatcatcatataagtttgagtgactgaaattttaagactcaaagaaaaagaactttgctcttgtttaaatctcattttgtaaaattttagaattcaatgtataagaagcttatgaggacaacctcagatatttccaacgacggaatgtgaggtagaaagtcatttcccacaaacaaacacatcaaaacgaaatcatcaatttggcgctccaaatctcctttaacatctgggatttccataagatatgctaaatactccctgaggatccaaatgtgaagaaactgtaacacaaaatggcaagaaaagaatatattagaagaaacactatggtggcatttggttgggaggaatgaaaacataggaatggaataaaatttaaaatgcataaaataaattgataaaaaaattattaaattttttcttatcatgcattggaatggtgtttcattccatttcaaaatggaattgtcatcccatcaaaatggtggaaaggtcattctattggaataacattcaaacactttaatacgcaaccaaacaaaataatggaatggagattgttttctttcctttccattccatttnnnnnnctccaaccaaacgccacctatattcttatggccacaacacacacgtataatgtaaaatcttatatgaagtatcagataacaagattgctttagacacttgaagttcaaagtggtaatcaataatgcaaaaaaattattggcaagggacagaaaattacctgaaatttctggtttgagatatagctatctagattccctttcaacaagcccgtaccgtttctcttattcatgtacttggattttacaaatttatccttcatgacatcctacatataccaaatctaaaattaaacataataataaaggacaatgataatgagaaaactacagtaatgtttttagttacttttgaagaaaaattcaacttgctcatcacaaacctctctcaagatagaaaaatggacctcatgggatgctagagcaagcatgataagatctgcatcctatatcaaattcaaatgttaacatcattagatatcccatattgactaaaatggctacgctctaaatgaaaggaatcatcaaattaccaatccatatagacaatgccttgtatttggatcaaatccaggcaggtttctttgcaaacgaatgtaagacattatcttatgctccccctcgcccggtacactggcatccgaaagtatgacctgcaaaaccatcatgtcaataagttagaatccatatgctataaagaaagagagaattgaataaacaggtaaatatcacgacagttaccttgattccctgccagtttggatcctcattcattctcaagtaaatgtaatagcgaagggctgaagacaacaatgccatgaattcagacccaggtgtgatgacatttgaatcaagtttacaagaatcttctattgactgatttttaagcttcactttccaagcagcctgaaagaaacattattaaaaacagttatgtttgatacagagattttgtgtttttaattctatttgttcatgtaatctatctttgattgtgttcctaataatgaatattgggtcataacagatatcaatggcaagtttcagagatcaaagacaacaaaaacccacctcctcagccgcatccttagcagtcctgaatcgtcgcgacctttgttggttcatcttagctcgaggagcaacaccatctacagaaaaaattaatccaaaacacaaactttcaaacacatttacagtttttttgcagaatgttttgtgaaaaatagtcattattaaatttttaattatgaaaataactttctaaaaaaatactataagcaaaataaacatattttgttgcaagaagaaccaaaaattacactatatggtcatacaacaagcaaaagtccgtttggtacaccgtataaaatcatattatattgtataatattatattaaattgtatgatatatcatactttttagggtaaatagcggcataagtaccaaaagtttaaatttataaacagtataagtcccatgtttatttttttcagcaacataagtacctaatgcttgtaaaactataatttttctccaatttcatcaatacaaactctgttttgaatttattaaaagaacatttaatactatatgtttctgtctagacccaatgatttagaatttaagccttatatatgtcatatttaagacaataattaataaaaaaaacattttacaaatattgagcagtagatttataccacttacaaatttgaaattttgagtaagtatactgctatttaccttactttgtagcactatgtttggtattgcatatacatatagatatatatacaatattttgatataaatcaaaacttaaaatagtattaataaaatctaatatggcctaccaaacgaaacaggcaaagaaaaccaagatattccaagccaaacaaacagacagagttgagtttcactcaccaattgcaaggaagagtagctttttgggtttagcaacagataaaagcttatcaatatacttaaaaaccgcttgaaaaacctcatcgtaggtcttcggagctggctgtggagaacaatacacaatgctcaatcaattatacaaacaataatacatatatatattgtaagtactatataaggcagcataccagtccttgagggtgaaaacaggggtggatgatgccattcatgtcgaggtagagattgtcgaagtccaagccattgattggggcatcgattacagtgcgagggaacttctccactaaccatctgtaaaacgaaggtattcccattgttgttgctctgagatgaatgaacgaacctcttacgtcctctgaagtagggtttaacaaataccttttggttgtagagtctccagacccatgcccggcccaggcccaggcccggcccagcccattctgttttgggattatttcaagagatttttacacatacacaagaaattacattctatattctttttatattatcctcttttatttttaccatcttttttaaagtctattatttttacctcttttttaaaatattgtaccaattttgcctttgtca

SEQ ID NO: 24382 - DNA, 4047 bp, Cannabis sativa
tatgcatggaagctgagtggaactctccttctaggaattcttaaaaatttctacaagtcacttcttttgaaaagttattgttgtagaaatagaccactagggggggctataattagctcaaagctttgaacttttctagtgtatataaaggcttagcgtgctgactatgtgttttgcttcactttaggttcaaagaccttaaaccctttaaattttccattcctttaaagaaaaaaaaaaaaagaaaagaaaatagtttcttctctatgtctactaacagttgtaaaagctcagcaaataatacaagttctagtgaagatgacggtaatgagctcagaagaggtccgtggactgttgaagaagatactcttctcatccactacatcactcgccatggtgaaggccgatggaatttgctagctaaacgttcaggtaatataattcttaataaacaatactatacctttgattaataaaattaaaggagttctctttgtacaattgatttataccctatcttataatctctgtgggattttactgtaatatatataaatatatatcgaatctttttaattcaggattaaggagaactggtaagagttgcagattgagatggctaaactatctgaaaccagacgtcaagcgtgggaaccttactcctgaggaacaaatcctgatccttgatcttcattccaaatggggcaacaggtagttatatatattttaaaaactgtagctctctatctaatccaaattcaacttaaaattatatataatcaatatcttgaaaaaattgtgcttaaattgataagcatgcaaatatagaaaacaaacagtagtacgtgatacttatctttatcttgacgtcaccatcaatatttccgtatcacaacactatctccatccagatgaatccaattattccaaattttgttgtcaactgtaacattaacatgtataattgagcgcagacccttgaactcaggggtttggtctcctcacttacacatatgtatctttacattgaattttcacatgcgtccactacataaaaattaatttattttattatttttaactattatttccatttttctgttagtaattgttttacttatagctttcccgttaagaaaaaaaaagaaaaaaatcaaataaatatgatattagctcgcaagcacgtattccttgattggttcattaaaagttcaacattaaatatattattaggtggtcgaaaatagcacaatatctaccaggaagaactgacaatgaaatcaagaactactggagaacaagggtgcagaaacaagctaagcatctcaaaatcgacgcagaaagcacggcctttcaagaaatcatccggaacttttggatgccaagactgcttgaaaagattgaaaattccccatgtacttcatccataccaattctccaaacctcatcaccagccgtaggagttcccatacctagtgagactagtactactgctagtactggttctcacctacaatactatgcctcatcgtcaacacatctactatctggtcatagtactaatgaacttaacaacatgactgctggtttggctatgaatgaacagagttcggactcagaatcaatgaatttttcccagatttctgatcatttcaatgaatacccaactagtagtccttttcagccagctaatttgcataccaataatggctataactcatttttggaggcatgctcttatggtggtggtagcggtgaaagcaatggctatgacaatcacatgaattcgaaccaatcaacagttttagaagggggtcttgggcaccctgttgagagttgccacgtggcgggcatcaattggccggataatgatttctttgctggggtgtggaacacggatgatcaattatggcagtacaagaactaactaatttctttttcatttcttagttaaaggattttgtgttcatccaaaataaataattataggctttgaataggcttttttttttttctagctaatcatgatatgaatcctcatcaaatggggccatatatttgtgaattttctacaaaacaaaactagaaaagtcatattgcaaattgttacattaaaagcattttcacgtacaacttgtgtcaatatcgaatgaaaattatttttaatttgactctcttccaagtaataattccattatttaaatattaataaattgaagaaaaacaaaatcacacctccttaattttattttattttatgtgtttgctatttttttattcttcttatttttttttttgagtaccctttttttttattcttcaaagccacacattcaagaaacatttgattacgtactcatacacaatatatattgataaaacataatcacgtatttaattcgtgagaaatttaaaatattgcgccactccacttatggacacatttttctttctcctccttcctattgcccattttagtggtgtgttgaaattaaaacaaatgaatcatgtgataaatgaatatttatccctccagaagaggacacatttaacaattttcaaagtaaattttttattgtctttttatatcaagctttacttcatttcaaatccacaacttctcacgagcatctactgtagatgcaaataatactgagcatatatattaactcaatattattttatcagctattaatacttactacctagtttcaatttcttgtgacataatttgattcaaatatgatgtcgtggcggatcttgaacctcaagttcttttttctacattgatcttttacaaaatttaaatgagtaggatgacattttgatgtacattgctagaaatttattttattaattatcaatgacttactacgacttctctaatgttgaccattccactccgaccactacggtgtctagactggtttttcgctgatcgctccctttagactttactgtaatcctacaatgaaaatataataagttagctattaatacttctatttaaaattttatcttaacatataaaattaatatctaaaattcaagagttaggggacttgcaacaaatttcagccaatcatatagatcaatttcaagatacattttagggacattagccagctgttgcatttcatttgcttttttgttgttggaaaaatttagacagcaccaaatagtgcgagtatttgagcaaatctggaatactcaccgacagttatgcgagtactcactaagaattgtgaatactcaaagtttgggctccaaaattgacaaaaacaagaaaataaaaataaaggagacaagagaattatagttgttatactcgaaattcggctgccatctcagtggaggacacgtgtcaagataaagggaatatgaattagtgcaatttctttttatgaaataactcattaattacgtaagtatcagagtatatttgtaacctgtagactgtaaggtcttaggcgaggaactaatatacaaactggtacttagcataatagcgagaaaccatatgtcgttgagtgcgaattgcgaggcatcaaggacagtacccatttgaagacgaaaatggcatatatcaattgcgaaagtccttagtgtacaaactaagtgttacagatggatcagctcaagatcaaggaagcgaggtgttcgtctcgttaagggaagacctcatataacttcatcccgttaacgttagcgaggctcataaccctgacaagtcaagaagctaacattcaaatgagcttcgaagaactctttgtaaataagaaccgcgatcgacacaagacatgcatcgtcgacctcggaaggaaaaatgaccccagctcgctattgagatcactagaaccaagtttccttcgtgacaactccagaaacaataattaaagacgtatttaaaatacgatcattttgacccagtaaaacacgatcattttgacttagtaaaagcaaaaaaatcacaactatatgatttctaatcataaaccgcatttacactacctgatatgtaatcaaatcccatgattttagggatga

SEQ ID NO: 24383 - DNA, 2996 bp, Cannabis sativa
aaacctctttgatgaaagtggagttgaaccgttataactccctgaccaaacctttttgacgagagaggggtcgaatcgttataacaccttgatcaaacctttttaacgatgaagggatcaaataactataatttttgatttataacctatctcatgggaaaggaaaatcaaaagttataactcgcgtataaaactgaatactaacggttctcgcgagctatgaaagtacaaaacgaggcatcacgatgccttgataaaagtacttgaacctagaaaatggatagataatataactattcttacaggagaattaaaaatatacaaagtgataaaatccttaaagtatatttttgtaacgccctgtcccatagggacaccacgtatactattttataaactaatataatactaatagattaattagttataaaaaaacagcgataatattaaaaacttgactaaaataaatgactaaaaacggacattataacgatagtaaaaaggggttccgggaatccctgttataaaaagttttacataaacactatatacaacgcctcaaaaatataaaacaaaaatatacaatagatacaaccagtctaaaataactcatgggaacccgacacactggccggtgggatcaatatgtacattgttggagaaggcagtcacctcatggcagctctaactttgccttgcccttacctgcataacatagctttcgtgagtcacaaggactcagcaagaaaagcaataataatgattatatagtttattattcgaatattatcatttatacacaatcagaatcaaaccattacgcattattcataagatgaaagccaaatcactattggcatctgccacgaataaggatcagtatacagatatcttgttatacaaaactattacaccaataataggaatcatattcatataaaaataaaatttatatatatgttacctcataaagtaaccatcttcattacattacattgcctaataaggcaagtcgatgctttagtgtgaaaatcctgtattgcattgcctaataaggcaagccagtgcaatagcttggcacccatatatcgcataactgcaccacctaatcaagtgagcctatgcaaaaaacctgcacccaaatatcatataattgcatcacctaatcaggtgagcttgtgccacaatctggcaccaatatatcgcatcgtctaatcagacgagcccgtacctatgcccggtacatattgtatgtcattgacacccatacctacacccgatacgtcgctaggaaaattacatcacctaatcaggtgagctcgtacctatgctcgatactcatcatatatcactgacgcctgtacttacgcccaatacgtcgctaggaaaattacatcacctaaccaggtgagctcatacctacgctcggtactgacgctcgtacttatgcccagtacgtcgccaagaaaattgcatcacctaacaggtgagctcgtacctacattcggtactcatcatatatcactgacgctcgtacttatgcccagtacatcgccaggaaaattgcatcacctaatcaagtgagcccacttatcacatgcataatatcattacattatcgatactcaaccaatcaatctattcattatataaaaatcttaactatatctcaatattaatcatttcattgcaatactaattgtatcacatacaacgtaatatgcagtataatatacttttattaccttaaggttcggtttaagttggtccacctacttggagtacgatcgatgatctcgggccctacgtcataacaataatagactaattatcgtttatccaaaaacacttcttaacagttgaaaaggacaacttagggtttcctaccaaaactcgtagtttaaatatgctaatataaaacttatattttggatctaaaacatactccatatggtagagctcattgcaaacttcaaaatggtatatagaacatccaaaatggacacctgagtgaaaagttatgacaaaaatacgattcccgagttcccgaagttgcctgaaatggtaaaccggttgtccagaactggttgaccggtttatcagggttaataatatgatttttcaagtttacgcacttaccaaaacgctagtagaacctgtccaaaccaccccaaacttcatagggcacatatataccatatatactaccatacttacgtaatagcatctaaaatcgagcacgtaattagcaaatgccactagtgtttggacttaaattataaaaagttctaaattcaatttataactaaaaatcacctcaattttagcaagaaaacatcagaactagtcccatgactacccgagaacaatcctataaggtcagaaccttcataactattctaattcgcaaaactcctataccaaaccaattgctttaaacttaaaacggaattaaaccttaccttaagctttcccactaggaagattttctatcctgctactaccggaggttagatcgctaggttttggattgaaaatcgaagaaaataaatttaagaggagagagaatttgttgacaaaggaggagggtttcgttttcgttcttctgttttaaaaacatataacattaatatatatataatcaaaacgtattgatatgttttataataaaaaaataatattatattaataatataataattaaacttaattattaataattatcttattatttcttagccactaagtaatttatactttgagggagctaagtcaaatcctactcactcctaattatcccaatacccatattatcaacttatcatgatattctcataaattctatcgattaaaccggttatgatatttttggcccatgatcgagtctccaaggtcgccaaaccataaaatatttttaggctcacacaggcatacagattgggatggatcctatcatgttactgggtcatacacaaatgaaagaagaatgtaaaatt

SEQ ID NO: 24384 - DNA, 2033 bp, Cannabis sativa
ctaaaaacaattttttaaaacaaaaaaaatagaaaacaataccaaacatgctctaaatcacttgtttggcaaaagggagagaaggagggataggtctccctccaaaccttcaaaatttaatgtcttcaaatttagaaggattgtataaaaagacaaaatatattttgcaaaatacaatagctacccttaaaaaaataataaaattttatttttaaaaggataattttgtaattttactaatcaattttttctccatccttcccacctcacacctaataccaaacaatataaaagagattaacaatcctctccatccatccttctttccctccctcccaccaaacatagccttagtcttttctgtaattaccatctcgtgagaaataaaaacttaaagtagacgtagctccattattatcgtgatacatggagtgaattactataaagttgatgtgtctctcttataattacttaactgctttttcattctcgctaatctagcgagcgggtgtggcttagaagtctagtctagaattcttagtcaacaagcctgccatcgataaaccatcgatactcaattgaaataccaagcaaaaataaatatcatttctttgtattttaattgattatcgatcgtttattgttagtatatcgatggtaggctgatatttttttcttggttttataattgattatcgatggtttatcgatagtatgtcgatggtttatggattgtatattgatggtttatcgataacttcttcttgtgagattaagtttgctatttttggctatattatgtcctagaatgaaattatatcgatataccatcaaaaaattatcaaaaattattcgccttaactttaatacaacaatcatcgaaatagtatcgatataccatcaaagaagtatcaaaaattatcctcccttatcttcttaccctaattgtcgagaagatatcaatacataataaaaaaagtatcgataatttgttaaaaaatctagtttggtgagaaaattagatctcgccatttcaaagaaaaaaaaactagtaaaataacaccaatacaaacaacaaccacacatagctctataaaaaaataaactacatactaatctaaatgtttaagaaattctttgaacaacacttatcaatcattgaggtaaatgtgtataattcgtttcaatgaggaggttcgaccatccatcgagatagatcgagagatagggagcgaagagattgagaaatagtgagcttagagagagagagagataaatgagaggaccaaagctagatgatcgtgtcattctttatacacctaaaaaactattgtatttaatctttttcttattgactttgtccagctatgtttgcaaaagcgtgtgtgattaattttgttttttctttatatatatttttttaattaattaagggtaaaatgaaaaaaatatataaataaatgaatttttgtataaattaattgaagatctaaattttaattggggtatttttgtaagcatacaaaattaaaattttcctatactaaaagaaactgttagttttaagtattgcttgatatgttatattattattttttttgaaaaaaaaagtattctttattaaatcgagcaatcgctctcaagaatagacatcaactccataggaacactattaatagaaaacatgcgttcagctagagaaatagagtgccgggcaacaaaatgcgcagcacaattcgcagaacgcttaacaaacaaaagcgaaacattagacaaactctcaagaattttcttgcaatcttccaccactgaaccgaaggaagaaacaaacacctctgcactacgaatggcttctgcacaaacgaggctatctgtctcaacaatggcctgagtgaaggagtgatttttcagccaactcaatgcttcccatatgcccattacttcggccaaatcgggagaaacactgctaggtttcacaccagcaaaggcagcaatcaaatatcatattgaatctttactactactaaaagaaa

SEQ ID NO: 24385 - DNA, 2946 bp, Cannabis sativa
ttttttttttttttttgttttgtcttttcttaattattttaatgtttttttttttaatttcttctttatatataattttagacatataaaatgctatctttctatatatattgctatttggtaaggtgaccatcaacttatcatgtggcacccaataattggctagtattcaaaatggtcagtaataatacataaaaattattataatataagacccaatacttaatatttttatctaatatcataaacaaaaatgataattaattccttgaataatactagacaccactaatatactttttaatacttctctaatattttcgtaaatctgatatttaattgtatcaatagcgataaagctccttcgattgtattaaatacttagcatttttctaattctatcccaaatataagtaatgtatatagattcatattataatttttaatttttttagttaaatttaataattttaatatataattaatcttttaaaatattaaaatctgcattagctatatatatacacatatggaaaaagttagtaaaaaattgtaactaaatatgtacttattaagataatgaaacccagattctcctatcttctattttgattttccttctcttttaatctttgattcccttcttattctattttccttttttctttctccaccttctctataagtttaaaaataatttagtccatatcgttactatgttgagcctaacaaaatactattgtaatatactcgtgaatattttaaaatatggaaagcatatgttttttttttttttttttgctatttccaaaatttaagaaaccatttgattacttattgtaagagcagaactaagagagaagatagagagaaattgaaaagagaagctctgtcctaaactggagcagagaagatgtatttatatacattgagaacttaacaatattacagtgccacataggcaagcattaacagaaagctaaacagaaaattaactaattaactgaagcctaactaactctaacccccccccccctcaagttacacttggttcccgaagtgttaacttgttcctgaaatgatcaaattgagtttgaggaagaggcttagttaggatgtctgtaatttgatgagtggcagagacgtggcgtatgtcaagttcgtggactaggactctgtcacgaatgaagtgaagatccacttcaatgtgcttcgtttgttgatgaaagacgggatttgatgcaagagaggtggcaccaagattatcacaccaaagaataggacagctttgtatgtgtatgccaagctctttgaatagagattgaacccaaattaactctgtggtggcaagagcaatagcacggtactcagattccgtgcttgagcgagccactacggtttgttttctcgagctccaggtgattaaattgtggccaagatagacgcaataaccagaagttgatcgtctgtcatcaatagagcttgcccagtcgacatcagtgtaggcaactagattgagaggagatgcagccttgaaatggagaccatagtctattgtgcccgtcaagtaccgaagaagccgtttgcaagcagaccaatgctcattggtgggagcttttaagaattgagataacttgtttacagcaaaggagatgtcgggccttgtcaaagttaaatactggagagttccaataacactgcgataaagagtaggattttccataatagttcccatggaggtagcaagtttggtgttgggacacattggtgttggtgtaggagtagcagcagccatattggtacgagtgagaaggtctgaagtgtacttggcttgagtgagatagagatcagtggctgttctggtaacttcaaagccgagaaagtacctcacgggtcctagatttttgaaagcaaactgttgatgtcattgagaaattaagtgatgaatatagacactatcttcacctgtaaggagaatatcatcaacatagatgagaagaagagtaagtttgccttctcgttggaggtaaaataatgaagtgtctgctctcgagttatgaaaaccccactgaattaaagcatgtttgagcttgtcaaaccaagcgcgaggagcttgctttaagccataaatggatttgttgagtttgcagacatggtgagggtgagtctcacttttgaatccagctggttgagccatataaacgcattcttgaagatctccattcaagaatgcattgttgatgtcgatttgctgtattggccagttattagtgacagcaagagagaatataaggcggatggtacacggtttgatgacggggctgaatatctcaaaatagtcaaggccatgggtttgttgaaatccttttgcaacaagtcttgatttatacctattgacagaaccatcttgattgtacttgacacgatgcacccatttgttgtcatgtcataccaggttcataggggaccattttccatgtgttgtttttaatgagggctttgatttcagtttgcatagaattcaatcataggggatcttgaagagcagccttaagagtttttggttcgatgctgacattggaggttacggtataggctttgggtttcctaatgccagctttagcacgaatgaccatatgatgtatgttactagtgtgttgcgattgagtgtttacagagggatcattggtgatgctagcagtagggtcaactatgatatcgggttcatgattaatagccgatggtgacacatgggtgttgcttgggaggatatgcgtgtctgttggggataaggttgctggtatgcaatattgtggtggatcaatggaatcggtttctgtagtatggggaatagatggttgtgtttgtggtgtgggtgttgggttttatgccctaaataatactcatttcaatataatcagattttcttattaatatagatcagaa

SEQ ID NO: 24386 - DNA, 5583 bp, Cannabis sativa
  modified_base (1974)..(1980): a, c, t, g, unknown or other
gaaaaacctgcctctaaaggctaacattgtagtagtgccggtccaaaaaggtgagccataaaagaaccgtttgtaatctattgtgagaccaaagtgtcgctggtcctaagaaaaaaacaagccaaactttaaaacatccgctgtctctgctttaacttctatttgggacctttcagtcgacgtgtgtcaattttgaatcttggagtctttgacctgtttcaaaattcacaaatttctcgacgtgtacacccacaaatttcccgatatttggccttgtggaattctttcaaatatacgttcggtgtgtattagagttagtctcacattgttaatgtatagaaataaattctcatatataagatgaatgtattacttctcttattgtcaattgattttaagatagaatttaatttatcttattctaaattctaaaaattttagatgttcacgatgagttgatcaaggaaaaaagactattttatagtatatgtagaaataatcaacaacacatatttagttacagaaagagagatctagtgatcttatttgattggtcatggatcgataaggtttatatttaatatttatatgttcaatggtttcctctattagaaagtactgtccatatttagaaaccaaggaaagctccaaaagcataatagagatgctaaagggagcatctggcagagaaagcctattaaaaatgatgatgatgatgcaggtcagtacatatttatatatatatatacatatatatatactgaagaattgatagatatgataggacatgatatatatatcaacgtgattgccagagttgaattgtttcttctttacgtacactctctctctctcacaaagactacatttatacatgggatacgattttattatatatttctattacattagataagtctcaatgtgcattagatggttcttatagtacattattattttttaacactaattactcgtagatcaactccagctctcagatcaaataaattttctatctaacggctgccgtatattataaaaaaaaaaaattgtgtacctatatatatatatctatgattatttatgatccaatattataacccataagtttggatagttgaccaagacctgttaacgctaaccatgagcaaagaatgcgaatgagtggggggtcaccgcacatttgcttgtcgtcatgaacacgtgacacgttatattagtaatccgcattgttattatttgtgtgtgcaaaatgacattcaatcctgattttggcattataaatcacttgaacttttctgaaaatatgtatgaaaagtccactctaagtatattatcaattatccatttagaaatatatatatatatatattataaattatcaagtaaaaagcacatctcaattacacatatttgttacacttttatatttaattttaatcatatgtattaataattttaagtgaagatcacattaattattttaattgtatagttaaagctaattacaaattattgtaagtgggtaaataatatatgtaatttgagtgtgataaacataccaacaaattgtaattaaacataatcactactctataaatatataattctgtgttaatcataaaaataagattattggtgaactacttttatttctatatacaaaatgtacattataattatagttttttttttttttttttctgaagtataaacatctcttgcactcagaattttctggtatatataagtataatatacactaggtatagtttatttctaggaaaacagaattgtcccttatatatataatttttttaaaaaaaaagttgtaactaattataaattattatttttttatgttgtaactaaaatattcgtgactaaaagtattaagtcacaaaaattataatttattgtgagtaaatgtattttcaatcacaatataatcgttgtgactaaaactaaattagnnnnnnnttgtatctaaatattatgtttagttaaaagtcatattttattgtgactaaaaaacaaatttagtcacaaattgtttatgttgtgattaaaagattattagtaaaggtagtattttttgtagtgaatacattatacaattttttattaaacaaaacaataagtctgatcaataatttttgcaacacaaaatttgaagaaaaaaaaaatagtatttacccatatacttgcactatgtttggtgagatgatcaatggagagaataaatgataggaagttgagagatgatagagaatataaagaaaggagagtatggtagtaatttttttaagttgtttgaaaagaaacatagagagatagaaggatacattagtataaatttataaaattatttattttccatttatctatttctttttatataatttttatattggtgtatacttaattctaaaataaattagaaataacactataaatcgttccattaattgaggaaggattcaaaatgggtagccacctctcatctccctcccacaatcctccatgccaaacaaatgaatgttccacttctcccccttccctctgcatatccacccatcccatgtctccctccttacccttatattagataagaatgtgttataaccatttgtgtagaactcacagtcaaaagttatcgactagaggagggtagtacccatatgccattaccatcaaccaattttatacgtacttaattaaccgatgtacactctgtctcagatccactctacagtggcctactctgggctttttcacatgtgtcgtcctttctgttatttcggacccttttgaaggtgtatggctctaatatcaattatattcattacagtcactaattaattaggtaaaactcggtacaaattaaaataacctagaatataagaaaagatggtgcacgagtaagtgtatatattaccaacaaatctcatacttagtcgatgttggatcctagcaaaacgaaaacttgaaacactacacacaaatcatttcattattatgtttattaaagcaaggttaaaagagagttcccacactaataagtagtacaattaaactaaagatattattaataatattacattaatatatgtaataacaacatatgtcatattaaaacatacacataatacaaaggataattatagatactagcaaattaaccccaatttcaatttattcctattaatatattttgaggtagcgcgctaattataatataatgattaaaagcttatatataataggtgatgatggtgtagagtgtttttattgatgatgaaagtagtactgagaatatatatatatatattagtggtaggtaggtagagctagcgtcttctagctgcggtttctctctgagcgttgaaataaacggcagcgacaggaagaccgaggtcgttttgagcagcgaagctttttgtgttgaaatgatcctttgagcttggtatactcaccgagtctcggcatttctgtttgaacagaacaaatacgaacctgtgaatccctatatttggctttgggctctcatagctcaccacttcccttcctgtgtacatatccactttttatatttataaaaataattatatacatatataattaattataatggatttaataataattaccaaatgtagcgtctgtggtgcctggtatgtctgtcacaatcctgtccatgtttcaaagaagaaaataattattacaaatcagtatatatatcttcggtatatatatatagagaataacatgcaatctaggtagttatgttaaaagcatactattagtttgttaattaaaccaaattataatcttactgacatttggattatatacacataataacaagtatttattataccagtgaaggtgctcccttaagtaaggatcacttgggccaggaacatctggatctgtcatgacctaaaataaaataaagagagagagaaaaaaaaaattaccaaaaaaaaaaaacattaaaacttttaaacaaaaccttgttcatcatttagagatctaacaaaacaattatcataatatatatattttttaattaccagtgtgaagaaagatctcatgtcagctccttgaatttcaaccctaggtttggagatgacaactgaaggaaagagctcatgtccattacagacttgcttcttgttataagagacagacatttttatggatggactgaaagactctagaacatctcctatcactcttccaaccacaagaggctctaacattcttgccataattatatttatagtaataattattattaacaccaattaagtacttaaaatatatatagctaataattaatttaattagaaataatattatttatatatgtgtttgtgtgtggaaattgtagaagagtcttaattattacttagttcgtgatggaatggaacttggaaacccatgtatttatagtgtctacatgatatctttggctccttaattgtaactttacttttagatctatgatgtggtggttttttcaatttttttaagggaacaataataatattagttttatggataattaaaaaaaaatagaatattggaagtttataataaaatatgggagaaaataaactaattataataaatcattacttggttagctaaatgtcccatcccctttgttttcaatatatctctctttattggcacaacaaatatgagaatttaattagtagtgctttaattcaatgattataataagaaaaatgcttaaaaggtaccctcctacgtgttaatgtgttaatattattataagtgtaattaagtatatcgagtctgagccattttaaatattttggaggttctaattttaaaaaattgacataacaaaaaaaatatataatttataaataatatttttaaatattatgatacagttatatatattacaaaacgccaaaaaattctaattattttattaaaattgttactgattataatacaacaaaaaaagaatacagaagattaaaaaaaaataataatagtaatgattttttttcttttaaaaaatagtaatagaattgaaaataactttaggaatttgtatagaagtgaccaatgaaaaattattagttctttgagaagttgggttcattaataagaaaaaattgaagagtattaaagaaaaaatatattagatcttttattttttttaaaacttgtgcagtagcccaacttgcacacagggccggccatttagttgtgcaacaagtactaatgcacaggacccacaaattaaaaaggcttaatatgactttttagaatttttttagagaaacttacaaaaatattgaaatttgagttaacttttacacaaatactgtcacatggaaaagttttcaaaaatattgtatttttataaaacactagtaaaatacaaagcaaaacaacttaaaataacagtaaaacaattaaaaaataccagtagaacatgagtaaaaacttaacacattatactgcagtatgaaatttataaaaaaaatacagtaaaaaagtaaaaaataccgattcacagtatttttgtaaaaaaaa

SEQ ID NO: 24387 - DNA, 3362 bp, Cannabis sativa
aataactctctcatctgacggctgtcgtacatcacggattgtaatccgtgaaagtacaataacgggacaaaatcatatccctatatatataatatatcttcattgattgatgattatgtttctttttgaattgattttagggtttgtattttttcggataagtactattttgaattttgtattttgtaaaaattattaattggagtctttattttgttaaatgaaaaattgaattttttatttttcgaaacggtgcaaaatagtaccttaaattgatttttaatcaaaataaatttactcaatataaatgtgttatgacaagatgtagttacattttatgtatctattcatgttagaaattatttttaaattgattatatatcaaaagttaagctcaaagtattaatttatattatattgaaccttttgtaaaatacacagcctaaaataatattaatccaattttttgggactttgtactttacatgattacttttatttatggactttgtgtttttaaaaaaattaacttttgtgtcatatttagtaagagcattagaatatagttctttaaatcctatttggtcaaaatattttttagtatgactagatttgagaaactcttccttgaagcaaaagtcagaggagttttaaatctcatttatcttttagtattaagaagattagcacactaatttttgcatataactatatttattatgaaaaagtacgatttgatagtaatgaaaattaatgataaaatataatagtagtcataattatttaacaaaaatcccataatagtcgtagttcaagaaaacattcagagagtcagtcttctatgttagatgggccttagtgtgggcttagcccgccttaatctaagattgatcttcagaatatctaacatagggaagatttttttcgaccgaaatttagagagcagaatatgtatttatttattctttattaaaaaaataatatctttctatccaaaaaaaaaatgaaaaatttagaatttattcatgaatgagtttacattgtatgcagctttggtatatgctttcaaaaaccctagctgaggaaggtgcttggaaatttgctaaggaaaatggaattgatttggtttcattaaatcctggatttgtgattggtccattcttacaaccaactctcaatttcactatggaaatgattctcaatattataaataatggtacattacatgtattacattaattattatttcattttataatcaaataatattttataaatatactagcctagattatataatagatcatgtgacaattaatttgacttttttttcctatttttttataaaaataattaaatataactttttatttatccttttaacatattacaagaaaaaaaaaagaatatttaataagtttgtttgtaaatttttggattaaaaatcttatccctactcaaatttttgctattttaattttttatatatattttaataatttagcctattttatataaatttttacatttgcgccccttttcaatatttttttacgtttatacctttttgtgtacatttaatttcttttaatttttgctctgagtgaacaaaatttctgatttctctattgcatatcgatatataaaaatatattttttttttgttgcagaagaaaattttccaaacatgatgtatgattttagtgatgttagagatattgcaatggcacatattcttgcatttgagaagaactcagctaatggaagatattgtcttgttgcaaattatatgcacatttctcatactctacaaattatacaacaactctatcccacactcaccattcctaacaagtaagttagttattaattattttcatatttttccatgcaacatatacattacaattaaatgtaagtaccgtcgaatactatctatttctccattagtgatattatctgttttgagcctaagccctcacaaatttatttttgagaaccttctcaaaagacctcattctaatgaaaataatgtcagtccttatatatcaaagactcttctcatttctaaccaaatgtagaacttttattatacactcaacatatgtatataaataattttatattacatctccatgtcgggtatgcaaaaaatgctcaatggtacgtagctagggtttagattatttttatttttcgatcccaaaatttgaactaatccacatcacaaaaccctattgaatgggatataaagtttaccgtaactgaaatatttctaatattttattctttttttttattattattatatgatggtgtttagtgtagttgtagcagtcgctcagcaaaaattttaataaattttaaataatttataatacttaaattagggtgtgaacaatttttttttactcgtatgaaaaaattagagacgagaacaacatatagtttgaacacaataaattaataattataatatagatattgtcatagaaaagaaaattaattagggtacttcacatagattgtaccctaatataaaaacatttttttttgtgtgtataagtatgttatattttcatttttttattgattattaatttgtggtttgtatggtatagatgtgaatcatatcctcttgtggaaggacccaaaacatcaaaggtgaaagcactaagtttgggagttaaattcacaccattagaggtcactctaagggacactattcaaagctttattgaaaagggttacctcaaaatttgatgataaacaaacaactgcaataaattagtcttatatatatatatttatatcttttgatacttaaaatattgcatggttactttgattgaataaattgtttttaatattgtaagaattatgattatctaatcttatgattggatttttgttttttatatatgaatgttacttcataaatgagtattttccaataaaataaccaattttaatgaagcaatattttattatgaacattgttattaaatattagtaatacttattacatactagacatatcacgttgtaatttgctaacattaatactccttaaaaattattatattaaattatatgagacctaatacttaattaaaccaatatcgatattgacacgtaaaaaagtgctaaacaccactagtatccttcaatatttctcttttattataatgttttattttcttcaatttattgctgacatttatatatttagatgtttgagataatattacatatttaatagagtagaaaaataaaaacttacaagtcaatcgcaatattaagtaagaacataaagaagatgagtagaaattctatctcacaatttttaactatagactaga

SEQ ID NO: 24388 - DNA, 1700 bp, Cannabis sativa
ttttgtttgtttaagttttgtgtgcgtgtacattttttgtgtgcttttaattctcttttctagtaccaattaataacaattattatggactaatgatcattaaccagtaacatcatcaactataattcattactggcttatgcaattaattaggtaagtttaatgacatgcatattattgtgtctaattctagcaagtcgtaagttatgacaaaatccagacaagaagtatgtatttgtcgttttcacattagtgtcatttaagattggactattcaaagtaatgctttttttttttaatatatatttatatatattatttaataaattttatgaaatatgaaaacaggtaattgactgggtaaaatatactgaggaaaataggggggaaatcatatataatacccattaaattgatggagagatagaagaagatgaagaagaaacatttgaaaattagtcataaatgttgttttagaattcagaggaaggatggtataaattaaacgctcttcttggctgtcctacgcggtttcgtttactgccacatataacatatataaatgatcagaatgcatgccatgccattccttccaattatgtatgcatcatttaattcaaaatccaattgtacggtcacgtatgcctttgactaagataagtgactatattcattaagaaaaatggtttgatagaaattcttttagggcttgtttggtacacagtattgtattacattttattgtattgtattgtattagttttatttaatacaataatatgtttgttattaacttttacaaatagattatgtaaaattataatatattttaaatacactcgaccgcaacatcaactacgggtcgggtccatggtccagatctggcttcggggtgcgagtctcaggtccgggtttgggtccgaccagtctcggtcttgagactgggttcgtgtctcgggtctgggtatgggttccgattcaggtccgagtcaaggttcgggtctgggtttgggtcccgggtctgggtctgggttcaggttcgggactaggatctgggtacgggttcgggttcaagtccggatctgaactggatcccgagtttagatttgagattgaggttgaccctgaatcctttgtaaatattatactacaagctatattacgattattaatttgttatgtattaaataatacaactaacattgtattaaaaattttggtcgtaataattaatataatatattgattcattcaaacatagtgttaattattatttaatacaatacgacccttatatgacgtactaaaatgcccttaaatcactatctatagctataaattatataaagcaagatcgttaattatttataaaatataaaatcaaactagtaattaaaaaatctattattattataggttactatgactttttattttttatttttaaagaaaaaagaatagataaaaataaaaagaatgataattattttattagaacaatttgctcaaatttttcaaaattttcataatgaactcaaatttttagagtattaatccatgtggacaagtgtccttaatgttttacaatagttctttttctttttcaaatctacccattttaagggcacaattttcatatattattcattttctcatcttattacatataatatcatcatctatgattcctatattcacat

SEQ ID NO: 24389 - DNA, 1820 bp, Cannabis sativa
tttttatatatttttataaaaatttatataacaacccatctagcaactaacatatcaaacttaaattcacataacaatctaaataaaaataacagaaacaactcaaatcataaaataaacaaatatttttactagttatgacacctaattttactgtgtttttttagccatttgtcaaatctatgagtaatttcctcaaatagaaaaatgccacgtaagagtataattgccagatcattattacacgaaaaacagcgcaaaattaatattttatttttcttttataaaaataaaataaaatttggtaaagacaaaaacaaaaaccaaactcaaaacgaaacgtaagaccgaagaagaattcgaaagaagaaaatcaaaatcaaaatcaaatctaatccaatcgaatcatgtgggaatcgatctgcctcaccttggcggccaccgccggtaacaacatcggaaaagtccttcagaagaagggcaccattattctccctcctctctctttcaagctcaaggttcccccttttttctttctttaattttcgtttaattgccactctgctcttcaatttcattcatcgattgtaaagttagtgtctttatattggatgagaaaagggggaaatgttgatttttgttggtaaatttgaaaaattgtgatttcaatttggaatgttagaattgggaattgggattaagtaagttttaagtatgagacatttgaattgggttggttatgtaataatcttatttggctcattgcattggtaaatagaaaagttgtgattgaatttggaaatgggttttcattgctataatgaaattgtaaatgttgaaatgtttgattatgtgtgttttgtttgtaggtgataagagcatatgctcttaatagagcttggttgttgggtttcttgatggatatatttggagctttgttgatgttgagagcattatctctagctcctgtaagtcctttattccaagtttcattttccttgtgttatttgtatgatttgtataatttcatgaccaagttaaccaagtttagtaattggtaattgataggggctttaatttaacctttatatgatttcagattaagacacatctctaataaccaatttactctcataaatgaatcaaactgactagttacaaatcaaaggagtaatgggactatttgttatgatattatttgcattgaaaatatcaaattaggggattttaagttctaaaagaataaagataaaatggggttggtgttctttcaggtatcagttatccaaccggtttcgggctgtggacttgctattctatctatattttcccacttttatctaaaggaaaccatgaatgttattgattggatgggaattactttagcaggcattggcaccttaggtaatgtaagttcttcacatttctttgttttatatactatgcaagttttcgggttgttcaattaatgcggtggtattaagatcgccgattgcaaattgaagtttattgattatttcaatcattaattactggtttttgttattttactataaatagagttgttacttctttattcacaggagttggtgctggtggtgaggaacaaaaggcttctgccatatctgtacttcagttaccgtggcttgtcatcatcgtcgtcatcttgtttgtaggtaccttatcttgtggatcatctgattttgttttctacattctacagaatgtgagaccttaaatgaccccttttaataggtacttctcaatggttggcttcgtattttcaaacgtcaacgaagagaacaggaattggtaacttc

SEQ ID NO: 24390 - DNA, 5001 bp, Cannabis sativa
agtggtaagggtaatttatgaagtgtcaggattgtgtgagtatgatattatataaatgtttaagcttgttaatgtgagattgaatagataattattgaattgattattgttttattcacttttcttgctgagtctctgtgactcacgggtgctatatgatgcaggtaaaggaaaggccaaagttgagcagccaagagtttgaaggtcatagcagtaatgtacatttcagccgcggtacggcccagtggacagggtgttccattttgattgtattttagaatataaagtttatgttgtaaaagaacttttaaaccgtaattaattatacttatctgtttgaaaaagaaggtttatatgtttattttaattagtcaaattttaatcaaccacactttaggtataattacataaattagtaaaaggaagctttgtaagcacacacacacacacgtggcatccctgttggacatgacattataacatggtatcagagtgccaaggtttaaagatcctgaagactggtttgatatgtacattggctgtgaagactcgatcaactcatggttcagtaagtttgaattatttgataagttgttgattacttgattgcctgtttatttgaatatgctagttgttagaaaagtttgagatgtttggaaatacttctcagtattatcaatacttggaatgtgaccgcaggtgtatagattatgcacccaaggcagattggtagaggtaaccgcgagcttactgggcttggggttggcggtaagggcgagaaccctccaccaccaccaaattgggaagaattatatgtcgcgattcatgagactatctgacagcagggtgaacaaattcgagatctaagggggcagcgagctcagcctattccaaaccctaatcttgatcctttggcacctctggtagtgccaccagatgcagggaatcgtctagagccattgtatgagcggtttcacaagcgaaacccgccagtgtttgagggaggagctaatccactcaaagaggagcaatggatgagcatgataacatctatttttgatttcatgcgggttaaggataatgattgggttagatgttctatttatatgctgcgagaagatgcacgtatatggtgggagataatatctcagggtcatgacctgggatgctttctgaacattgtgttacgagaagtattataatgagtctatccgagcagcaaaagcagaggagtttatacgattaactcagggcagtatgatagtaacagaatatgccactaagttcgatcgactcgcaaaatttgcttcagatgaagtggctactgaagctgctagaaaagcaaagtttatttgaggattggatgaacacattgcacgggatatgatacttgctaccaaacatcctggattcgttcggacttatgcacagatagttgaattggccctagctgctgagggtgcagaagatcagagacgaaagaaaaatattacgagaagagattcatggaaacaaagtgttggttctggtaggggtaatgaccttggtgatcatagaaaatggcctaatgaaccatcagctacaggcccaaacaagagattccaaggtaaccaaggtttctgtcgtggtggaaacaaaaactgacagacttttcctgaatgtccaaggtgcaagtggcgccaccagggcgagtgtcaggccagggcctattttcactgtggggtagtggatcacttgaaaaagaatttcccacagctgttgctacaagaacaaaagaaggatgatacacctgcacctgcttgggtgtttgccctgacacaggatgaggcttatgccgacccttccactatgacaggtcaactttctgttgttggtactttattaactgttatgattgattctggtgcgacacattcttatatttcaaatagaataattgagaagttgaataggcctagtgatgtactttctagaggcttcgaaactttactgcctactggagagctggttatctccagcaggtgggttcgatcccttccagtatttgtggaaggaagggagttatcggttgatctgatagaactatatttggaatactttgatgtaagtttaggtatggattggcttgctaaatacaatgcaactattgattgtaagagaaagattgtaactttttagcctgaggacgaggacccctttgtatttgtgggtaagatgcagggatctcggattcccttaatcttagcgcttaaggcaagagatttgctatgtgaggggtgcatcggtttgttagcaagtgtagtagatactactaaggaaccaccagcgggaccggagcatgtctcactggtttgagaatttctagatgtttttccagagttactggggttaccactgaaacgtgaaattgattttgagattgatctaataccaggggcaaagcctgtatcaagatctcctttcaggatggaacttgcggagctaaaagagttaaaagtttaattacaggggatgttggatttaatatttataagaccaagtacctcaccttggggtgcactagttttgttcgtgaaaaagaaggacagaactttacaaatgtgcattgattaccgggagttaaacaagttgatagtaaagaacaaataccctctgccaaggatagatgacctatttgatcagctgcagggaaagaccgtcttctccaagattgatctttgatctggttatcaccagttgaggattcgagaagaggatattcccaaaatagcttttcagacccggtatggacactatgaatttctggtaatatcctttggattaacaaacgccccgatagcatttatggacttgatgaaccgagtgttcaaagatttcctagatgattttgttattatctttattgatgatattctaatttattcagatacagaagagacacacgaaagacatcttcagatggtgttacaatgcctcaaggagcttaagttatatgccaagttcaagaaatgcgaattctggttgcctcagtgagtttctagggcatgtggtaaataaagatggtattctagtggatctggtaaagattgaagctacgagactggcctcaacctaagttagtaattgaggttagaagtttcctaggattagcagggtattatagaaggtttgttgagggttttgttaaaatttctatggccttaacagaattgactcaaaagaactacaagtttgtttggactgataagtgtggaagtagttttcaggaactgaagcaaagattaattaccgctccgatgctaactttaccagtcagtgatgaaaagtttgtgatttattgtgacgcatccaagcatgggttaggcagtgttcttatgtagtcagggaaagtgattgcttatgtatccaagcaactgaaagagtatgaacagcggtatcctacacatgatattgagttggtagcagtcgtttttgcattgaaagtcttgcgtcattatctttatggcaaaaagtgcgagatctacaccgatcataaaagccttaaatattttttcacgcagaaagacttaaatatgaggcaacaacgatggttagaactagtcaaagattatgaatgtgagattctctaccatcctagaaaagaaaatatggtagcagatgctctaagtcgaaagggcccagggcaaatttgtgaatcaaagaagattttagcagagctggctgaagatatgactagagtaggaattgaatttgtggtcagaaaacatgctaacattaccctacaatatgatctgttggaaagaattagagcgacccaacaaagtgattctgagttacaggggcacaaggagaagttagaggtcggatcggcaaaagacttttcaatttcatctgatgggttattacgatacaagaatagaatttgtgtactggccgataagagtatcagacaggagattcttgatgagtctcatactacaccgtactccttacactcggggacaaccaaaatatatcatgatgtgaaagctttatattggtggtcgggtataaagagtgatattgttgaatatgtgtcaagatgcttaacctgtcagcaagtcaaggcagaacatcagaggtcggtaggtttgcttcagcctctaaagattttcgagtggaaataggaagacatcaccatggattttattgtggggttgccaagaacagtagggtattatgactttatttgggtgattgtggatcgatatacgaagtctgcacactttttaccagtacggacaacgtatacagtggatcagtatgctgatttatacattaaggagatagttcagcttcatggtgccctaaaatcaatagtttcggatcgagatccaaaatttacatccaagttctaggaaagtttacagcgagcaatgggtaccaagttaaagttcagtacaacttttcatcctcaaactgacggtcaatctgagaggactattcagatacttgaggatatgctgagagtgcgtgtaatggattttgaaggttcttggaacaagtatctacctctgattgagttttcttatagcaatagttatcagagtaccatttccatggctccatatgagatgttttatggaaggaagtgtcattcactcattcactgggataaagtcgatgaacgcaggtatcttggacctgaagctgtccaaagaacaagtgaggctattgaaaagatttgagctcgtatgcttgtttcacagagtagacagaaaagctacgcagatccaaagcgtagagatgttgaattctagattggggattttgtcttccttcgggtatccctaataaagggaattcagaggttcggaaagaggggaaagttgagtcccagatttattggcccgtttgagattcttaagagagtaggtaaggtagcttatcggttggctttaccacctgctctatctagggttcataatgtgttccacgtctcgatgcttcaaaagtatgtat

SEQ ID NO: 24391 - DNA, 1736 bp, Cannabis sativa
gcttcatggagatctccccacggtaatcctacttccatggcagaatatcgaagaaaaacttcttgccgacgttgatggagatcagcccaaagttcctagtcaatattggagatcacaaaaagattttacatctttggtggctgttaattcccatcacatgattgtttggtgaagtgttgcctacaatagagagcaactcactttattttgttctgtcaggaagaagttctttagggaggaagactcccgtgtttttttttaaaaaaaaaaatagtttttctaatttaatttattttctcttatggtaataaaaatgtaaagtatgaccctaataaagttatatatgaagaaaccccttgaaatttctcttttactctagacttatccggtataccttaactttcaaaaaactgtcactatgttattttttatttctaagataaaatgttaccacgttagttatttgtgatatggacctattatggcagtttgtgtcacgctcctaatttcaaggcttttatctagtatccaccatgcctcttttatatatttatatatatacattataattaaaaatactgaacaaaaatgagagagagagagagagcattttaattcagaggctgcgggttgcagcatggacataaacaaatcccacaaggagattatcttagcacataacccaaggatcatcttcatcatctactcatcatattcttcaaaagattcaaaagttagctgctcttaaccccacttctttataccattatcatccctctttactctttatttccgtaaattataataaataaataaataaaaacataaaagaattatacatacaatttctaagaatgaaaagaaaagaaggatgtctatcaaaaaaaaaaaaactaaaagaaaagaagagtaattattaaagtggcttcatggtggtacatatctaaaaaaacccataaacaatcactagttgtcttgtctagagccgttgtttaatgtttaatgtctaatgtctatacctattattaatattatcattatccaatatttttaaaaacacaagtggttttttcttaaattctttttttaggttccaaatcagtagggtttagcttcagcttaagactctcctaatcccagttacaaggaggtcctagtcggttcatttactttacttttgttattaatttcaaaaactacatgttcatctagttaaaacactactctccaggatttaatggagcggattattagtgagaaatgtgtcttacgttcccgtttatcacttttatatttattttctatcttatctcttgcatatttttcatggaggcatatgaaataattacaaaaatttattgattaattttttttaaaaaaattaaaactaaatataaaaaaaaatgttatttgtataaagcttgaaatataattgttatactaaaatattgcatgcttagcaaactttaatgatacaaggcaagctataaacaccaaataacaatctttttcttcacctttgaaaaaaatgagccttattccgttactggtgtggaatgatgtattttgtttgtttttttttttttttttgctgggaagccccttccagagaaggagcgtcttactttagccttagtaaaaaattatgagtttttaagtagcctttgtgtgaatgcccaaaacctattatactaccataaagacaatcgcaacttcgcaaggcagctatatatagg

SEQ ID NO: 24392 - DNA, 1788 bp, Cannabis sativa
ctttgattggccagagctgggtcagccataccctaggagaggtatgttcaaggttggccaaccctgagtctggcagctactcatggttggtgagccctgtgctgggcagggcctgaccgcccactcttccttgactgactagtggagcttatgcgttgacatggggtagatcacaccaatttttggagtttggtggaattattattgtattgggtgtttccacccgacccgcactcaccaattaaagattggcctttgagtggttcactcccggatgtctcaggatgggaattcaacttgttggttggccagatgtgtacttctagggtgatggccgaccatgagttggacaattaggggcattatagtgccagagattcctgacgggtccccaggccaatggctaccgggatctggctattcttgccgttagaccttcgtgggaagtcttgtcctcctttgggtaggggaaggtctgtcttggttactaaaaaaacctggttggtcagagtgttgatagaccctccctaatctatcaactagtcttccttggagtagatctctgatgagatcttggcctgttccattggttttctgattgaatctccttatcaggttactagcttctctgttgcggcgatgcagctctgtctagtgagatcgaaggatatactcttggtaatccatctcaaaaattcgcgtctctgctgagaaaacacatcacaattagcagcgcttgtttcttcatttaggtcggcttgacaaatagcctttctaagtttggctaactcgagatcttctcccaagtctacatggggcttgccaatagtaggctcaaaaattcctggtcccgtctctcaagcatagtaccagggatgaggttcggtttatgttctatgggatgttcccaaaagggtccttcttcaatgggaggcacctatggagggtcctcccttgaaggcaaattccaattgttcagatccaccgggatgtttttgtctttctggccagctgtagtggccagatttgtggtgcatgccgagtggcaagattcacaacatctacagtgttcatgggaattaatgtcatggctggaacatggacatcaggatctacagtcagggggtcttgaggaagactgatgatgcaaatggtgcaaccggagttcttctcgtgttaaccatggcattggatcagagatgatatcaactcgctctcaatgaaagcaccaaactgttgacctcaaaaattggccaaccatcagcgggatagtattaaattgatgcttgccacacgttacacaattagaactcaaaagtacatgaacataaggattttataaaagtttgaccccctcagtttgcgggtaataacctactcctcgtttggttgtattgatgctgagagataatactatttagatcactataggtggaatcttatatagctctctttaaggttacagagtacgaatcagtaggcaaatctctaatgagagagagagagagggccttagaggtgtgtgagagagaggaagagagaaagcccttaaggcgtttataagagagagtgagaagaggattaggattttagacttagagctttatggcttaaatgagacttagggttttaggattgagttaaagatattttttataagagagattaaaccctaattagataaaataagagatatttacatgttaaattaataaatataaatgacaaaatcgccccttgaaagtagatattttcgtagcatcatagtgggctatcaaggcccaactc

SEQ ID NO: 24393 - DNA, 3283 bp, Cannabis sativa
ctcgtatagattagatagattaggcgattaggcgacagtttaaaagtgcggaaagtgcggagaattttttttttaaaaaaaataataaacaattcccaatggcttagaaccgtcgggcaaagtatgggccacggttttaaactgtggcccatactttgccctacagttgaaaactgtcgggaatagggctaaaaaattaaaaccctcgtgcctctcaccaaaacattcagacatcaaaccatcactcttctcaatctcactctttctcgatctcactttctcacttcctcgcgcctccatctctctcgatctcactctctcactccctcgatctctctcgatctcactcactcactccctcgatctctctctcgatctcacccactcgggtctctctctcaccagcgacgcacctccgccactaccggcaacgcccaccgaccctattcgtatattgtcttggccttggcacatttggtttatgaatttctcaatacttctgttttggctataaatgtacaaacttttttttactctaattttgtggttttttcagtgttgaggaagctaagaagaagatttacaacgtttcatgcgaaatatattttgggtttggttatgatattaatgaggagaactccaataagccagagggtatgaattttgttttttgataaggctatgatatgatatttcagatgggtattgtttattgtcattgatattcattcttacaatgttttgaacaggtttgcaaggtgttttgattcttacgttgaccctaaaaacaaagactacggtggtaagttgagacgagctactgcatttcctcagttaatatttttcatatgtatatatatacacagatatttttgtgtttttaattgttgcaaaattatttaacattggaatttttgttaatgataaatgcacttgttccattcaatatttaatatataaacatggctattttgaatgttttgtagactttgatatgtaattctttgttcaattactttgtttttttccctcaatcaaatgtcatttatgaactgatttggtatatgataatgtttttttatttagtgactacccattatgtcatttgtcctagttttatactctagaacttcttgcttgtgatgttcggttttaatgccactaggattataaattgcttttatacatgtttatgcctatctatatatgatcccctatttagggaaatgatgtactaaattgccttcttttcacttattttattggcaaatgataacatgttatgaagttgagaagatttaacatgtgttaatgggtttaaatttaatttctctatctctgctatttgtgggatttgattttttgtttgtcattagcaagttaataggcttgactatatcgtttgactattttctgataagttgaattaattagtaagaattttttttccgttcaactgtgatcctctaattgtctatgatattgagttcttgtggagatgttggcagttaatactattttgtctctgaaatgaatctattactatttttcttagtccatcatgacaatgtaagaaaccttacaaataatgtttggtttagaatgcattgttgatatttattgacctctaaaaagaaacaattggtgtttccacgaatagctaaccaaggcattgtaaaacttggataaggctgtccattttcatttgggcctcttgataaggtcttctaaatttacaaagttattaatgggattttttctaggctctcattgtgatcttgaattttagcacaaacacagaactttaaatgggtagttgagtttttgtataacaactagagtgtgcatttttttttttttttgttttggtattttgatgatgagagtgtttagcatctgtaactaataaaatttgaataggtataacttatccaattatcttcacttggagaagatcaagatgggttcaactgaggccaatttcgaggattttttttttgtggagaagaaacaggttaggaacccttttgttcccgttggtaaagtctcgaatcacccattattaccttcccccatttttatattttattgttttaatattaaagtttagcattttcttttgacggagtcaagtttcaattggattttagggctaaatgtttggatttataattagtatttttttttgaataagcaatagagtagaatagatatgggattctgaaaatttattgtcaatatatgaattaactgctcggagaattattcagagtagtatacttttttctttggtatataatgcctctgatgagtatggtctatttcaactttgatgaccatgctcgaattgtactttttgtcactaaatattttactaatagatctatgacatactcagttatgcattgaattgtatactttgaattttcttgaggtgattgttaacgtactgtggcatatatagtgatatggtaaagttgttcctgttggaggagtttcttttgacccattgatggagttgactcacattctcccaacattttgcactaaggcttgatatagttttttttataaaaattttggttgaacatgcttttggtatgctttttcataaaaatgaccttaagatataaatatccattttgtagccacatattttttataataaagagttatcaattcaaaagagaatgtagtgtagggtagtctacaaggtcttttactaattaatctataatttttttctgttttgttttgcaaggtaagagcaactcgtaattaaatgaagagatgaatcttctgcgtgatcagtggattgaatacgtctgagcacggacagtacgacaagggctattacgatgatccgtttcttttttgtttatactttacaatataactaattactttcgtataactaacgattaagtaagttagaatatgtagtttgtatatattacaatttctgttcattttcaatttatgtttatactttacagtaattaattagtgacattatataaattaataaaagttaattaatgctggaaaaaaaaaagtagaaatttacattttttttttcatttttttgcaacaaatgactggtaaaaaccgtcgctaaaaaaacaaaatttataatcaaaactgaaaattttactataggctacggtttaaaattgtgcttatattactataggcgacagtttaaaaccgtggcctatagtataggccacggttttaaactgtggcctatactataggccaccgtttaaaaccgttgcctata

SEQ ID NO: 24394 - DNA, 1224 bp, Cannabis sativa
ttgagctaaatctatttttaattacgtttctgaaaaacttggtaaaaattttggtgctttcattgagagatgaagaaagttttcaccattgatgtcatatataacgatggttgcaactagaaccgcaattgaaaaaccaactttttgcaacgacaaagaagaccctactactgatgacataaattgctctctcctagcagatgtttaggcaaacttttaggttgacgccgtaggagacagtgaagcatcgcatgtggtcagtcacccacctcaaaaaggccatcaactgaaaaatcatgttgaagaaactcccctcgaggaggacgacgaagaaggccaagacgaggatcaaatggacgactacaacaaggaagatgaggagtattatgaggaagaccctgaagttgtaaggttaagacagatagtcttggaccaacaagcaaaggtggcggaacaagaggaagttgcgtgccaaatacaagaaaccctcttagagctgaaaggcttggtagcatgaggaaacctcaatgccaaagtcatgccaacaaggaagtttaaccatcttggggttgggccctcaaatcaagaaaaagataaggggaagaaaaaggtggatgaaccccaaagaaagaactattcaccaagacccatgcatgacactcccagggacaatagaaatgtgaagaatccactcttccagagagaaattaagggctgaccagtgtaacgtcctactcaaagaaattccacatgtcatgattacaatatgctaatctcattaattggggtctataagccaaataattaataatatatatttaacttaattaaataaataacttataataagacatacattacttaaaacaaaatattaaagttacatgtttaggatcccgtaaaattattttcaaaatattagaagttatttcatacaggttgtcctaagctgcaaaatagaatttctatacaattccctattcgacccaacccttgtggtctagcttggtcggaacatgtacaattcatcttcaaaaccctcaaactcatggctgacctgacaccactttacctttgtctgcacattagagcacccgtgagtcaagacccagcaagacaaaacaataatatagtatgaacaattataataatcacatttcatacattacgcctctgtgcatataaccgtaccaccacattgtatgtcacattatctcatatata

SEQ ID NO: 24395 - DNA, 6510 bp, Cannabis sativa
  modified_base (47)..(69): a, c, t, g, unknown or other
tatatgtgtttaattatcgtttaagaaagttcatatttagggtgttnnnnnnnnnnnnnnnnnnnnnnnctaagatcatggtaaaataaattttccaacaaacctgggcattgggttcttactgggctccttcttggggctcattttaatacttctaagacatttgagattgcgaatgaggtctcttaccttgttttttaccattttaagaagaatacctagagaaaaatttgtgttcgaggagcgaaaacatggaaactaggttgtatctcaacctaggcacagagcctagtgccatgccaacttgggtactgaggccctgttctggctccctagaaatctaattttctcctaagatcacttgtatctttgttatttatgatgactaaaaaaatggccagaacacttttttcgggaaaatgattggaattaaccgaagttgacaaaatttcaacctaggtgccaggtccagtttcttgccaccagatgactctatttgattttcaataaaacttgtatcttaatctttgatgaaaatgtatggaaacctcggtgctacatcctagttctgacccctagacgacttcatttatttcccaaaagcactcaaatcttaattttagatcaaaatggagaatatgcctagaggacaatctaatttgcttattcaagtttcccaggttgacaaagtgtcaacctttgtgctgggtccccatttcggcctccagattgatccattcctcccctaaaattacttgtttccttgttttagatgaagaaaaagaaaattcttgggatagttctttagtattatagttggaaacaccctatgtttacaatatgtcaaccttagcgttgggtgcctagcgcacttggtgcttcgggtactcaaagctgaaagtgctctgattttaattttgttgcctcacatatgtttgtgagaagtctaattcatgtcctagtaaaaagtttcactcatttgaactaagatgggtctaaaaacaaaaaccctagtagggttgtcaacttgggtgctcagcacccaggttgacttcctggctgttgtttagtgtatttttagcttctaggtcttggatttggatcttcatgtcttcatggtaaaaaatactaaaagatagtgagttggaaacacaacttagcgagatctaaacacccattcttaaagttcctaaagtgaacttggtcccggggctagggacccctcccaggtggactgcaatgacttgggactaatcaactctgggatgttttctttcttgacacatgtcaaaaattgatgtcaacatcactagggtcagtttctaggcaaacattttccccccaagttaactttacacttgtgtgaagttgacttcatgacatgaactaagcatgtttctctcaaaactaccaggtgggcatcaatttttgaaatcttaggcaatttttttactcttcaatgtcttttaatgagactaggaatatttcaaaatcctattccctttggaacaaggggatttaaaacctaaagataaaaagcaaggagagaaaagataaaataaataatagattttttgtctctcttatctttataaatttaaatttaaatccactccttctttgcttaggaatagaggagaacaatagcttataaatagagaattcctttgttttcttttctcactgcttcacatgcccaggacagagattgagagcttgagaatcttgcttcattaatctttcaagtgttcttcaagtttttaggtaatttcttcaaaatatattttttttttcttcttctccattttgaagcccaatttaaggatttttgatcttgttagaaatccttaaactccattggcaagttctttgaaaatcaaaaatacgatattcttgtacgccgcttgagctggacttttcccttcctagaagatgcagtttgtcttaactttcttggaaaaagttggtttgagctgaatagagttaatatccagctgttccaagttgagagtagacatgcctcttctaagatgaattacaagaaaatctgaagaatatggcgtgcctccacctggcacctaagatgcaaaactaatcccaattctagcttcacttactaacgtgcccccaatttgctggccaatttttcaggctcctctttcaatacttgaggagcgtgtcgcgaccatctcgtaagtgaagtttttgagctgtggctctcaatgaaagcaccaaaatattgaatcagaaatctagacagagacttctaaagaaaaaccacttgctagcttggaaggaatatatgttaagtataaatagagagacacattaatttataatagatgaactccctctgtcgtgacagtaatagagctacgcctacttcgattttttattctcacgagatggattacagaaaaatggctaagtttggatgctctaatttctagtgaataaactagagagagattctctgaccttattgctacttttctgaacttaaaaaatgacctactggtgctctctttttataggtgaaggaggtcctaataaatgggaataaaataatccaaaaaatatggaaaaatataatttggctactttgaccgtggatgatgatctaatagtgaaaagtaacgtacgaggttgatcgtcaaattttagagtttgagtcacgacggtaggacctgctatgggcaagttgcaacttaaattcgtaactcccttgaaggctaaatttgaagtcaatagcttcagaatttttattgaagtgtgatacatgacttgatagagaattgaaatggctttaaaattcaagttgaatcgtgtcaatcagatcaatattgagtgagttttggacgttttactaaagtctgttcttggcccaacaccaaagttgacatctcagagcccaggttgacatttgatatcaaccttgacgttgggtgagtgggaaaacgtgtcggtgatgtattttttgatgcctgagtgatattttgagatcacttagttcatttctgtgttctggcaaagctagtcaccaattctcggagatgttgttttgcaaaaatgggagactcaaaactactcagtttctgagtaaatcaccttgttggaaaagtgaaaacatgaagtttttaatttgactcttatcacctcattgccctcaattattgtgaaaaactagatgaactaccaagaaagtattaaaatcgaattagcagaacccaacgtaccaagccatttgtcaacttgggcattgtgtgcttattttggagctttttggatgtcgttttgatacttcgaaggttctagaaattgaggacgaggtctcctacctcattttttaccattttagagagaattctcatagcaaaattggcatttgagtgattgaaactagcgcactagaaacgactgagttggaaacgacttattagaatttgaacttccattccagagtttcaggagtcaacctgcgcgcagggctagggaatcctcccaggtcgattgctatgacttgggactattcaaattcgagatatcatctttcttttcacgcgcaaaacattgatgtccacgtcactagggaaagtttcccggtgagcaccgtttatgcttaagcctgatatattactgttagctggataatggctaatagtccacaataacactgccttcagattaaaaaattctttcttaatacaatgataggcctgatcaaaattctcatacaattctatcaaatttttcaattaattattccaaatatatatttatattatgttgatgtttttgtgggcctaatatcattaaagaaagcctacaaaattcccttttcatcactaactatggaagaggattatatacataataaggaagacaggtcatgaattatgatgactacatattttgattactccatctacagatagaccgagatgaagatttgttggttcagatttgaattatgaatttatgaagtttacttttttctaagcttgtgaatctgcaaaatgtttgagttttctatctttcattatcttagtcacatgccaaattaaattttagaatattctacactacaatataattgtttaagtcgcaggatcaaaggaatgtaccacaattcattttagaggataactttcctattctccttagtcctctttattttatagcaggataaaccacaagttggaaaattgtccatgtctgcatattccttatgatataaaatgatatcgtgctaactctattttttgctttgatgttgtaaaactttatcattgttggtaatcttagatctacatcatttagcaacttattgaatttttcaagatcatcaagaaattccccctgtgtttcgtcaagcaagtctattggtatatcatcggaatcattaccctcagtataatctaccctcactttccgaatggatatggatcatcagttaaagatttcccatgccaataccatattttataacttctactgaaatctcttaaataaaaatgatccttaatcatcataacacttacttttgttccattacaacaatctatgcaatgagaatgaatatgtttgagatttctagaattctttagggcaaactctacaaatgcatcaaatctgactttaaattgtggtgtgtatctctcctcaagcattcatgatttatccataatgaaagtactaacaaaaaaatctcaaagtttagcactaaattacaaactagtgatgatgagaggaatttacactacaattaatcaagagatgatgacttagatgatttctaattatcattgcattttccatcaatgttttagttagagttttatgagtcaattgtgttcatggtattttatttttatgagatattttatgggattttttaaattttatgtgtcattttattcatccttaagtgttctaaaacattattttaatataatttttcaggcttacgtctcaagaattacttttgttatttaaatattgtaactaactattaactaatcttactgtaaattactaactagtaactaattgtagtatactaaattaataatagtaactagtcctaattctataaaaattttggcagcataacgactatagttgaacattccccaaaatttaaaactatttataacaacaaaacacaatctaaaaaaatataaaataatcacaataacatttaacaatacaaaaatttgccacccctttgactgcagtatatgtattcgcagaacctacttcactactgatgaatatttaagatattcaaactcatctaacaagcgtattattccacccatccgaccgcagtaaaatatatcacagaacccacttcactacggataaatatttacgatattcaaactcatctaacatgcatattattctacccatccaactgcagtacaatatatcacataacctacttcactacggatgaatatgtaagatattcaaactcttctaagcattgataattgattaataacaaaagttagtaaatgtatatcagtagctagctaaaaaccgatcaacaccagataattcagaaccttgcaaattagctcacaacctacaagataatgaaatacaacaaaattaaaggtatatgacacatctgtaatatgaatggacacttgtcatatgtggtcattgtaaaggtatttggcactctactaatgatagccaaaagaaggaagcaaaataataatgggtgattcagacagatgggcgaaatacagtaacaaacaaaccaaaagagccaattactgatgcagatggttttcaacaagtgaccaaggggagaaaagggaaagataaggttgtgatggaggacacccaaataagctaattagtttcaggccttgtctaggccagggcaagatgaaggtgaatcttctaaaatgcagtaggtttctaacatgatagagaaggtcaatttggtgcttccactagcagaacaagaatcaagcatgccacctttaatgtataacacaagaggagggggagatcctcctctaagaaatggataaagttctaagttggaacgctcgagggatcaacaacaagtagaaatagagtgttgtcaggcagcagatttacactcaaaaagttgggctcgttggtctgcttgagatgagagtaaaggcccgaaaacttggggctttgtatgtaaatatgtttaatggatggtgtttttcttctaacatttcttggcatgttggagggcgaataatagttgcatggaatccacatagctttacagtgagcatcttgatgtgtgccagtcaacttgtacacttgcaagcgtccactatagacggtaaaaacaatttttatgctacctttgtgtatgagttgaatgatacagaggggaggaaagaactttggagggatcttgaaagaatccgaaccaaagaagcatgtatagtcttgggagacttgttgggaattattttaccaggatcttagatctagatcggaagagcg

SEQ ID NO: 24396 - DNA, 1976 bp, Cannabis sativa
catttctcatacttgatttggcctcaaagatatagagcttttaggtttcatgagataaaaactactaaaacaattgttttgtttgtcaagcatctaattgtaaatagattaaaagggttcatacaaaagaaaatagtaatgaaggacagggtttggttgtcaaatttgtacatggaatgattgtaaggctgtgtatgtaggtgcttgtgcatcttatttaccaaatatatatattacccaaatacttgtaaaatacacttttcaaaaatctaaaagaataaaacaaagtaaacaaatagtttaaataaaaagatagaaacctttgttacgttcccatcagattggatattgtgttccaaaggctcattatcagccaataatttgtctgcctcatcgaataaggactcaactgccaaacgaaattgttcttcttgatcaaccgctcccgccgattcaagtttctccatatatgggcttccttcacctataaagcccaatttggattagattggcccaataaagttttacaatgcacttgataccaatttttacacaaaataagtaaagtgacacttattatattaaggttttttttttatatatatatttttatatgtttacagatttttttcttacaaatttttacttgtatttttctttccaaaaatattattatttgttgttttcatgtaatttttatgttgcaaatgtgaaaacaacattgttttgaaaaaaaaaacacattttgtatatttgtaaaaaaaaagtagtaaaatcgtattaatttattttttttttacttttgagtatttataaaaatatcccatttatagctagtctcttctagattttttttttcccttcataaagtataattgttggtctaaaactcactccaacaaaaggaaacaaatgttttgttttgtcttaataagcgttaaagatataaaacgggataataataattaaattaggtggttttacattttgtataaatactatatataggataagaatttgagtatgttcgttcttagacacaaaaaaagtacacaaatttaggtgaaacgcgtgagcgctaattagatctaccatctttgaaagtctctgtaatgtagtggagacacctaaacaacaaataattatttatgtgccacttgtgaaagatggaggtcgaaccaattatctctccgttaatgtcaaaactactttacttataaccaaatccattcaaatttaaacctaaatcgcaaacaaagatttgtttgcttatacgatccatttataaaactcttctatatgaataatcattacatttgaaagattattctgtgaaatagcgataaaagttacaaaattatatctctgataccattcaatgtaaacttcatacaaatccaaagcgattataattcataattataaaatgctattctaaattgactgatgataaattttcttcttatattattaagtattagtaaatcctccaaatacattaatatggtttataagctcagatttttcttccgttaacatatttttacgaaggaattttaactaagaaaaataattacaaatagaaaattagtggaattatatggagaacataaataatgcataattcaacacaaatttaattataataatttataccaaagaatagaattacctctaacaatggtgactgaaaacggctcaatgtgaaagaagaatgttgaaagaaaccctaataaaatttgagcttataaaaatatagaataggattaataattatttgtatttatacacaaaatgagatatttttttttttacatcaactaaaaaaaaaatctaaaaaggaatatataggtcaactagtaagcataaaaagtttagcttatttttaaatttttttttttcacttttttattcttatcacattaattgcttaatttacacataaggtaaagaatcacaaaaacccatatatatat

SEQ ID NO: 24397 - DNA, 5139 bp, Cannabis sativa
  modified_base (314)..(318): a, c, t, g, unknown or other
attttctttactttaaactatttattttttgttatttaattattcttaatcgctttattttgactcattgtcgttggctaaaagcgagatcaacaaatataatctgaactatattataaaactcaaatttatattatacttaaaaaactaaataaagtatgtctaaaactaaatgaaatgtaagtttacaaaaattagtaatatttgttgactcaaaaatttagactaaacttttaatcacagtcgctcgttagattgacgagaatgaataagtagttaagtaattataagagacacaataaatttatagtagnnnnntccctgtatcgcgacagtaatggagctacatctacttcaactttttatttctcatgggatatggtaattacagaaaaagactaagtgtcaaaagctccaattttcggagagaaaaacaagagagaagctctcacctagtgggtagttttctgaatgtgtaaaatgagcttatggagctctccttttaaaggtgaaggaagcccaaaaaataggaaaaaatataagtaagatatttttgaccgttgtgatgatctaacggtaaaaattagctcttggtggtgatggccatttttcggagcgggtcccactacgggtagcctagagcttattttcgtaactctcttgggggtaaattttgacaatgatagcttcaaaattacgattgaagtgtgagacatgacttgataaagcattgaattagcttcaaaacataagctgaatcgcgtgaatcggatcaaaattgagtgatttatagctattttactaaaggcagttcatgacccagcgctcaggctgacatatgacgttaacctggacgctgggtaagtgtaaaaacgtctaagagatatactttaagatgcctaagtaatattttgacatcacttaatcagtttctgtgttcaggcaaaactggtcactagtttttggagatattgctattttgcagaaatgagagactcgaaactctttataatttccgagtaagcggaaaatgaaaaatgcaaagttgtaaatttaacttctctgactttataaatctttgttattatgaaaaactagacggacggcatcagaatcggataagcaaatttttcctaatgtttccctcttccatatttctagagattcaaatgtataagcttataatcttgctaggagggctttattgttgtattccaaatttgagtgttatgtaatttgtacttaatgttgatttctaatgaagttgcaaatttcaaaaaagaaaaaagtaaaaaaaaaaaaaaaaaaactataaattttttatttgacgatagctagctatttttggctttattatttattaattttttagagaaaataatctgagaacactatcaatgagcatgaaactttaaggagttgagatctagagagattcattaataaatggcactagttgttaaagtaaatttagtaaaagaatcttagttaggttaaccataaagtttagtaatttttcctttttaatgattagtatttttaatttaaagcgcatattttatctagaaaatatgatggtactctctttttacagttatatatacccaatgagtacaatttatcgcaaagggtattattcccttgtacaaaatgacattagttaagccacccgcggcttgctgcttggctgtgtcaattgttttggatttcggctacaagtttgttattgtggagaataattcgagagtggttatcgacgctatcaatgggaagggatctcgttgggctttagagaactatatctcattttgtactaagtcttctcctttatttaatagttgttgtttttcttatgtcagtagaacatgtaactttgccgctcataatgtggctagatgggccttttcccatcatatgtttgggtctctaacggtctcttctataccggaaactctattttgtaatgaccgcgaggtctaactcagtttaattatataacataaacactttttctcaaaaaaaaaaatgacattagttaatattttatgtacaagactagtttacacctgatacaaaatccacatgtatacacaagtataaggcaatatagtatactcatatttacaacttcaccagttaaaactaatggactcaaaatgtagattatctgccaaaccagaggcacaaattttagcaacctcatgtctcatctttcttggcccacaaacaagaactccaacatcagatgctttcgactcgaacaagatttctgcatgcacaaaagataattaatcataatcactccattaacttatatatataatatatacatatatattaatgtactaattaacttactcttaagattaggcctggcaccaaaatggactttcatagcttgggctagtgactgattaggaaagctttccacctctctattccctactacgtaagaccatgcagccggagacgacgtcggcggcgtctccatttccaagtgctgaatttgtttattattattattatctttcttagagttacgactcttatttgacaaaacaaaagctacacttgaggccaagcaaatgcaagcacacaccaagaacatgtcccaaagacatctgtaagagtagtggtaaaatcccccagatttatccacagggtaaatatagtaacgagttaccaaacccaacactaagaggaacaagacaaaagatgaggagattattgcacccagccaaagccagctgtttgggcctagagttgcagagatgggtgagtctagtgggttgggcttgaacaatacggtttgtattgggctttgggcttcgattgttggttgctcgctctcttgggttacgtacgcttctatttgaagctctatttgggagatttgattcgcgtgtgggcctgatattggaagcaagaggtctaacatggccagatcagttgagttcttgaaagcacaaatgaggacaactcgaggaatgtgagagttgggaattgtgttttggaacattatctctcgaattatagagatgaaaggagtaatcccacttccaccacacaccataatcagagcttcatgcctacacataaatatgggtagaaaaaagttcagaactataaaattctatttcaaattaattatgaatggagtaacacattcttatagttatagtttagagaattgctaaaggatatttatggcacctagcacccttataaagtataatattattgttattggtacaattgaataatagaactcattttaatttaataaagattatagagaactgttaaccaattataaaatgtcatgtcataaaagtgctaaacaccttggtggccccatactctatagtttattatatatagttagcttaatatataataaactataagaatgtgtcagaattttatgatgatgtatattgtgactggagaaatgctaaagggcaccagtggtgcctagcacccttttatgtgttagtatcgctattagttcaactaagtatcgagttctacatagtttaatataatagtttttagggagtatcgctagccaatcgcaacgtgaaatgtcgaaaatgtgctaatattttccataaatattcaataactgaataattagaggtatagaaccaagattaaaaacttgtggaatgtctttataactatattgtacactgttattaaaattaatgaaaaggtccctaatgtgcaagagcctccatacataaaatagtataacaatttgtgagtgagaaataaccttagaaaggaaaatgaagatggcccatatggtccttcaacagaaacacccaagtgatccacattagaaagctgcttgtacaatttttgagaccaacttccttggcttttaatgacaatacttagcttatcaggctccatattacagttagaagttactgtaaaagggtgccattgaagctttgaaattgttggcacatttataaacaaaatactcgtcggattatactccaactctgtaatataatataacaaaaaaattataagtatagtcacatatatacaacatttaatacgtacgtactaagtattatgtaatatgtaccttgagtcttggcaaaattgagttcaaaagctccgcaaggcagaagacgagaggagagtaatttgattcgattccgtgactgtaaaaatctcaagtatcgatcgataaggaagaggaatatccccggaagaatcatgcagaggtaggcagaaccaacgtggagtacataaaagattatatagagtgtgtagaggtggtgagtatagaaaaacagctcaaacatttttctcctaactttatttaaactggttgcccaaatggcaaatgcaaataccattgcaatctctccagctacatttgacacataagtttggctccactctagtgcctgcaaccaataataataacattaatttgtctttttcttatctcgtatgtaaaagagattccaattatgtggtcaacactttaagaagtttacaccaaacaaaacagagataacacaaagaaccgtacatcgaccatttgatcggtcatggcccagtaaatgaagaatccaacggtgtgagcagtaaaaagaaccgtggagagatgaccaagccaaatgtgatatttaatgctagactctgatgtgagtccaaccagaggaagaattgaagagcctcttgttactggaaaaaacagaaatgcccagcatgtgtttccaatataaccaagtcttaatgaaacactcctgaattttgcttgccatctacaataataattcatttaaactttttacattatatatatgttagctatacagtttggaataattagtatatataattattaattaattcttacactttctctcccactttatgcatgtgaagactgccaaaactgacatataagtaattagctagagaccaagtgaggagagcaataaacatgagcacaaaacagatctctactgagctaactattcccagaggtgcttttacactcactggatttctccacgaagccaaagtacgatgaaattggctgcttgttacaccaccactactgcaaataattattaaaattaattatattaatacacaccaaagttt

SEQ ID NO: 24398 - DNA, 1553 bp, Cannabis sativa
  modified_base (585)..(597): a, c, t, g, unknown or other
tatattaaattatatgagacctgaaccaatagcaataataacacataggaaggtgctaggcaccactagtgccctttaacatttatctttattatattaagttatatagtattcaatacttaattatactaatagcattataatattaaatgatttaataatttgcgtcataaatatttaaatttaactcctgtctacaattatatacgtaagcttaaattttttgtagtaataattttaaattataattttaaagcttgtacctgtctgttaaggactaagtaaattttcacattggcctaaatcattaaatttttatttttcttttaaaaaattagtttaaatatactaataaaaaatgacatggtagataatgacttgatatttaatagtcacggaattataaaaatataacttattaaatttagatatttatttgtaactaaaattaaaattgagtgtttatactctaaaatttgtgacagtcaagactacacagttaaagagggcttaaatagattgattggtactacctatatcaaaaaggtgcatcttgtttttcggtagcccatctcgaaagaaatnnnnnnnnnnnnntgcttggcctggagcaatttcaggatgggtgaccttctgggaagttttttcagagtagcgtactcgtgtataagagttatttattcatggttttgttttgtttgatttatatttttgaaagttaatgtgagagttaactcttgctgttaactttaatttaaaaaaaagtataaactaactattaaataaccatatttatataaaaattatagatcaataaattatttaaaaaataaataaactgaactattttctataattgaagaagaatttttgaaataaaagaaaatttaaaagaaaaatttttaccagtaaagttttttcgtttctttttccttttttataaaaaaagaaagcaaaattttattaatatggaatttcaacctcctattataataaccttttacttaactttcatacttagagatgggtggaaattcctaaatataaaaacgaagtttattttaaaattttaaatatataattattaaattacttaaaaattaaaatattacatattatttattacacaatatactaattattatataactaaaaaaattataaaaagaacattaatatactaaacatatacaaacacatatgataaaatataaaatataataaaaaaaaattaataaattaaccgggttacagcggggagtgtcatccccgttcctgccccgtttaacatttgggattttagggataaaaaatgatcccgtcctagcctcgtttaacattcgaagataaaaaatgaccccgtccccccttcgttccttatttaaattgaaaattcctgactcattagggcaggttcttgcaaggcccatcttcatggagaaatgtgcatctctaaatacttgttatagttactgaaattccgtattttaatattcccagtttaattatttaattaagtgattaattaaatacggaataatgaaactggtact

SEQ ID NO: 24399 - DNA, 1557 bp, Cannabis sativa
atacaggtcaatgagttcctttcaaaccaatggagtcatgaaaggtttttgactcaaagacataataatatatttttctatttacttttaagtaattttgataatggattttttttagggttatactcaaaattataactaaatgaaccaaatggaataagacatctaggaattgcagtgttagaatctcaaggattctttacaaaaccatattggtattggattggatttggagcagtggttgattacactgtcgctttcaatgttctttatgcactttctctcactttcttcaactgtgagtatttcttccttgtatgctacaaggagtgtttttttttgttgactgtgttctaatgttgtctacatgttcactgtagagttcgtaaaatctcattcgattattctacttgaagatttagataatcaaaatgcagaaagtagtactgaagagaggaaccaaaatagaaatagaggaatggttcttccatttgaaccacattggatcactttcaaagatattgtttactctgctgacatgccataagtaagtttcaaagatattgcaggcttttgtaatccattctgataatgtaacttatgtgcttgaaccaaacaaaaattgtaggaattgaagatgataagttgtttcttttaaaggaattaagtggtattttcaggctaggtgttttgacagcgctgatgggtgtaagtggcgctggaaaaactactctaatggatatcttagctggtagaaagaccaaggggtacatcaaagacgatattaaaatttcttgatatcctgagagcaagaaacattttctcaaattttaggatactgtaagcaaaatggcattcatccaccacatgttactatctacgaatcatttatctactcagcatggcttcgtttaccaactgaagttgataccaagaccagagaggtttgtttgaaagttaaattctctatttatttgttcaacatctttggattctaattatattactaattgccacagatgttcattgaggaagtgatggagctaacagagctaaatgtgataaggcatgcactagtaggattgccaggtgttaatggtatctcaactgaacgacgcaaaagattgataatagtagttgagttagaagcaaacctttctattatattcatggatgaaccaacttcagggcttgatgcaagagcggttgcaattgtcatgaaagttgttaggaatgctttgaataccaaccattgtgggcaccattcatcaaccaagccttgtcatcttttaagcttttgatgaggtgtttaaacattcataatttttctatttcgtatgtttgtgataactaagaaactaaaattctttacagtttttcctgatgaagtgtggatgtaacgtcctatcctaccgggacgccacgtgtgtggttttataaactagtttagtactactaacgtaaggactcggttttgaccgagtcaaaaaggaaaaaaaataatataataaataaatatatatgtttatatataataaaaataacttttccccactc

SEQ ID NO: 24400 - DNA, 2820 bp, Cannabis sativa
aagaacttgccacttattcatagttatgaaagcattgaaactcttaccaaaaacattaaaaaatcggaaaggaaacacgacattgtcattgcagtaagtatttcattaattcatatgattcttcttcttctgcataaacttttgcaccatgtatttagcatcattttgatgatactttcttgtttgttgtttttcggtgaagtcttatgttcttggagagattccatctttgaaggaccgaataactacagtacgccagctgtgggatcttacaaaggatgttctggtatgttttcaaaatatgattagtatcgaatctaaacatgtccatctttgcctgatttcctttaccgttatgatatctataggttttggttgaacccggaacaccacaagggtctagtatcatttctcagatgagatcacatattttatggatggagaaaagggtacaaagtcctttttttaattgttattttgaaaaatattcgcattgtatagacaagagactgattctgtgtaaattgttcttcatgatttcttagaaattacgaaaattaaaaattggaaccaatgatgatacaacaaaggagaaggatttggtggccgatgctcagaaaactggtgcatttatagttgctcctgtgagttgaatagtgtttttttagtccttatttttctctgatgttagttcatcaccaaagacgagtcttttatcgctttgtttgccaatttctgcagtgtgctcatgacgggacatgcccgttggagaaaggtggaacgtactgtcattttgttcagcgcttggagaggacatcgattcaacgtatatacaaggtttttctcaattaatgtcacatactaactaattttgctctggtgacaagtttaactgatgatttttctctcgattttcgcgtgacatccttcagcgatcgaagggtaagcctttgcgtggctttgaagacgagaagttctcttatgttgttttcaggagaggacaacgaccaaagtgagttcttcctactttctttttttattttgatagatttaagggttaattctattttgaacccggtcttttgtgaaagttaccgattgtactatctattttgttaaatgatgaaatagattctatatttttcaaaataggatctttagctcgattttcggctattttttttttcttttaataaaccaagttaaagataattattagcacaaacagtagaaaacataattagtttaatcgtaacacctatagatcgaattattattaagtttaattttgataaaaaatcagttaagattactattttgtaccaactagaatccttctttttttcgagccagttcctccaccattgcgagccccaattagattcaggcataatacactttttagttattgggagaaccaagtactctcttgtggatctaggaaaaagttcttagagatttttttttgtcgaaaatacagtatccaatttgttacttacaaaaattagaataacttttgcaaaacaaaggttccactatgatatttaccctatctttaatcaccctaaacattgtttttatccaattatcaaaactctatcattcttataatattaaaacttcaatatccagggaagcttggcctcttaacggtatgaaattcgatacattgaaggaacaacatgctaaaaggaacccagaagatttagaaatcgattacggtattcatttcctttccttttttccgtttgagtattttgtcaaaataaaaataacttctttaatgttttgttttgatctttgaccagaggatctagtcaaacaacaacagcagcaacaacaacaagatattgttctgtacgaggaacccgatccagttacctacgattctgatgtcatggaaacaactgatgtcgacgaaatcaatgaaatagatgatgatgatgaagaagaaacacctgctgatctcggtagcggttggggtaggataatcttttcacctattcgaagggggaagcaagtgacgatgaacatttgtcgatcaactaaaccagacggctcagaaggcgcatatgaccgagttattgtcactaagagtaagaacccaactttacatcatcaggctagaagatcactttggggagacttgtggcccttctaaattttgcaaagcaaacttaaaatacaaaacaaaacatttccttgtaattattcatgtataatttattgtttactatatgaaatatacactaccaaacaataagtagctttatccaatcgcaattttgaaatcaaatggaactttttattttgtttagttttttcttcatgtcatggtttggaagggattgtttttttttttttttaacatgaaatatcaacttcattgaaataaagcattcaaattataaattggcattataatctgccaggacattaacatcatgaatgctacgatcagaatagatcaagagcgcttagccacgaagtggacaactttgtttgctgatcgtttaacaaaacgaagactaacattaggtagagaggataagagagttttacagtcatgagtaatcaaaccaaaaatagaagtcattttttggtgactgaaaaatgcttgaacagtgagtaagctatcagtttcgacctctactgcattccaacccttgtctttgagcccgctatcagttattttttagtccaagggattgttaatcatcaattcttaatgaaatagatttagtggtaaagtaccaaaatttcattcttttacttattcagggatgtatatgttatttcgaaatgatctattaatctacc

SEQ ID NO: 24401 - DNA, 4998 bp, Cannabis sativa
cccacattgctaatgtgtggaaatgaattgtgatatataagatgaatgggctactcctcccattgccaattggttttgggatggaacctcattcatcttattcctcaaattctaacagtttgttctaagggcatctccattgaattaccataaaagtgatgcatttttaagtttgagcatacttctataaaattaaactccattaattgataatatagactgaattttaaattttaaaaattttatcaaattttatacaaaatataacatcaaccaaatttagcttacaaaaaatatcattatctatttatctttttttttttttttataaccttaattcattcatttgtcactcataaatgtatatcgtttacaaactctatgattggggtacaccattcatgtgtttgctcatatgaaaaattgtaccaacatctatatgttgatgatattctggtagtttgcaagataagatcaaatattggaagtttaaagactcatttgaaaactaaatttgaaatgaaagacatttgtcaagccaaaaagatacttttaaggcctactagcttaaatacattacagtatttttttagttactttgctaacctttactaatcaaagggtagtttaaatacgttacaatattttcttaattactttgctaacctttgctaattaaaggattttagtaaaaaaaaacgtgtttagtaaaattttcataataaataagactttataataaacataaaatacttttccaaaatagtacaatccgggatcctgatatctatttttataacatacataaaatacataatatcaaaagtatcgctaaacaaaactaagcatgtgatgtcccaaagatcgtaaccctctaggaactgtctagatatgtaaaatatacaccatgctcgtcattcactgatgttcaaattttactttgtctttacctacacatgaaaatataacggtgagtcgacactcagtaagaaaagcataaaacatacaacatttatctgacttgtaattacgtactcatacacctaataatcataagtctactaccagcatctaacgtgtataattgagtctcgaatattcttaactaagtacaattaaccataatactaaattgcactaagtactctagtcgtactagtgttggtagcattaatttatactttttcatattatacctagcatatatttgtcagtattctagtgcaactctacgtacacaatacctctatttctaatacattaatctaattagatatatatatatatatactatacgatacctactagtattactagatattaatatttaaatacaaatctatctacatccatactactatctctagtatattaggtaaacagtatcataaaacatgtatatctaaaatatgtgcatatgtaaatctgaatattagtcttagcttaaatctaaattcaagtgtgtctgtcaacttgagtggaaaatcttcttgacgatcggaggccttaagtcacattagcagtaaactggtaagtgtttattctaaaatactctaatacctatatataaaatctaggatttttttttactgaagtacgtagtgaaaacaacctagaataaaatatatattttagctttaatttatgtaccatacttgtcactctaaggaagactattttgaaggaaatagtcagtatagtaatgcgagaaatttctcacgaagcaaacgcttgaaagatgactctatcatcatatgagatagatccccacaattgtcagcaaggccatacgaccagacaacaaccacaaggcctaagtcgatcaatgcctttcattgactttgaagacaaaagagcctacataacatcattaataagaagtggctagttgatacacaaattaccacacatgatgtgtatatggccaaatttgacactcttgctgctttggttaaagttatcactactctgaagacaatagagtacgagttagatcaaaagcagttttctcctctctcagatcgaaccaaggctttggagatcccctcaaagtttggaaatccagtgtgacatccatacactggcaaagaagactctctctcacataaacaaattcgaagtacatactaacctgtaaggaatttgagacatttttcgttgttgaatcttttcggccacgctattagaagcaactcaatagtggtatctcaaaccttctccaggatctatcaattcttagaaaatactcaagcaatcattctatgaccaattcttcccatcaaggtacagaccaatcgaacctaacgatttagtctatatcaagtaacaagaagacgaacctctaaaggattacctacaacaatttttagaggacaccacttagaagaagatacttggtgaagacgccaaggtcatggcaatgatagttgaactaataataatgagtccattctggaaagacttgaaacttaaatcagtatacaccattcaagagtttctagacagagctaactatttcatcaagatcaaaggagtcgtcaagaaggtcaaaggagttgctcaaccagaagcaaccaatcacaatgcttatctatttcgtcattctcaaatagacctcaactagaaaagtgaagaagaatcaacacctaatgcccataatgaaacagactcttcttctgtttctcaatattaactcgagtagggagatagtgatgatgaatcccttgctattctcaaggcaacatcgagaaagagagcattgacaaagaatctcccctacttcccaagacaactcaagacatggggcagtgacaaagattctccctctattttcaacaatgatcaagaataggggagcaatagtgaaaatgagtcatatgagtcttctaaagatattgaccaagaaagcgacattgaagactcccaatgaaagagggagggatcttatatcatcatagaagcgttcaaatgcgagacaaacaggttggagttagctatgactaccacttgaatccagtactagtaccaagattctggaacggggaccatctgagaggatattatcaataaagtaactgtttcttagacagttcacttcacagtgagattcactttatcttgtgtaagtgagttgatcacctcttgaaccgacaagatgcgacgaagtcatcttttagttaggaggtccatcactaaggtatggcccctacactattagtcgaacaaggcattagtgtagtgggatcacttcaactaagctttgatgaaaaatcaaaatctgcaactactacttctttttctttcaactaagctttgataacatatgatgacgatattatcaataaaagcttgttattaatcaattgcagctcatagacttaacaacgctctcaagcgctaaacaaagcttgtagagttggtcttgaggtaactacgattattttcttagtgagttaaacactgccaacccacaaatctctggatgagtggatgagtcctcataatgtaacaactaatcgagacccatgatcaagaaagcccaacgagacttggtatggcaagtgatcaatgcaggcatttcttcgatcactcgagggaaataagacatagtatacaggagctatgcacgttacatgagcattcataaaaattcatggtacacgagagccatgtatgtcacatacaccctgatatacgagagtcaaaggttacagtggcattcaaaaaaatttcacacttgagttagtatttctatggtttaaatgaaacattgatgttccttaataactgagtttcttaatcatgaaatgctagtgtgagtgttgttaagtaattaagttgaacaaccacaaataccgactatttgcacgccagagttaaacattgttatgatataaatgcttgaggtcacacaagagtataacgaccaaatttataaatctaaagtgctagtacaagtgttcctccttggatcacaaaaattaaaaagaaaagaaagcatcatcaattaaagaaagctctctggaagtaggacgctgcatctaaaagagattttataattggttgaagaaaaccctctcggagtaggacgttgccccagttgtggtattctttcagtggctaaactcctcctaagtatgggatactgtacttagcttaagtttagtccaatctatattttttttcctcccttggattttttttcttaaacctttaacaaggttctatgagttgaaatcatcaaactaggttcttcaacaatctgcgatttcacccctatacaaaagatttggcaggtttttctacactactctttgataatgattcatttcacttatgatcataaaataaacttatgcttgagcaccaagcacacaatcaataacacccactacatctcaatagtggtctatcttgttgacagtagatagcttaaacatacaaacttcagagtttttcaccccagttactgagatattataaagctggggggcaagagcagttaggctcagatagtatcaatgaaatttcaaatataatggcgtgatggttaatgatcaagcgtcactaaatattataactaagacaaaccctaaaaagagtgggtcattccctaagagatccgaagccatgcaagcagctcatgtattgtttcaagtgagccaacatcgctcactgtggtaaaatcagattaccactcacagtcaaaattgcaacgtggaaaacatcactatgactaccttcatagtggtcgacattaaatctcctgggaaggtcaacacccaatgacctatgagccatctcacctatctaccacctctctgtcaagttctcgacaacaactagtatcaattgtcttcttggaaaccaaagagtagcatgcgaatattacaacaaatcattaacattcaccaagaagacctcatttgttgtgctagcagtgaaggggaacctcatccactatcaagacaaccaagggaacgaagaaggcctcttccg

SEQ ID NO: 24402 - DNA, 4823 bp, Cannabis sativa
aatgaataggttgtaactacatttgaaaaaatgatggtgtataatattgttcttatataaatttctaaataattttaagatatcgaaattagaattcaaataatgcaagcaatttgaattttgatttcgacgtctaattatttgagatttcttaaaaatttgtgaaaaattctttttcattatcatattaaaataatgaaattataatttatctatgtaccaaaaatactttaagttatataacaatttctctctaaatatatatatttctatcccatcatagaagatgcatgctacattccacatattatctgattaattattaaattaatcgaacggttattattaattaattataattgattgaacggttattaattattgaaaagcttgttaagtttattaaatcatacttattgtgttcatagacaaaatttacaacatatctcattaatgaaatttgtttttgtttttttagaggacaacattcaaaagagaaatgctaaaaagtatcagtggtattttagcactctcctatgtgttaatatcgctattaatccaagtaattatcgggtctcatatagtttaatataatagtttttacagagtatcgctagtcaatcgcaacgcgacatgtcgagaaggtgctaggcactactcagggccggtcctaaggtatatggggtctaaggcgaaatcaaattttggggcccctatatatatagtttaactattataaaaatgatagttctagtgcttagtgtaatggtaaaattttttaaaaaaaaacttaagatgtcaaaggttcaattccttataactacacattaaatattttttaaaaaaattaaaaagtagaggttgggaattgatcccatgactttttactttaaagtaaaatcttttaccactacaccaaacaatttttattatattttcttcttatttaacactttatctatgtattaatttttttttttacaatttcggggccctgagcgttcggggactcgaggcgcacgcctggcccgcctaccctcaggaccggccctgacattactgatgcctaatatcaatgctccattcaaaaccatatccaaattgcaatctgtgggaagctataactagctagctagctccctagtcttgctaccaaaggttaattacttgttctccatccaatacaaaacaataatgtgtgaaagtgatacaagaatgggtcatggactttacacatacccttaaaaaccaccaaatgattatttgtttatttatttattttattacatatatatgatttttggttttcggtggtgcactccttgttttcgagatttaaataaatttaattttaatttttttatatgatagtgtatatcgtattatttaaaacatcatataaaatttttgaaaaattaaaaataatttacaatataaatctaaagtagagtttgaattatttatttaaaataaaaaaaaaatcacgtatacaacagactatttgaattttatttttgacacataaaattattctaaatttctttataatttatatacgtaatatctaattaactataataggattaaatagttacaaatatatgtaattttatatgtatgaagggtagttgtgatttgtgcatatatatgacgcaacaaagtctaaacaattaaaattgacacattacaaaatattatgtatatttatttatttatatatattgaaattaaagagaatccaatggataataaaaaacttttttggtgttgactgttgagtttaagttacagattgatttatagatattatgtatggaagaccaagacaatacatttaatttgtacacaaatgttaaacataataataaaaattaaataccattttagatcttgagttttacaaaaattatcaattgagctttctgttttattaaataataaaatgaactttatattttttgaaattatacaaataagaccttaaaataattttttatcaaaataaaacttaataataatctgatctagagatattatgacaaaattagttacattttatgtatctgtttatgttagaaattatcttaaagttagttatattaaaaaataaaattgttaaaaattgagttcaaggtcctatttttactattttagaaaatatatgctccattttatcatttaataaaataaataatctaaacagtaacttttacaaaatacagaatccaaaataatatttatccaataataaataataataagttgaaattagtatattaatgtttatcgttagaaattttcattgtaaacaaaatataataataaaaaaattacagcagattttttaatgaaattgagatttttctagtaaataattattcttatttcttaatctcttaaaaaattgtaatttttctagtaaataatttttcttaatctcttaagaaagaaaaagcagaagtttcatatattctgttggatattccaaataacacatggtatgacgaacatgcaattaaatatgacgtcataattatatgataaatatatatatatatttaaaagcgaacgtttttcattgaacaactaaccaatttgtctgtttatatttatatatattatattatgtatacttccatattcaccctatccctatctatatctaaaatctaaatctaataataaaaaagctcatactatatatacgtagtacatcatgtactgacaaaatacgattcatatatacttggaaaatataaagaacacaaagtattaattaatattattaaaatgaaattgctaaagtactccatgtactcatacatggcataatattattggtgtaagtaataattaatatttagtattcttacaccattaatgtagtcaatgaggtgttatactattattaaatttatacaattcaattttaaatttttatatattttaatttaataaataatattaaaaattactaattaataaagtctcacttcataacgtattagacttattaagatatattaaattgttatatgtattaagtcttggttgactgagtttttaaaaaaacttttttacaacattaattagttttagtatttttctcaataaaagcttcctaaaaacttatataaaatcagaaacttaaccaaacatgatcttaatagtgtgcaaaactacatatatcaaatgtcaacccaaatttaacgatcaacatagaaaactgttaataatcactcataaagtactgctcataattaataaggcgcctaatactacaaaattaaattaaaggggtcccatgttgttgttaggacaaggtacatggtagggctaaccttaacctggttcgaagtagtagtagtaaaactacactgcatgggcttgtgtacaaagttgcctcaagagacaatatttgtggtctgttcttttggaccccacaacccacatgattttgttttttcaaataactattaattaattaattcaacttcttcttatttctccctataaattaataataatacttgtttcaatcttcactattatatatatatagtactctaaatttctctcccaaaaaaacactacataatattattattattattattattattattattattatatggctatgaagaagctacctcaaagggctgtgatgatcaagcaaatcataaaaaggtgttcaagttttgggaagaagaataatattaatattattgatgaagaagaagaagaggaagtgttagggttttataataataataatgatggtaatgatattccaaatgatgttccaaaagggcattttgctgtttatgttggtgaaaatagaagaagatatatcataccaatttggtggctaactcaacctgagtttcaaaccctacttcaaagagctgaagaagagtttggatttaaccatcatatgggtttaactattccttgtgaagaactcacttttcaaaatctaatttccattatcatgatcagatcatcttcttcatcatcttaattatcatcatctctacctctataattatatatttatatatgtatctattatcttattttatgtctctagttagagagttttaatttcttcttcttattttgtactctaagtgattttgtacatatattattattattattgtttttgttatatatatcttttttcacttaatttattaaccagttgtattttaatctttctttaatttattttttgcataattatcacgtgatgaatgtacaattatttttacataaatatctttaattctattagataatataaataaattatattaattagaataatagtcttctgtagttgttggaagtcaaagtttacatgctcagaaatgcgtgaaaaaagagtacgtaccatttttttttttatatattattattaattaattaattttattaatattggtttctaattcatgaaccttatctctctaaccatatattgcatggctaatacgtaaccctttctatttttttttaaagaaaaaaattaataaatatgtcttttttttttttttttgctaaaatgcgcctcgtatacaatacatgatatatatatatagatattgtttcaaattaattaagaataatataatacgtaaaaatccaatattatagcaatgcttttttttttttatgattcgaaattgtctagctattaatccgatccggtggtaaactttgatatttacaaatataattattttattatatatatatataaatatatattcagtgaaaagctgtatcatgtgaaaaaccgtgtttttgcaaatgtc

SEQ ID NO: 24403 - DNA, 2621 bp, Cannabis sativa
ttttttcttgatattattactgtttatgattgtgaagagttgaagagccatatttaaccttttgagaaagctaattcactgttcgtttgtcttatacacatatctaatatattatataaattaagttatatttgtggaaattttctagcatatcatgatgttatgtgttttgtacttaagtctagtaaattgaaatcatgaaccatgtttggtggaaataattaatattatatataaaaattgagtgaaatggacaaggaggaataatatctaactataattaatttaattaaaaattaaggccactgttattttaaccaaatttaagaataataatgggtaatattaaaagtttatatatttcaattaacataaattatgtaaggttgaaaatgacaattaggggacaacccatgttgtttatgtcacaattcttataattaaatgaaatagctttgtcttattattattattattgaagccactatagtgaggatatgaaaaaaaaaaaatctaaaattttgtttagtatttttccaattatgtgtcttgcatatatattcaattatttagactaaatattatatatatttacacaggccaatcaatgttccatgcagaagaagctcaaccacattaatgcaagcagaggaaagtttattgaagaaacagttaggaagaatcaacagtaatattattccaagtttcttctatggcgccagccgtagtcctaatgataataattcctgtgttgaacaaccccaattcatggagactgatattgaccaaaacaccatccacaattggaatagtactactttagtaaataataataataagtcatcttcttctcaatattttgggttctccagaagggtctcttcccctgaaactgttagtgtcaagatctctctagacgattttgacgaacagctcaactctccagcctcttctgcagtctcttctttatgtcatgatggtagtacgatcaatcaagctaaatcagaaacgcatgggactattgatcaagttgatcaagatgaattaagagatgaagatcatgaggatgagtatgagtatgatgatgatgatgaagttaatagttcttatgtgattgaaattggttcagattatagagaaaggacatcatctgaaaatgctgttgctattgatgatgccattgcttgggctaaagagaggttacaaacatatacgaatagtgaaaaagaactcaacacaagtctcaaggaagaggataaagagtctaccaaattggttgaagaaggtgatcctcttactctacatgaaaattctcccttaaaaccataacttgctggtgttgatatgttatagagcagcttatagagatgagattactacattactttagggatcaatttcactaatcaagttaatacttattaatttatgttttgacttaatgcagcaatgcctaatacaaggacatttccccaagaactaatggataacaaacatggaatagttcaatcttcagaggtatatagattattgctataaaattttgattaaaaaaaaaacctttttgctttatgtattatagaaaaattgacccttttattttgctacttttctattaaatcagtcacagatggaaatgagattacaagatgagaatataaggttatggtcatctggaaaagaaaaagacattcgtttgcttctttcaacactgcattatgtaagttcatatttttttctttttccattcttttcttttctttataaataataataataataaattgtgtcttttggactttaattgaaacagatattatgggccaacagtgggtggtcagcaatttcactgacaaacctaatagaaagctcacaagttaaaaaagcatatcagaaagcaaggctatgtcttcatccagacaaactacagcaaagaggagtaacagttcctcaaaaatatgttgctgacaaagccttttccatcctccaagtaagtccttaattttcttttttaataataataattagtattagattttagataattataaaattaatctgaacattttgatggtatgtgattattgtaggatgcatgggcctcattcatctcccaagatgcaatttagtagctaattattaattctatttgtcatttgaagctaaattttgacttaaatgctattgtggtcatgaactcaactgtgaaatttacaagaggaggtaacaagtttggatgtgttttttttaaaaagaaaaaaatgatggggagtgattatcatctattgagaaaacatctatatatatatatatattatttgtatacaagacttggtctgtaactatgctgtaaaattgtactactactactactgccaccacccctagatgtttttttttcttattatttgttttaaatttatgtacatattttgagtcaccacaataagatggtacgatgtttttgttgtttgattagtctggagactcttgaaaatagaaaaatacacacaattttgccacttgattcttgttcaagcacttttggtaaagtcatttttacaatcattgttgctttatgaaatcctattttagtgtttagagcatctccaaagagacac

SEQ ID NO: 24404 - DNA, 4478 bp, Cannabis sativa
acgagaatgagacaatccttttgtgaagcaatctgcagtttggtctgatgatggcacatattgaatgttgagctttttctgcaagactctatctcgaacaaaatggaggtctagttcaacatgctttgttctagcatgataaactgggtttgttgcaagtgcacttgcactcaaattatcacaccatatcactgaggttgtaggcagaggaaacttaatctcattcagcagagattcaatccaaataatctctgctgtaacatgtgcaagcaccctatactcggactctgtgcttgatcttgagaccacagattgttttttggatgaccaggacacaagtgtgtctccaaggtacacacagtaacctcccactgacttcctgtcatctggacagcatgcccagtcagcgtctgagtaccctgttatacccagattgttgatgtgttgtatgtgcaacccatggtgttgtgtccctttcaagtaccttagaatcctttttgcagcactgagatgtgctgttgtgggacacttcaaaaattggcttagcttatttacagcataagctatatctggtctggtgtgcacaaggtattgcaggcctccgattagactcctgtagtgagttggattatccagaacagttccatcgactatagaaagaggcttaccagcaaccattggagttggacagggttttgtattcaacatgttgaatttattcaacaactcagcaacatactttccttgagtgagatacatccctgtactgtccctgtaaacttcaatacccagaaaataattcaaggctccaagatcttttagagagaaggtttgatttaacttgacaacaaacctctgaagttcagtagcattgttacctgtgatgataatatcatcaacatacacaagagccataataatgaactttttggttctgagtatgaagaatgatgtatctgcctttgagtgatggaaatcccacttaatcagagtctgtttaagcctatcaaaccaggctcttggtgcctgcttcaaaccatatagggacttttggagtttgcacacatgattaggtcttttagggtctacaaagccttctggttgtgtcatgtaaacagcctcttcaagtttcccattcaagaaggcattattgatgtcaagttgcctaacttcccagttgtttgtgacagcaattgtgtgagaacaattctaattgtagagggtttttgattacactggactaaaagtctctccaaaatccaagccaggtctttgatgaaatcccttagctacaaggcgagccttgagcctttgtagagatccatcagcattgtacttttctttgaacacccatttgttgccaactacattgtattctggtgaaggtggaaccagaatccatgttttgtttttaaccagtgccacattttcatctgacatagcttttgtccagcccttatgtttcaaagcttcagcaacagagataggttcacctacactgtcttcccattgtgttttactcaggtaaatttttggtttgaaaacacctgatttcgatcttgttgtcatgtgatgaccaacctgtggcattgtttcaactgtaggttcttgattttgatcagtatactgttgctgagaattaaatcgttcatcttgactgtccaagacagtagtgttggcaggatcaatatttaaatcgacaaaaagatgtccagtaagatctacctgacttgtgtgtgatgattcatgttcctcttctggtgttgatgcagtagaagcttgtggagtgcttataccagtaggtggttctgaattttgagggacatcaggtgggctatcttttgtctgagactgaaaacttggtaaagtgaaccaggtaactggtgttgtgacattaacaggttgttctttctgatgtgtattgaggaatccatttttaaatgggaattcattctcattaaaaataacattcctggatatgtacaaacgacctgttgaacttaaacacttatatcctttgtgatgttcactatagcctagattgacacatttagttgagtgaaactgaaatttatggttttggtatggccttagacagggataacatgctgtaccaaaggtctttaaaaaattatagtcaggtttctttgcatacagcacttcacagggagattttccatttaacacaggagtaggcagtcggtttatgaggtacacagaggtttgaaaagcatcaacccagtaccttaatggcatattagcttgagcaagaagtgtcaagcccatttccacaatatgtctgtgctttctttcagcacgaccattttgtgcagaagtatggggacaaggatgattaaaggctatgccacattcattaacaaggttagcaaaagcctgatattctcctccccaatcagacctgagttgtttaatcttagtgtcaaattgattttcagctaaagctttgaattgaatgaaagcacctaaggcatcagacttgtttttcataggatataaccatgtatatctgctatgatcatcaacaaaatgtatgtaataactgagattagtgttggatttaataggtgctggaccccagacatcagagtgtattaactctaatggtgctttagctctgctatttgaatttttaaaaggaagagagtgagactttccaaactgacaagcttcacaaaactgctgtttttcattcattgaaaactttacatgtgcattgtgtagcacttgactcaagactttgggagatgggtggcctaatctcctatgccacacatctcttttggatacagaagttttagagctactgacattagacactccaacagaaggactcaaaacagtattaacagactcgacagtagactggacattttgtgcaacagcacttagggcacttggagtaaaactggaagttgtatgtggactttggaactggtacaagccatccttaagcttcccctgcagcaccacctgttttgtttccatgtccttcacaaaacacaagtcagaatagaactctatgtacactttattatcagaagtcaatttagaaacactgatcaagttcttagttatttgagggacatgtagcatgtttttcagaattaaatccttcccattactagaatgcaaataaccagtacccacattgtcaattgtgagctgactaccatcaccaacaataagtttttcattacctccataggtggatttgttgctgagattgtctgcatcagtggtgatatgattggtagctccactatcagcataccatccctcatgatcaactgtttctggtgtggctatgaatgctgcagggtctttcttctcttgtccagatccaccttgtccagtgtttggtgttgaccccatgtaagtctcatcatatctattgtagcaatgagctgcagaatgaccatattttccacatacttggcaggttggttttgaattcctgcctccaccacctctgcctcttcctccacggccagcatagtttcctcttccatttgacgaataacctctgcctccatagttctgattgttggagaagcctctccctcgactgttgttgttgttgttgctgttctgcttttgtgaaagaagagctgagggtgataatgtatttcctgtgttttgattctttgatgagccaattccacctaacctttcgagtttgctgtcaaagctcaacaaggtttcttgcagttcctgccatgtaacaggtgttagattatttttggcctcaatgagagccacaatggtgatgtattcaacatcaagaccactcagaacatttgaaaccagatgactctctgggtacgggtctcctgctaatgctagctgatctgaccaggatctcttctgtctcaggtattcagccattgtagttgaacccttcctggttgtttgaagcattgttctcagatcatccattttagctcgtgaatgagctccatagaggttttctaaggatgtccacaaggatctagcagtagcacatcccattacctctgtggctatggcttctgtcatggaaccatagagccaccccataagcaattggtcatacacaatccattgctcatattcaggattcacttgaaccccaaagccaggttgactgtctccagctgcaggacctgctggaacatactcagaaggggcatttttcagcccattgatgaaaccatctaatctatggcctctgattatggtggataccatagttttccacaacacataattatttctatcaagttttagagcaaaaggctgagagagtgtgttaccaaacggtgaactcgagaatccaccagtgctgaaatgaaaaccagaggaatgggctccattaacagctggtgtggagctggtctgattctgtgtccctggatctgcaacatttcctgatgaattgtgactgttgcctgtcgacatggctgcgtgagcagaacggt

SEQ ID NO: 24405 - DNA, 3191 bp, Cannabis sativa
  modified_base (2735)..(2739): a, c, t, g, unknown or other
ataaaaacaaagtatttttgaaaacttttccgtgtgacagtatttttgtaaaagttaactcaaattccagtatttttgtaagtttcccaaaaatttatcttttgagatccttataacttagaacgacccaatgagtaaaataaatgacatgtctatatgtataaaatttaattaacacactacttaatggtaatattaaattaaaataaaaaaatttatttaaatattggaaaacagtcctaaatattattttattaagaaaaaattcatttgtactatttgtgtaacgaattgtgtgtcactactacttcaaatcacttttaggatatttacaaaataaaccacatatatggcaaaccttcgtatatataataaaacaaagtacgtacataaacatactaccatacaaagtacaaaataagtcaaacctaacacaaaaataaactactaaaataatctttagtagacatttatatatctatataatcctattctttatataggtgacatggcatgtttatgagtttcttccctaatctttattctctcaattttttagatttaattaattttgtattctattttattttctcatttagctggtgcagattgggaggaaggttggacgctcaccccagaggggttgcttatgggcgcaccaaaatgcaacagtgttggagttaaggcaaggctctggttgtaccctggggtagcgaagaactgtattccgcttgtttgagaagttgcaggaggtggagctcttggaggctgtgctcctggagcatatcccgatactcctgtcaggtaatactctgcgtaagccactatctgggcttcttctagattaatgtaattttggactctcttctgaaagtcctggaggctagctgctccttcctgctgcaacttgttccaaaaaagggttctcgtacgaattccggcctgaagcagggccaactgttgtccgtcgtccaccttcttggttttcaaggcctcctctttgaatctctttatgaagttttttagggtcttcgcgggcagttgttttatattggttagggcactgacctcaaggtagatctttcttgccgcaacaaactaccgtcggaaactcacttgcaacttgttccaacagtccaccaatcttggctctagctttttaaactattctttggcggacccgctcagtgtcaggggaaagcatagacattttgcgtcattactaaccctcatgacagtcaatcatccttccactctcgctactgtaaccgtgggcagtttcttttcaaatggtctactacccccacactagatgcaggctctcgtggagcattcactttattggtgtctcttgcatctcaaccctctagatgggtttgcaaatctttattcccaccatgtcagaaactttggttaccttaaattctcctactagaacccataactggtgggttggtaatcttttcccttgcgatcattagggttagcaccctttacccgatccaatattggacctttactttcatgaatctctcttcatatcatttcctttgtgatctagtccttacgccctcagcagtaagggttagctcaaccacctaagcataaaaccatacaactcctagttggttagccaatatctacattccaacgatatactcgctccaccataagccttcttagcggccctagcacctgcttcattaatacaaaattttccaatcggtctagcttagtgtcattctccatcactgcgctacccgaaatcaactgtacaggttttactacctgtcactcaagtaatcttttacttcatagcatccatttgctctcagtcttatggtagtggataatttatacccacaccacctaccccgagcctagcaggctcgcaattattcttactagatcgccttaggtacacctcctagtacactcgcgaccattccgttctcatagttaaaatctttctaactagaatgaatgctaataagaattaccgcacatgcatagacatacttagcaattttatatcaaaacttatcacgcttttctaacaacattacacatttcaaataagcagactattcaaacaattaggacataatccactaatcaactaacaatcaccacttactaagtcatgagtcgaacgagtctttgcagccaatgtacatatcgagcctgtcttcaggatctttaaaccttcgtcactctaataccatgttgtaacgccctgaccctcagggacgccacgtgtgtacttttacaaacttatttcgcgtaatctattagtttagaaaacaaagtgtggtttaattaaaaacttatgattaagttaaaataaaactttcatactaaataccataatacagagatcccctatttataaaattcttttaaattactattacaaaaataagattacatttccaaacatagaaaataggttgatcctgcttctcgaaagccaagacaccacgactgacactgttggaagacctctggctcatggctgaacacaacttttaatcttttttacctgcaccatgaagcacctgtgagtcacaatgactcaacaagaaaatcaattaaatcaaagcaataaaaatgcaagtattcttatcataacataacatacatactcgtgatttattatctaatcagcctgcatatatagtataacgtctatacgaaccgtatattacataatataaaaatatcatagcatcttnnnnngaatagctttatcattacactaatcaaatattcattcaatgcacaatcacatattttcagtgccttgtaaagcactctaattttacatccctataaacatgtattcttacatcctgtgagtcacggtggctctgcaagaaaataaactaatttcttaagcaatataaaattcattcagtcacattataacaaagatgtatccgattacaactcatcacataataacatgcgtaatcacacgatcctagtactttataaagtactcttaccactcgttaaccacgagctacatatgtaactatctttgctcgatacagcaaacgataagtaagaaacctattcgcagttttaagaatagttactcataatagtaatgactgttaccaatcttcaccactcgttatccacgagctgcgtatgtcactatcgttgcccgataaagcaaacgataa

SEQ ID NO: 24406 - DNA, 3344 bp, Cannabis sativa
tttcaacaagattcgattagaaggtaaaatatatcaagcttgcgacatacaataagagggagtctatttatgcataagtcgattactttgtatttttgagatctatctaatgaatcttatctctgggcgtgaccctgtggactagtaacaatttgcaaggattgttgataccacgtataaaaatctcgtgcatttttatttttctgcacgatttatttgttttattctgtagttacagagttgtgttttgtagttacggaataactgtttcagtaccatatttatcattctgcatttagttaattgattaattaattaataaattggtaatattaaaatacaaagttttatttagtattagagcttgtcactaaactcttggtgagatcttgagcttattttataccgtataatttattttgtgtgagatgtcattgtttgcaggaagctccattacttgaccacccctattgaatgactcgaattatccatattggaatgttagaacgagagcattcattaagttacaagatgaaaaagcatggagagttatacttgcaggttggtctcgttctattgaaaatgatgatgaaggtaattctaagataaaacttgaacttaattggactactaaagacgaaaatttgttgggttataacaataaagccttgcatactatttttaatagtgttggtgattgttttattaaaaatatatcagcttgtgaatctacaaagaaagtgtggaaaatccttcaaattgtgtttgaaggtaccattgattaaaaaaaaaaatcacattttaccatgttgcatactagatttaatgaattaagaatgtcagaaactaaaattttgtcggatttttatgaaagattattcgatattgctaatgagttttttactttgagagaaaatttaaatgaatttgtgttggttcgaaaaattatttgtgtgcttcctggcagatttgacacgaaattattagcaatggaggaggtaaaagattttggcaaaatgaagattgaagaactcatggattcattaagaatttttgagttaaactaacaattcaagaaaaagaacaagcaaagcgtcgtaaagaaaaacaaatatattgcaagtttttgaactacatactttagtttgagagctttctaagggtgggggtacttttggtattgggttaataatattgacataaaatgatatcttatatataataagagtcatcttcacgtcctgcttaaaggacagtaatactcttctattgcagctggttgaagtgggtttattgtattttccttctattgcagctggttgaagtgggtttattaagagtcatcttcacgtttttgaccgcctatcttcttcacttatccccaatcttgcttcacctacttcattgcctcttgtcaaatctcacgatagctatctctgctaccttcatgctcactttgatcatggatatcaaaaggttctgatattttttcttttactttcatttatattgatttatttattgttcaaagtcatgttggatgtgtttatgtttattatgttattgatacacttttaattttatttgttctgtagagtatctttgatctgaatttagggttttataagaattaaaagttgtttgggcccattataaataaatttatatatacataataactaccatcaactgacaaactaaagcagttgtaatctccaaacatacaatattatatacatatatgcgtgtgtgtatgtatgtatacctggtgagggtgagagcaagaaagagtaagcctctgaaatctagatgaaacagaatcaatgaaattaaagattgataatatgtaataattgtgaagagagaagaagaaagagaaaaagggttttgtattttgtaccgatttgaagttagactcagcaagaggcttgagatgaggtgggaaaaggtcaggatgagactcccagacctttcttctgtaagctgctttgagctgagaatgattgggttcacaattgggagacaatcccagtaaaattcgagccctttcccccttctcctccattgattttcatctttatattttcactatttataactactctctctctctctctcaccatgtctcttccttcctaccaaacttttaatacccttttcttttttcaaaaatgtttccgtggttcaatactaaccttatatatttcgatttaatttttttttgttaattttgtaagatcttattaagtactttcattaaaaaaaaaatccaataaaagtaaaacataacaattaatttgattataattagtttatttaaaattttttaattactctaaaataaaattttaaatatccacacaatagtctatctatatatttaattatttgtatatttatataaaaaagagatacgagacggtctgtactttatttttctatttttttaatttttattatttataaatattattaattagttaattaaaaaaatatttatataaattcaaaaaaaaaaaaacatatacttttaaaatatatattaaaatcacatatactaaatcataaatactaattaaacaaaattttatgttaatgtttgttaaaaataaagttttattttattatttttcttaattatttattattaaaaactttcaaatacaattttgaagagtgtaaagctttactatttatttttttaattattaatttactattttccaatatgttctattaaaaaaaaaaactaatataaatcacattcctccttaaattaattactattagtgggtgacttttttttaaaaaaagttttttattcaaaaaataatagttttttttttttttttgaagttaacggggttaaatttccaatttatttttatctataattcctttttccaaatctcaaaagaagtcgatactgcccagaagcccgatcaaaaagtgagatcgaggcattgactttaaatagtgttaaaattccaatatttttgtattcgtttatatttatctttaacaactgcttttaatttcataggttggttcattccaacatggtctaatgctgcagaaaacgattctgatgatggacactaatttttacatttccaacaaaagtaatgcagagctttgtaattaacaattttcatgaacttcatataaaatactaaatatagctgcagaatttttttttagttttgatctaatcataattttcttgatatggaattaaaaggtaacatagaaaaaattgagttttaaacaaaaatggaatcaccaattataattcttatcaatggagaaaaatatcaagggttaaactagaatttctttgttag

SEQ ID NO: 24407 - DNA, 8060 bp, Cannabis sativa
tttaaattttattctattccattcatattcctattctcattctcattcttatattttcattccttccaactaaacgccaccttaatatttccaaagtaagtaattgtgctcatcgagctttatggataaagaataagtaaacaaaatagggtaagaacaagggagaagagcagggttcgatcttgatgctccaccatatccacttgcagtaaactccattgaaaccaacgatcaaggctctaatactatgttatgtttgagagagaagaaaagaaaagagagaaagaaagactaataaacaagtgattgtcttactgattggagtttgaaagagtgatacaatatatacaaccgaagctaactgacaagaacagaaattacagctaatttcaaatgaattatacaattttcaggaagctgccccaccaagatattcaatagtttgacagagtcttgcaggcaatctaaaacaaaacatggcacaagtggaaataaattgaacagcagctttcaacattactttcccaaatatttgaactaatgtatatacagtagaatcagaagtaaattttcatctttaacatttgaacatgatgtcaatgtcttatgcagttgtatttcttaatcgtaatttttaactattagattattatgacatcggaaaaactggcgctgaaaatcatcatacgattcaagttttattgtgttatatgcattatagatatcatactaaaaaaatttgaagcattgatgaatgaagaatacaatatggtcagcaacaacattcttttctgtcccctccagtatatataccatttctttctgctattcgtaggctgaaaaatgaatattgtttatttttcttttataaaaaaaaaaatccctcatcagatgctaccctgctgctggctcctaaagccatcccaactatctgggaatttagttacattttccaattgtagatacacatctattggctattctctctagcatatgtctgagctttctccaagtgtcttcaacttaattcttgaaataagctctgttactttgttgcaaaaaggattgaggtgggcaagcatgattttcacttgtattcctgttaatataatctttagatacaattggacagtcaccttaactacaatgttgctcttgtcagaaaatcatttactgcaagactggcatctccatgagccactgcatcatccggctctggcatgaaaagagtcgaagtcgatgcctgcaaattatattcccaattattaatgcagaaaggaactatcagatcatagtgaaatgttagcaataatacatcaaatatccgagtatttagttgtcgctaatcaaaaagttgacaccaatttggtaaaggcggcataaaaaatccttacattacaacaaacgggctggtactatttaaccagaagaaaaactgatatacctagttttatacagctagggtatcttaagatatagtggtaactggtatacaagtgatagatctccaatgaggttcacttatgtgagagggataactaacaagctaagttctttcacttagcttagttgtcatagtggttttgtagttcatagttgttggttatgttctgttaagaactttattagtaggttgttttctgttagagcagtcgttagttgaagagtataaataaatggtttttggttgtaacttgtaatagtgagttttagactcttgggagattagctatctcgaactagctactgttcttctttgtattctggtaatgtgttggacttagtctctaattgaggctaaggtttcaagaaatttaagtaagatttctggtgtgtgtgtgggtttttggctgagtttgtatcattggtatcaaagcaaatctatcctacaatggctgataagaaagtagaatctttggagaaaaaaatagagtttagaaaagcacaaagatctacgaaggaggctattaaccagaccatgcagaaggtcaccgtgcaagctaaggttccggcaaagaagatggcagagacggtggcgggcggcagcgagcttgcacatcggaacaggcaaactgacggcgatgggcagagaccagagaactgcttgagtttctcggtttcacagaaaatcagcgacatggggattttattgcttctagtagtttgaatactaaggttgagcagctattaaggaagttattaaacacaagccatctgtgggataccaaaggagggctataagaagttgacagctgaataccaagaaaagaaagttaaagaggtgtgttttaggtgtagtgagaagttccactatggtcgtgtgcaaaaaggagttgaatgtcataatggttcacgaggatgagttgaaaaatggagaagtgtcaatggaggaagaacaagaaggcaagaggagatatgtacagataatgtggaattgtctctcgactctttggaatgttggtctagccccaacccccttaacgtgaaatgatagattaaggaccagccggtaggggagctaattgttcagcccgagaagcttcttggtgtaagatccggtagcaaaaccaactcgacaaaggaagtcgaagttttaatcaaatggcaaggcttatcatattgtgaagccacttgggagtctgcggcataaggcttcagtttccagattttaaccttgaggacaaggttcaaaaattggggggaagtaatgatagatctccaatgaggttcacttatgtgagaagagggataactaactaagcctagtagttttaacttggcttagttgtcttagtggtttatattatgttctgttgggaatttaattagtaggttgttatgtttctgttagagcagtaattagttgaagagtataaataaatggatttcagttgtaataaggagttttacactcatgggagattggcttctaatgtggtatctcgaattagtctctaattgaggttagggtttgagacacaaaagtaagtgatttctctagtgtgtttgtgggtgttgtttctcggctgataaatctagttttttatactacagctagggtatcttaaaatatagtggtagctggtatacaagtgtaaaagttcattacttccaccatttatttagcaaatcaaattcttaagatgactattagaaaaacaaatatttcataaaatagtgtaaataataaaaagtaaaatttaaaatatgaagtccacaagcaatgttacatttgtgtttttgtaagggaactattaagtaagatacaatgtcagtatactcaactaggtgcacatgcccctgaaaaaaaaggaaaaacagtgtggggttacacataccttcgcatcaagctgcacctctccattgttatccgcaataagacatgcgccgtgtgccttcaaccactcaatacattcctctaatccatctgaatctttttcatcattttcagaagacacactagagaagcccagaacctgagagatgtaggaaacaggtaatgtaggccgataagatcgagatatgcagctcactgccttaaaccgcatcttttcaacatatagatctgcagaaattttaatactgtgttatataatatgatcattcttttaaaaaaaaaaatcattaaaatggagatagcaacttggctaaaactcacccattacacaagtgttcaaatttggagctgttttaaagagcctgaagaacataacatagtttccagaggtaacagcagcacgaactgcaagagcatgctttacagcattatccctttttgcttcccttgataatctgaactcaatttcacaacaatattgaaggtcattacaagagttgcaacatagtagaaggatggtaaatagcgaatgaaatttcctcaaatcataactgaccttgacatggatgatacaagatctctgttgttactagagtgcatgataacacatagtaagttgtatgcagcaaactccatgtggcatccctcaattccttcagcataaagggattgcaactgagattggcactgaaattgcataaaagagttcatcgaaaatgtaacttgtgaagacatgaggtaaccaatattcttttgataaaaaaagaacgaaatatcatttttacaacaggaggtgcaggcaataatatcataattacagcacatttatacttgacaagatcggtcatcaatgacacaatcaaatcgaatggattttaacagatggaataaaataatacacaaggaaaattcttgattacacaggaaaaagacacctgcaaattttctcttcaaatttttattcaatgtattaataagatataatcttaaattaagtcctatgcggaagtactttttttcaaatttttttaatgaagtgttcgttgtagtaacggaacccaacctgtaaattttcaaaaaaaattaaataatttaccgcaccgagataaatttgagttttttcaaacacgcttagaaaagcggaatatgagcaactttgttgtcggtactataaattattcgaaattattcaaaaattaacaggaaggatgagtaactacaacgaacaccgtcgtaaaataaataaataaagagaaattttatttacacccaaaaacttataaatacatgatgcatctcatttcaataatttttattttacataaaatatataattttaattacattaatttttttaaaaaaaaattccacttcatattcttaaaaagtatacctatcaaacaaaaataaattatattttaaatattataacagaaaattaaaataaaaaaagatacaaaattcattaaaaaaaattatacattatttaaaaaaaattatgaaaataaaataaaaataaatattgaaattaacacaaaataatgtgagaaaaaaaatttgaaaaaatattaagagtaacttttaaaaattattttaaacttaatttttttaaatattggggtgtacttattatttttgtggggtgcaaatagaactctccataaataaataataggcaaaaaaaaatactcaagcatgtatttttggtggcaaagattaagagaggtttcttttctccgcaaactaggttaaaaaagaggttcaaacatgagcttgaccgtagcagttgtcttgatctcaataacgaaaaataccctttagagatacgctggaaaaaaacaaacctgattatactcgggcaggtccccaacctccaatgctaatcgtgcatgtgtttcataaacctgaaacataatatggaaatgaatacaatagtaacttctgtccgtgctaaaacccaaatcttcacttggtggtaacggtataaatactgagtcatggtgacattatttaaatatccaaacaaaatacacaaccaatctaagctttaatatgaaagcctcgaaaatataattatttaaattgagtatatgtgtaaatatagccagattaaatgttgcattcatgtattctctgttgttttaatatcacaagttaactattaacgtgcacgagacaaatagataagtagatgttacatgagagagaggaagagagtttttgaaacaaacctttactgttagttgattttgaattctttgcactgttaaatcctgacgaatggacttcaactgatcacacttatacaggtaattcttttgagaattttgaaccataagcagagctttttctagtacttcttccggtcttacctgtgagggcaaaaaggatcaaaagctaattataaatacatgaaaagcaacagttaataaaccaaccaaatgagataataatattacagtagctggatcaggggcagaagtaagccgcagataacgtttctcaatttcctggcatgtccccttgacagtaaaagaatcccagtcaatgtcttcaacggccctgctgccatcatcttcaaaattattgctaagcgccatcacagttgcccttctagaatataaatctctagacacagcaccttttgatttgaagtgatgaaattctgctccatttccttgccgtttttcaaaacgcttggaacgactttcacgtctccttctttcctctggtgaatttgccagtgccactgtacccgtgtaatattctgttaaactttgttccttgtcactatcactagatgcatcaccattgccagcagcaccaaaattgtcaatgagacgctgcctttttcctggcttttgggtgattttgtttgcccctttttgctccactgaagaaaatcttgcatcagttaaatttccatccttgctcccagtattcatcattaaggtctgcacaaattaaaactattacagtctgaaacaaaaaaaacttctatcttctcctttgtcccaaaaattaagttatttagcaatttgacaatctggtgttacaacataatgctacaaatcatagcaaagtttaacattaaattctaaagaactaattcaatctttgtatcgtaataaacattttgtatttagtattaaaaaaaaattgtgcaacttaaagaatatctgaaaaacattaaaaaaaagtgtctgcattttcaagggaattcaaagagaataagaagaggaagaaagatatatgaacccatttgggatagctttttacttttatttggacaggctgacataaaataattttccaaattacaaaacattttaaagttttttttttgaaaaaaagaggagagatcattgtcaaaacattttagagtattttttatcaggacaagatacaaatataaatatattattaagataaaaaataaaataaaaagcatcaaaatttcatagaagctcgtaacaagttctcatctttttaaaagagcttactagagatacagaacctactttgaaaaactatccaaacagataaatactttaaactgatccaagcaatcccaaaagtgatttttggcctctagacgaagtatcgtgttgaatagacccataaggactaaatttaaagacataaattaacaaatcaattttttcccttacaaagagcctaaaaggtgtgttacaaaatcaaatgtgcaaatcccaaaaccacccacaaaaggagctttctaacccggtacccccataatagctttttattgctatgaactattaacgtagcttagttataccttacaactaaacaatcgtactcaatccatataaaactcaaaaggcaacaaaggttctcacgtgatactgtttctagtgcaagtgactggatagaagatagagacaaaaaatgcaaattacataatcaacactgattgtgtttgagaaatggccacaatcgaaggaaaaaaaaacaaaaaacatgcacagactcacaattacaataacaatacctttttgtccctttcattggcatgtggccaacctgcacattttaatgtactttgattgatagatgctgacatttcaacaagtttatcctctggtagaggctcccacctactttttgttcgtctacttggaatctttaacttattttccaatgaagaaacatgagtcaaactctgtacgttgctgcaacaaaagatacatctcatggatcagttgacaacactgaaacctgagacttgagtaaacaataattctaatgctatatcaggtgtaaattagccccagccccacatttacaacccaaaatctaaccaattggttggctcgtgcttgtaaatgttgccatcaatatagaacagaactaagcatggattttatatctacctcttaatcggaaatgaaacaatgtccttaacattaatacacatgtagcaagtgcgggattagatgagaatgagatcaatgtccaacaacatacaatgtttcaattttaccaataaacattagttaacttgttatgttgataactaatttggattacataggaaatgaatatataatagaaataaagtttggacaacaaaaatacaaaacaacaggccaagcacatacatttcagaaaaaatttagtactacttacgtagcctttaaaaaaggcccatgtgtaaaagaggagaaagagaggtgaaagtagagagagagagagagag

SEQ ID NO: 24408 - DNA, 1861 bp, Cannabis sativa
atatattttcaaaatatttttgaaaataaaccaatacaagactaaataactcaagactattttaaatagcacttagaaaagataaattgtatttctaagccaatgtgggataaaaatttaaaatttatttcattcacatttttctacgcaacactctggattattccaaactgttttgtgttgtctaattttgtattgggcttgctgaaagaaatcggctaaattgaataaggtatatatattttacattaattattaataattgtttcaaaataattttgtttaatttatcctactaattatataaataatttcgttttattttatagccaatttgacctcatgttttactatctgtgtaaattagaagtggtggatagtgagcacattcatgctatagaggaaaagtatggttctaaatccaacacaagatccattgcatgattgaggcattaataaaacttcaattaatggattttagtttgagggaaagtggatagtggataaatgtcattttctcgacttattatgattataactttgtgcctatttatctaattttagaaattttaattttattctcttagttaaatgatatgtgatgtaagaaaattattttaaaactttaggtatcattttttgtgaaataatttatcacacaagttagtgagtcaaattttgtacataaaaatttgaagtatgaacttgtgaatcactatacatgactaaaaaatgtgaataaatctttatggagtcttgtcttgtgttccttgagtcttggagtctactttgggtcacttttgagaaatctgataaaattactattttgtccttggagttaattttgcctttaaatgcttttaaatcttcacacaggtggtaaagtataagacaataagattagtgttgtctttagcaacataattagaatttaaagttgaacaacttgatgttaaaactatacctttctaaacgaattattggatgatgaaatctacatgaagcaaccacttgagtttcaggtggaaggaaaatgagctaaaatggtatgcaacctcattaggttattatatggcttgaaatagtctccaagataatgaaataaaatgtttgatacttatatgcaacaaatcaggtttgaacaatctgcctatgatcactgcttgtactataaaaatttggtgttatctacaactgtgtttttattgctctataggatgacttgctcatcatgtgcaatggccaatcagtgagaaaaacaatcaaagtcaagctcaagagagaatttgagatgaaaaggagctaggaccgattcaaaagatccttggagttttgagaaacaagaaagaaggaacaatgagctttaagcagtccaaatacatcaagaaagtcattgagaaattcaacatggaagatgataagagtacatctataccatttggtggatagttcttcctgtcaaaggaacagtgtacgaccagtgcgaaagaattgaaagaaatgaagtatatgtaccctacgtcatagtcttaggacgcttaatgtatgtgatggtgagcaccagaccagacattgttcatgctctaagcattctaagtcagttcatgtccaatttggattagaaggccctcaaataattattaaggtacttcaagggcacatgagatttggtcttacctatgagaaagctaaaagagaactggaattgaaagggttcgtgtatgttgattatgcgtctaacagagatactagaagatcaaccactgttgcgaaaaatattaattactacgcaagtgcacgcaatcaagtagtatactcacgcaagtgaggtcgaactacagggaattggattaattactac

SEQ ID NO: 24409 - DNA, 2348 bp, Cannabis sativa
cagctctctctaagctcctcgatctctcttggtggtggaaaaccggaccacaccctaatcactcaagaatcattcaccattgtaatgggtaagttgggttttaagcattttgttagacattagtaatagtatgtagtttattttcattatatgtgtgtggtatttgttgaaacgggtattttttggtctgaaatggtagatatggtaaatcttgttttctgtcggaatctggattttccgaagattatcgacaattagtcgataaaatattgatgcaatatcgataatatgcgaaggaaggtcagggatgaccattatcgacatgatatcgacagtttttcgatatcatgttgatgaataaagtaatttaaataaatttatatatttggcaatgtatctacaatttgtcgatatttttttgacaatacacccaattaatttaaattgttgttgatatttaggaatatttgttgtatttatgtttgtcgacaatttattgatagaatatcgatatattattgactttaagacaaaaaagattgaaaacttttaaacagtagacacaaaacaagcaagcgatttggtgaaggcatcggctagttcaagtgaattggatatagggatgagccttattgaagagttgctaattttatctcagataaaggggcagtcaagttctatatgtttagtccttttatgaaaggttgagttatttgcaatgtgtatgattgagttgttatcacagtagatgaaggttggatgtagttgtggtatttgaaagtcatgaagtaggtattgcaatcatattattttgcttgttgttgcagccaagcctcaatattcagctttttctaagcttttagagattgtggttgcttctttgtgcgccaagaaatgaggcaatcttttagaaaaatacaaaagctagttgtggaacgacttgtaatggggcatgatgcccagtctgaatcagagaacccataaaggtgcaatgttgaagatttagaatagaggagtccttgactagggctgtctttgaggtagcgaagtaaatgatgaacaacttgaaggtgtgtagtgcgtggaattatcatgaattggctgagagagttcactacaaatgtaatgttgggtctggaaagagtgaggtataatagcttgccaacaagctgtcaataatgagaaaggttatccaatgcttctccatgttcgttgtcaagtttcagcttagataccataggtgttttgttgggtttactgcccatgtaacctgaatctttaagaagctgtaatgtatatttcctttgagaaaggaataaaccatctttggcatgagctatctcaaagccgaggaaatattttagatttccaagagccttgagtttgaacttgtgatgtagagagttttgtaatttgtggagaatagtgatgttaggactgatgatgatgatgtcgtcaatgtagacaaggagagcaatgaaagtgtctttggttcctctggtgaacaaggtgtagtcagcctatgattgtatgaatccttcttgaattaaagcatctgaaagttttctgtaccatttcttgaaagattgcttgaggccgtaaatagaattgtgtagtttgcacaccggcttggtttctacattaagagaagaagaaagagtaaggccttgaggtagagacatgtaaacctcttcattaaggtctaaattaagaaaaaacattattaacatcaagttctaaagtgtgttaattcttgatagtagaaatagcaagtaacaatttaagtgtaaccattttggcaacaggggagaaagtatcaaagaaatatagcacatcttgttgcatatacccttatgaaacaaggcgagccttgaactgttctacgctgccatcactgttaaatttgatcttgtacacccattaacatcctatagctcttttatttgttggcaggggaactataatccaagttttgttacctgtgagtacttttagctcgcattgcatagcctttagccattctacaatttatataacttccaggtatgttcgtggctccttgacagaggaaattgcaagaatgacagccttgtaggggctagataatttggaataagaaacaataaatttgatataatgacgtgtggaagaattatcttgaatgagtgaatagcacttaaaatcccttaagtagtttggtgatttagtttgtctgtttgatcttcatggtgcatcctgagaaggattttgaggaggtgttgtagatgcttctgttgtttcgacaaacgtaggaatctcctgatgtatatctctttcgtttgtgtcatgtacatggggagaaggattcg

SEQ ID NO: 24410 - DNA, 1605 bp, Cannabis sativa
aatttcagctttcagtttggactttgcagtgatagactgagcacgtttctcaaaatcttcctatacaagatagtgtcagttaggaacaaaactacaacctttaaggaaaaatttgtacattaatcggtagcttttacatcttaccccaaccgagggaagagaggctgctgctgccttttgagatgcaccaaagcctttcttctctatttgtggctccttactttgaccccatatgacaggaaccaaaagaacaccacgtctaagaagttcagtccggaacctgtctgcctgctgcattgctacagaaacagtctcctttttccctgctaaaataacctaaatccaaagcttgattgagttttaacgttgaaaaaaagtgcacacatcattaatagtacgagagaattcaattttgatactaacaggcctaacagtgtcccgcaactgaacgagttcaacaacccgattagtggaaaggcgcagtggcaatcttgatagagtttcatctcgggatatttgggcaagttgttcttcctctttcttgttgtcccaaataaataatgccacaaaagcaataatacctggaggttgctgattcaaaagtttagccatgttaagaaacacttagcagttctatttaaaaacactacatgattcttgatgcaaatgaaaattcatcatatacttatagcagatgtgattatcagaatgttttgcattgaagtacaaatgcttgacacttacctccaatgttaatggcagcatttccaacggtttcccagagatcaggagcatcatcaccgccttcaattgcacggagtagcctaggtatagtgagaaacagtgaaattcctgcagctgctgtaaaggccacagaaaagaatctcctaactccacgaaatggagcttgaacttcactgatgagtttgagatctcttctaaaaccataacctacatcttccccacccaatctagcctgtaatacatagaatctctttgtatgtataatgcatagaatggaagagatcttgcaaaacttatgaagttatcacttagcaccaagccagcttggttcaataagttataagtcaaaactaatcaaccgagattcaaatttttaccatatacataaggacagtagaccatcttccttagcatatcaaagatttataacaataacattgaacatacaaagtttagcaacatacctcttcctgcaattccttaaattcaggcaaggccctaaaggatgccaagtcgggatcattcaaaattgtgccaaatttgaggtcatattctctcaatgcagtacgaagacattcagcagctttctttccttcccctctacctcaaaagttgaaaaaagaaacaaaacaaatacgtactcatcgacttagctaagaattcttttgaaagagaaacactatataaatttaatgagattgatacctatatgcatgacagcatgctttgttatacagtgcagcttgagcctctattgggttgggatctaaatcaagtgctgtttcaaattggaccaaggcatctttaacctgaaagtccatgaacattggacaaagacaagacatcaatttctataatttt

SEQ ID NO: 24411 - DNA, 3405 bp, Cannabis sativa
  modified_base (135)..(135): a, c, t, g, unknown or other
  modified_base (347)..(350): a, c, t, g, unknown or other
  modified_base (3375)..(3379): a, c, t, g, unknown or other
atttcggccgccgttcacgttgggcaaatgaggatgtttgaaagccatcttcaccgactttattgttagaaagatggtcgacattcgtctaaaatcatgcggcgtcacaaccgtcaactgggtggttacgttggntgattgaggatgtttgaaagctggccgaacccactttgctgtcggagtgttgtattgctgacactcagttgaaatcatccggcgtcagcaccctcctgtgggatttcagcaggcgttcacgttgggttattgaggatgtttgaaagccatcgtcaccgacttcattgcaagaaggatgggtgacactcgtttaaaatcatgcggcgtcacannnntcaactgggtggttacgtttgttaattgaggatgtttgaaagctatttaaactgacttcactgtcggagttatgtattgctgatactcatttgaaattatcttatcatttacaagtagctaagtgttaaaaggataaaatacattgaagggtaaaaagataattttgaccctacttgatgtagaccgtctataaaagatcaatgattaatttgattgaaataatggataattcataacatttataagttggaggatatagagcgttctatataattaagagtgtaatgatgaaactgtagtagaatcatgagaaattaataagttaggaaatttacgtgggtaaattttagatcaacttattgggagcttgattatacaagccaatgatccccacaatacctgagataacatcatcttgaagaactcaagtaattgattttgttaatcaattaaaattcataaattgtctatgtcatgtttagtgaatttactataaggtctgatgttatatttaattgagaataaacgagagataagcttttatttattaattatgaagctttgttattttaattaataaatatatttacactacattatatttgaatattattcataattattaaatcaaaattagtatttaaataagtttaattaagataatagataaatttgtgaaagtcaaatttatttttaatcatggtatgatataaaatcaatggcaaaaatccaacttcgcccaacaactataaggggcggtggcctagactagggtatctaggcccaatttgtttttaatttatttatttaataaaattaataaaagttttattagcaaagtgaaacaaaaacttaagtcttcgactatttaatggaagagaagagagagttgtctacacaagcaacaaagcaacaaagttctccctttctctctctaagtttcagccacaagacctctctctctctctctttggtttcaaccccatacaaccaagagatcaaacctttgtgtctttagcttagcccacactttcaatttgatactcaagaaattgtggaagattatggtattctcaatttcacattcatattcaaattcagagattaaagagatcctggttctacacttgataataccttgctacagaaagaaatcaaatgttagagtgtttgaatggaaggaaaaactatattctgctgcaatccaatgtatcaaatctaatcttttacatttttaaattaattgtttatgttttacatctttaggatgttaaatcataatgttataatcaacatacatgtttagtaaataagatcctggtaaaataagttccaacaactagcatcagagccttggtaccatttaattttcacgacttaatatgtttaaaaataattttttacatgttttggttgtacgtatttgatgtgattgtttatatgaatgtttcattgttatatatattgtctatgtgtgtatatatgtttttttatatttattgaaacattagttggttataatattgcataaacatatttattggaattgaaattggatcaattttgattcaaaaagaactgaaatggctctaccattttttgttttgcacttctcttaggtgtgaaaattagagtcgacccatccatggcatgtgttcaattgaaccctagccatgcatggcatggcttcttctctgagaaagaaatcccattgtttataaggcaatgcaagaagcatttcaatgacgacgttctctggaggattgactttaacttaaatggtgatgagccagtggtcgaagaagctgaaagagtcgaaggctacaatcccaagcatctacacatttctcctcttgctgatgcgttagttgtagggaataaggaacaagctaaagatgttaatgccatagaaatcttattggcttcataggatattgtcttagtttattttttcttttcctatttttagcttttagctttagtgtgttagtaggtcatcctaggtaacctttcgatgtggataagcctttgtaaaatattatcaaatttgtttaaattaaattagaaattattccaaattaattaaaactttatttcaatatttgcttttttttactttattcgttaccgcttgaccatttaacacttgcacaatacactatgtcttaagaaactcgatattgggatgtatgtcattgtttcttacagttatctttaccatgagagtactcacacaaatatgcaaaaaaaaaattgaaagctcgtgtaacatgtggctctcgtataccattacataacctatgtgcccccaagtgatcaaagaagtgccttcattggtcacttgccataccaaatcaccctaggctttcttgatcatgactcttaggagactgttacatgtgtgagcatcctccacttatctgaagattcgtgggttggaaatgtcgaaatcactaaagaaacaactaaatttatctcaagaccaactctataaactttactcagcacttgagagtatcgccaagtctgtgagctaaaattgattaatgttaatgaactaccaaaaaaactttgttcagcattgttattcatcaaattaaatacaattacattaatgtgaacttagctaaaagaagaagtagtagttgcaagtttttgttttcatcaaagcttaggtgaagtgatccccactacactaatgccctatttgactattagtgtagggaccataccttagtgacggacctcttaacctagagacaacttcgttgcatctcatcagtttaagaggcgatcgattcactttctcatggtaaagtgaatctcactgtgaaaccggttgttttgaagacaattgctttattggtattgttgtcgcatttgcaccctattgatctcacttttagccaacgacagtgagtcttatttagtaagcgatacgtaatttatagcaatcgatatatagtaaagcagtgtaaagacacaagaatttgatagaggtttagccccgagcagttcggtaannnnntaatcctcgttatttgtattgactca

SEQ ID NO: 24412 - DNA, 4200 bp, Cannabis sativa
  modified_base (502)..(510): a, c, t, g, unknown or other
aaagcacttttaggaatatgtttagatctgtgatttatatatttcttaagtgttttataaatcctaacaagtctctgtcatcatttcagttaaagttttttagtgaacaagtcctgcatgtgtagttaatttatgaattaattctccttgttttttcttggaaaataagtacactaacattcatttttcaaatttgaatcacactcttattgttttttgttccatttttctattctttcaaatatatttgcagcaacacgtactactcaaattttactcattggtatactttatttcctaatttatttaggaaaatttatatggtatgactaacttttgctatttttttataaaaatactaccaggtgatattttttacttttttactgtatttttttataagtttcataatgcagtatactgtgttaagttttcactggtgttctactagaattttttagttgttctactgttgttttgttttgtgttctactggtgtttnnnnnnnnnacagtatttttgaaaacttttccgtgttacagtatttttgtaaaacttaaccaaaattctagtatttttgtaagtttccatttatttattgtttcaggatcagaactttgattttgttttaggtttaagttttgtttttgggtaagataataattttattaatacccaatattaggattttaacacaaaaaaaacaacaatggagaaacagatagagagagaaagaggaagaagaaagagtaaagagaaagagaatcaaaaagactaaaaagagagagaaagaaaacaattgtattaattgttttgttcaagtgttcagagtacacgaaagggttatatttatatacaatagaaacaaagagaggaaatgaaataaacgagagtaataaaataacagcgatccaactactctgtaactaccattaacgattttgtaactaactctgaacagaatgtccctaatatctccccgcaaactcacaattggaaggacttgcaattatgagtttggtacgaaaacatggaaagctatggctaggaatagacttggtaaggccatctgaaagttgttctattgtaaggggcatgcttaatttgaacttgtttacagaggactttttctcgaacaaagtaaagatcaagttcaatatgtttggtgcggccatataaaactggattggcaacaagaagcacagtactcaagttgtcacgccaaacaattggaggctgagattgaggtatctaaacctcagtaaagagggagtgcaaccaagtgagtttcgatacagtattggctaagctgtgatattcagcttcggtacttgatcgacttgtagtttgttgctttttacattgccaagtgatcagatttcctcctagaaaaatggaaaaaccataagtggagcggctgtcatcaatgtcagaggcccaatcggtgtcacaaaatccaacaagatcaattgaggaggacttgtgtatgtttaggccatattctattgttccattgagataacgaaggatccatttgacttctttctagtgcggttgtaatggggttttcatgaactgacaaactttattaacactgtaggcaagctctggccgagtgattaacagatattgtaggacacccacaatcgacccatatagttaggggtgtcaaacggttcatggccatgagctgatagctttaaactactcaccatgggggttggaagtggtttggaatcctccatttgggatttgatgagaaggtctctaatgtacttggattgggataaatgcagcccttgtggagtggttttaacttcaatgcctagaaaatagctcaagtccccaagatccttcagggaaaattgagaatttaatgagttgacaatattggcgatgaggttagagtcacttccagtgataataatgtcatcaacatatactaatataagagtagtagatgtagatgtgtggaaaatgaatagagacctgttcgatttagatgaggagaatccaagagcaagaagactagtgtttagtttgtcaaaccaagcccgaggggcttttttgaggccatataaggctttgtgtagtttgcacacctaatgaggggcagagggaagaacaaactcagggggttattgcatataaagttcctcatgcaaatcaccattgagaaatgcattgttaacatctatttattttatatgccagccccttgatatagctagagagatgacaactctaatagtaatcaatttgactactggactaaaagtttcagtgaagcaaaaactgggttgttgatggaaccccttagcaacaagctgagctttaaatttggaggtacttccatcaagattctctttcttcctataaacccatatacaaccaatttcctctcttccttctggtagaacaacacatgtccatgttttattttctttaatgccaccatttcatcagacatggcacggttctaatgttcactctagagagcttgcttgacactaataggttcttgaaaaacaagataggctttcagctttcggatgccagacttggcatgagtctgcatcttgtgagagttgatgggaacagtagcaggaatgttacaattggacacctcagtgatagttggttcagtaggaattttactcacagtagtgttgctcatagcagcagcaggtggaacagcactgttatctatagtgacagcaggaataattttctgcataaaagaaataaatgttgttgcagtagattgcactgtaggtgtatcaagcacaatagtaggttcttgcacatgtaaagatgagctacaagtagtatgagagttaggaatagatgagtgatgatgcctttgtgcttgaatagtaggtataagctgatggatagaaagaagacatgacatcaacagtgatgggaggatggttttgtaaagcatgagggaatgtgtactcatcaaatataacatctctagaaatatagactctactagactgatccatgcatttgtaccctttatgatttagactatatccaagaaaagtaaaaggagaggatctaaactgaagcttatgcttattgtaaggtcttatattaggataacaagagcagccaaaggttttgaaactagtgtaatctggtgagatattaaaaagagtttcaataggtgatttatgcttaaggataggtgtagacagcctattatggatgtacacagctgtcctaaaggcttcatccaaaaactttaaaggcatggaagcttgggcaagtaatgtgagacaattttcaactatatgtctgtgcttacgttcaactaatccattttgttcatgtgtggtgggagatggatgtctatggattataccagcttcttttagtgtattggtgaatgacctatattccccacaccaatctgtttgaaggacttttatttttgtgccaagttgcaattcagattcagctttaaaatgttaaaatgtttttagtgcctcatctttggttttaagcatgcaaatccatgtaaacctagagtatgcatcaacaaaatggatgtaatacttatagccatttgtattgggaatataagagggtccccataaatcagagacaaccaattcaagaggagtggtatatgtggtttgagaggcttttgggaatgataatttatggattttgcctaacaacaagctgaacacacagaattggaatttttattgacattttgaacattacaagcatggagcacagacttgacaaccttttcagaagggtggccaagtctattctcccaaatatcaaaattagacttattatgtgtagtgtgcataggtggagaagcagtatttgaagaggaaattgaggaagtagcagtaagtgtttgtggctacatatgctgtgaaaaaggggagctgctggaaacagttggtgaaatggaagagttcatcaagttcagttgtgaagaatcaaaggaatacaggccattctggtatgtcccagtcaatagcaccttgtgatgaacctgatctttgacaaagcaaatatcaggatgaaattcgaagaacacattattatccctagtgatttaaacacactcaacagatttttggttagtgcaggaacatgaagtaaattactcaatatgagaggggaagtaatagatgaattagagagaaatgaatgaccaatgtgctt

SEQ ID NO: 24413 - DNA, 1771 bp, Cannabis sativa
aagatgagtaagataccctatgcaagctgtatgggaagcttgatgtacttcatgatatgcactagacccgatctagctcatatcatgagtgtggttagtagatataaatcagatccaggatttgaacattgaaaagctctgaagtgattcatgaggtatatcaagggaacattagagactagtttaatattcaacaatgaaagtcaatatagagaagaagttacaggctttgttgactcaaattttgcagctaatatcttttattgaaaagagaaagaggtcgcttgtcttaggccgacctccccccattatagtattaatgcactcacttgtggcggaggaaaaccgtggtaaataaaataaaaaatgacacaacgagtaaccctttacaatataagacttacaaaaaaaggaaactctcttcaaagttttacaacatcaataaatagtttcttatgcaagagatttccactctctacttaagtccaaaaatgagaaattctcaaaatgtttggacttatacacccacatagctgacaagaactttattttctcccatagatcctctgtagagctttcacgaccctaaaaaattcttgaattccttcccagccaaaccaccaaaaagagtgctaaaatcgcagttctccatagtttagttttacgcttgctgccacttaaattgctaaccaacattgtccgaacaccgcctggtagtacccactccagttcgaactttgccaccagatacaaccaagttttttgaacgaaacaacagtgaagaaatagatgttccaaatcttccccattgttcttacaatacgcacaccatccgggggagatgtaaatataaggacaactcttttgcattttctcatgaacatttactttgctaaggctaatagcgacccaaaaaccttaacttttgatggagctgatcctttccatagtgtttttgtccaaaaaagttcactttgatttgagcttgagttaagccagccaaaagtaaatttgcaggaaaagataccacctagattaggcttccatagcctaatgtcaatgtccacatttaacaatttgacatgttccagttgttggaccagactaatgagactaggaacttctctgtccaagagatttctcctaaatttgaagttccatctcctcatgaaatcacctggtagcccttcatccaccactaattcccgaagacttgctttcttagcttaagagattactgctaaatctaggaagtcgctcttctgtaaagaccgcttaactttaatttgggaattagcgtatacttaggttttaattatgaaacttgcatattagttatgaattatcaatttacggagatttatttgaattcataaggcattttatatgtcatgtctggaatttcatatttttgcatgttttgtgcccgacaacattagaacgcggtgtttgactattagaatcacatcttagtatttctagtatagcacagaattatagttagaaattaggaatgtcaggaatagttgagatgttagaattgacaaaaatacccctaagtgtttttatgacttttagtacgagcaaggacatttttgtctttttgcctaagtttgctttgtcttttagtgggtttaaattaagtttaataatttgattttaggctgatattaatttaataaactttagttatttgtctcattttacaaaaaaatatcaaagttagaaaagagagaaaattctctctctttcaactctctctctctctctc

SEQ ID NO: 24414 - DNA, 2382 bp, Cannabis sativa
ggttgtgttgtcagactttattgcgtgtggcagttccaacacgcctcctcccatgcggcattaaatacgaaatgactgctcagagggagtctgacaccacccggagatgctgtgatgctaccttgctctccgggagcatagaaaaccttgcatgccttctcgggaggcatatccaagataatgcctttctttacaaagacttagctattaatttaagtgctaaaccctttgtgtccacgtgtccttgtacggttgatctacgtatattgggcaaaatcaggggcaacaaccataaacttgttggggtaaatattttaactcaatctcaacaccatttttacttaacactttttactaatgtctgtttttactttattctttttaggtaaatttgttggcaaagcgctgttcagaagcattgttcaaaatgtccctggagctggagaatcttagagctaaacgagaagcttcagacacagagggctgaagctatggctaaattgaaagaagtccaaaaccaagcgaaggagctggtgaattgccaagtcaaaaagaggttgcagtctgctgtgaaagatgttgtcgcttcttacaaagaggacatctagaagatgcaaaagcacgggcacacgtataaagagcgttacaacacaagtgagcaacttttagagttgtctactagtgaagtatttttgtaagaaaatgtgtcaaatcttatatagatgagagagaaaataaaaaattgatattttaagatgatagatgatgtgtataattttctaaatcttatgtggatgagagaaaaataaaaaaaaaataatattttttaaatgatgtgtgtaatttcgacaactataaatggtgaacattattattaggcactaataatgcctaagaccttctagacatgtcgcattgtgattggatagcaatactctttaaaaattattacatttaaatgtatgagccccgatacttaattggactaataacaatataaatacgtaagaagatactaaaaactactagtgccctttagcatttctcataaatgatgcattcgttgaaaatgctataaatcaaagttaaatagtgagactcacaagaattaataaataatacatttaattacatccctttaccacgaattgtgtagtgtaatggtaggaattgcctttacgggcatcctccttcgcttgggtcaagggtttgaaacctacctaagcccttcttgaaaggaactaaagggaaaaaggcttggtccttgctggaggtggtttcatttgtgtgatgagaactcttgaggtaactatcgatgacttaattaagatacgctgaggtataacactcttatatctaacacgtgatctctgaaattgtcaaaataatcgaaggagtgagaaagagatctgcaccgcgtgatttcttctttttttttttcaaataaaaataaaattaataaataataccaataacaaaaaagaaaaaaaaaacaaatagatgagacaaaaccaaaaaagaaaacatatagtaacataataccaacgacaacaaaaaaaataaataaagtaatagatgagttgatttaaaaaaattcttttgttttagcaaattgaacacttttatttctttttatttcatagagaaaaaaaattgaacacttttttttggatgatacattcgagagagatgctttgttatattttcttttcaattgaatcaagcaaagaatttcttatttatttaaattatctttatagtgtatatatataaaaaaaataacttatgatataaatatttaaatttaatttttaattcatttaaaaaaaattaatttttaattataaataaatatttaaatttactatttaacgataataaataatattttaatttataattttaaaatttttgtgagtatataactattaaatgttaagtaaattatcacgtgataaactttaattggtttagatgataatttttattttttaacttttaaagttaattgaagtataacaataaataaataaaacgtgaataatgactgtacccattaaggtatttatatttcaaattacttaaaaaaaaaaaatttaattttcctttaaataagacaatagaacgattttttttttttaaaaaaaataaatacaaataattgtgtttaaattaaaaataaataaataaaaaaatgggaccaacctgccacgtaaaccttaacactttgaaacaaaaaaattaaactctgtccagtgtcctcttctgcgaaaacacgtgtcaaattcagacgcgaaactcgtgtgaaaaatcacgtgattggcatgctggtccttccgttcctcaaagtcataaaaacaattttttttagtttttagtttt

SEQ ID NO: 24415 - DNA, 3537 bp, Cannabis sativa
  modified_base (582)..(585): a, c, t, g, unknown or other
  modified_base (613)..(616): a, c, t, g, unknown or other
  modified_base (643)..(646): a, c, t, g, unknown or other
  modified_base (673)..(676): a, c, t, g, unknown or other
  modified_base (2740)..(2741): a, c, t, g, unknown or other
aaacaagaattcaattgattggtacttagctacagtcctcatgggaacgatctcacttacctgagtattacttgttaaaacgatacgtatacttgtgtgttcgatttatcacaacaaaggctcaccaagcttgttcagtgggttaccattaacatcgtaatgacccaaaggacagttagggaggacaatacaggtgttgtacctcctcctcctaactgatgcaacctcctcatgatcagactcagcatcgggattctcaaccccctgatcaaccccaggatcaccattaacatgaggctgattagcctcttctacaaccctaactcgaccgcttgtagccaccctagctatattagggtcactcggaggtactctacgacaagtctgcttcattctggctatacatacaaaataaataagggacctatgcggtcgtcacctcccttatccaacacccagagctacctgcatagcagagataaggggaggtgagcaacctaacaaagctacaaacacattataataaattgtaatcaagggtaccttccaggttaattacaatgtacaaggtcaattatcgannnnaatgtacaaggtcaattatcgaccaagnnnngtacaaggtcaattatcgaccaagtannnnacaaggtcaattatcgaccaagtagcnnnntaagtacacttactaagacatatagtaagtcctaagttacacaattgactataatggactcaatactgagccttatacagagttcctaaggggaaccacacataagactattattttatatgcctttaaggctatcatgagaccctaaccgaggtcaacaaagggaagaagactagctaccctttggagccttggccttggctcgccaagtttccaggccttaatgaccagccaaaccccatgacccaatctagtggccagccaggaatcccttttccaggcataggctggccagcctaaggggtacatccctttggccggctagacccctttacagccaccctttgttggccaggtcttaaataagaccttggccggtcaaggcttgtacgaatccaaacatgtgttttttgaagaactcaaacacgttcttcgtgttcttcatgactcaaagagccaagaattacaacaaaggtcagattcagatcttttttgtcaagaaatcacacattacatatcctatggccatcatgcagatcaaaatactgaaaggacaacaatctaacgtaaaaattgatggatattcaaagcaaagaataaagttcatgcattcatagaaaaatcaaccaatacaagtgaaatagcagaaatagaaagcttacccactacaagaaaccattgaggaggaatgtgggaagcttggatcgtcgaaacggtgcaaaaatcacgagagaatagtgcttgattggttcgaccctgtagtgggaaggaggagcttcttcaaatgaaaatctctagtgagaagtgaaatgtaagaagtgaaaagtgaaaaacgatttttcccccaaaaaagcacttatgtagtacatgtggaaccctttgttcacttacttcacctacataacaaacagacaaacaaaacagttagttttctacatcgaataagatcagacagtgaaggcaaagtaattcaaaaggctaaaaacatagcaacttttattcagcaaaggctacaaaagtctcgaaccgtaccaatacagttgggaagtccgtatccgtacagacatctacacagggacttggggatttttatcctctagacttggcattgtttaggtggattaaatcagtggcaggtggtagtacaactcaccaacaagaaggccaagtcaataccatagcaaacagggaccccgactctcaaacgggcatcaaatgatagaccagcttcctcacaacagctggccagccacccctggtcggccctatcaccggctagcctttggaccgcaccgtggccggccaacttgctccctattagtgtttggctggctagggaaaggcctgtacggtttttcagtgcgattctaaatgtggactgcgtgatttgggctacaaattgggccctaaaagcccaatggaatagctgaataatatctatgttcaagggcattttggtcttttgttattaactaattaaatatactaatatctagggtttcaagttgtaaattagggtttaggcttcctatataaaggcctaaaatctaacctagaaaacctaagtgagaactaagccactaagtcaataagcctgatactagcctccgagctctaagcctaagtctgataactctgttcctcacactctctcacatgcacatacaagctatctctacacttgagatttgtcaatctcaatttctacattgtatccttaagggtgctatatcatcttccacttatagcgatctggatggtattaaccctcagtatgaatataactaataggggagtaggtcattaccaactatctaagggggccgaacctctataacaattctgtgtgtgctttactttcttgttccaattgtttaacatgtggcaaatatcaaatttatacgaccctactgtcagttgatcaatttttgaggtcaacaatatgtaataaacatctttcattaacgtgtcctttaccatgaaagagtttatcatatcacaatgatgatcattagtgttcattaagctctttgattcacttgttaaagtttctcagagaagatnnttcttacaacttctattttgggagcttaataacatgagtggttgggagcatgttatacactagtggaatccaagctttcctaacggatcgaatattagtacccttatagtgattaattctttgagtgctaacagttgatttaaatctaaaataagttatagattaactgtttacattgaattaatggtacataaggaataaagagataattagaagggtaaaatagtattttgaacaactctagttatgaactaataattgaagggcggactgcttatattgattatatcaatggactacaagtaacaattctgtaaacataattatatattatcaaagagcgcgattccataattatacttgagtaataatagaattattaaacaagattattctattgatgagatcgataataatcaagtatttattgaagctttaaaatatagatccatggtcctcgagtcacctctgtacaacactgtacatgggaagattttatttgatgaatgaattttgagtgagaactaatttctatgggaaataaattcttaggggaaaatagtaatttgtgaaattattgtttctattaattattacaattttgaattgtatatttaatggtatttaactatttagttttattagatgaaactatattaactagttaaatattacattattcttaaataatattaaaaagagaaatatattattttagagaaaatattattcattttaatccttgtgaaataagatataaataagaattaatcaattattattcattggtaaaata

SEQ ID NO: 24416 - DNA, 4291 bp, Cannabis sativa
aaataaagaagaagtgcttaaacaatgtcttgagtagttttcaatttcccatcgagattccattccattaagagaattgattgccacgcgagaatcactttcgacaataacaaaattttgccttttcttcgttgccttctccaaagccaaacaacaagtagccacctcgccacacaaagcatctataaaatcaagtcttgaggtaaacgcctcacaaaactatcccttgtgatccctagcaacaacagcaatgcacatagcctccattcctactctaatattacaattcagtttgatccaatcaagcgaaggaggactccaaccattcattaacacatacttgctaaatcactatacatgccagagacaaaagtaaactaatctattttaaccagattatctaactaatctattgtacaactacattagaaatccgaataacgtacttgcgaaatcctctaaagatcatataaacatttagttgtcattttagtttaattactatatgaaggcaaaataaaaaagaaaaaaaaagtgaggttgtctattgaactgtttaaatcgtcaaaccgcccgcatcgttaaaaaatacgttttgaattctttagagtgtggtcttgatttttttttttttttaaatcgtgcgatgcagtatggtgcagtttgcggttttgaattgttaatatgcgattcaaatcgtaccttaccacatattataaaaatgacaatttttatatttatttaggtgcaatatttgaaggctcagtctaaagcccactaattattgtattgttaaaattaattttttttttatatatttatttttaagctttatagtatttttgacaggtgttgctcaagttttgttatatttgtgatagtttaattatttggtaatagtccaaactacagaaattgcaaccacactattttttcaatgcaatttctgtaattttttagtttcacggtacgagttcagtttgagaaattaaaaaaacaatatttgcgggttggtttaaaaaaaatagtaaaaagctgcactactcacacaaccctaagaaaaaagtataacacaaaaacgacaagtcgtctagtgattaagaaaaaataggaagcgggaagagtctttggggagaaagagttctcgtcttcttcctttcaagtgtttttcgaattcactcatcccaatcttactctgcttcactctgtaatttagggttagggtttcgtaatagctcaaattactcaagagttagcgaagctggagaggcaaagaggattcggcgaccaccaggtccaggattctcaccgcaatttgcatcccgggacttccacttcctcttcgtcttggtcttctggtgactttcaccataatcatcaaccctactatcaagaccaaagttttaatgatcccaattacaataacactcaccagtcccactactaccaccattccgttcgccctgaccaccactcaggcctcttcaatggcgccattacctatggttcgggtcatcacgtgccgatgtctgaacgtaaaaggagttggtctcattcgaacagaggaaactcgccaggttttgtatatatatatatatatatagttcatagcttctacattccatctactcttttgccttctcctttccataactcttaatgagagaaatactgcaaatagtctttttcacttttgtcttagaactcatagcttatgtggtatcactatatttggaatttatgttgatctatgttgttataaaacctttaatttgttttgtttttgtttatgtttttaagatcgagtagatggttatggtcttgcaaaactttatgtttctcatattccaagaacagcagttgagcaagatgtaagttataactaaataaagattgatttttgaagaatttattcaggatactgattcaccttgaacttccatttagtgttgataccaggctatagttcgaagactttaattcaaattctgttgtatgtgctactagctctgctctaactattaaatgtttggactttgtcactgtattttagatccgtcccctgttcgaacaacatggaaatgtagctgaggttattcttttgaaggataggagtacaggccaacaacaaggtatattagtgttcatctttgatgccttggttagtattgttttttattttcttatatttagtgagacttttaagagcactatttagtttcctaattttattttaaattatatgtttcaccatttattcaggataaagtaaattaaatcgttattagaaagcaatgattttgctagtctctattgttttcatttttcatcacattctgaatttcattagtcgtggactaggatatgccttgtagctgccattattgtattgatgttgcatatggttactccaggaatgaaatggatgtagttttctcttacaggaagctgttttgtgaaatttgcaacaacatttgaagcggacaaggcaattgcagctctaaacaatcaacattattttcctggggtgagttaaagcttaatggtactgtacatgtaggatatgaacactcttgttgcctgtgttcacgtcaacttagttattgatatagtttttttgtgcttacgttttttaggaacaagtacctattacagtgaagtatgcaggcaagccagatagagaaagagaaagagaacgagaacgtcatggtatatttcttatctttgaggcaatgcatttcgagaccaattccatagtactgcctatatatgatttcatagttaagagtaggcattggatctcatgtcggtaactacttttgtcttgcacagctcatgtatatcacattaatcaacatttattatatcttatacaatcaactctttgcgaggtgctaaaagtttgatgcagagaaatctggtccatatggttataaagtagtgcttctaaaaatatttttttatggcttcctgatgaatgtacgaacaactggttctttactggattttgtatatttgatggaaatgcatatccagtaggatcctggaggggtagctctaattgtcagacatgtggtttagtcccacaagctatgaggtttgacaccctccctgggagggacactagatataatttcttaagccagggttattcaggattcctagtttccgtaaagaattgtttccatatattagtgatttggattttcttcagtaatatgggcgcatttggattagtatagctgcctcttgatttttcattgcaacagtattactctttgcagttgtttatcatcttaaaatacatcttctgtaggggcacctgataataaagtgttcgttgcgatgttaaacaaggaagcttcaagggaggaaattatggaggtatgctctcaacaactatagaatgttttccacaaaataattattttgtacttatgcgcatttctgtattcattattaaaacatcaaaatgtcttaaaaaattcatataatttttctctttatatttatactgatgagaccactgtctcacatgtggaatacatattttcattcacttttaaattcaatattaattattttgcgctttcatgttaccagttctgttttttattaattaatttgtttttttggccagatattttctccatatggttttgttgaagacgtctacattattcttgatgaaatgaagcaaagtcgtggtatgttcactaaaatgaagtactcttttttttttcatgcctttaaaacgaagtagctcttgaattccttccccatgttgagcatagatatttgtggctcaatatgtttgcaatgtacggcagtggtggatgtcaaataaataaagtcagcatagcatcattcgatttgctcatttaggttaggaagttatctgctccaatccaatacgtgtatgtacttaaataaggcttttcttatagggggaaatgaattctgaaagaagcacgatatacctagtaatttgttctatctgtagaggatagtcaattataaataaatgatgagttcaaattccaaaattgtctcttgcctgagtgcattggtggtgcaatattttaccattcctttctattgttacattctatagagatttttggttgaatgtattactgagtctagagagttgattaattatattttatatgttgacatctggtcctctttttttaaggatgcgggtttgttagattttctcatgcagacatggcctccacagcaatcaaagcattaaatggaacttacactatgagggtaactttttatt

SEQ ID NO: 24417 - DNA, 1654 bp, Cannabis sativa
  modified_base (27)..(42): a, c, t, g, unknown or other
gggattgcacagcttacccggtatttnnnnnnnnnnnnnnnnggactactgactgtcacacttatatctcgacttacctatcactatgaatcgaaaataattgtgttcttaggctatttgaaagatagagtgcgtaaaagacttcagaattggaaagcaagtttctttcgcaggcgggtaaagaggtgttgatcaagatagtggcccaatctcttcctaactatgggatgagtgtcttccttctccttttggatatcagtagagatattgagcagatgatgtgcaaattttggtggcaatcgtccaaaggtcaaaaccatggtattcattggatgtcatgggaacggttaagcaaacataaacacatgggaggcaagggattcagataccttcatgactttaacttggcatttctcgaaaaataaggatggtgtcttctcacaaaacctgtggcattggcctctcaaattttcaaagtccgttactttccaagatgtaattttttaaatgctgagctaggtaataattcaagctttgtgtggaaaagtatttgggaggctcaggaagttgtcaaaaagggagtacggtagtgtattggcaatgggaatgacatcaatgtcctcaatgaaccttggttccacatgatgataaccctttggtcatctcgtctcactcggccctagagcatgccaaggtaggaagcctattatctgttgatggtagttcatgggacatggagatactttcggacatggttgaagaaagggatatactcctcattttaaaggtacctcttcacttgactcaagctaatgatcattttgtttggtctaaagagccatcaggggtatactcagttaaaagtgcatataatcttcttcaacatacccaaggaagatggaatgggaatgataaggagctggctagtttttggaagcatatgtggaagttaaaatccctccaaaagtcaaaaacttgatatggagggctggtatgaattgcttgccaacaatagtagaattgcattctaagcatgtgaatgtgagctctttatgccctgtttgccaaagtaaagatgagactatcctccatagactggtctcttgtccagaagctgtactttgttggaatcgggtgagaatcggcactaggagtacacgtggtaacacttttcttgactggtgtattacttcctttaaggctttggttgtggaaaaatattgtgtcttagccatgctttgttgggtcatttaggaaaagctagaaaggacctcatgtggaaagaaaaggtaatgcgggcaggagacattgttgtttctgcaaaaagatatcttgatcaatggagacatgctcaaaactctaatctagaggtatcatggcctggtatcaggggcgaagccacatccaaagtaagagtggccatggccccccaacaattttatatcccttttaatatatatatatatatgtaaatatttataaacaaaaatacatatataaataaaaatatactaattaatatatataatatataaaagaaaagtgtatagacaattaataatatatatagtataaattaagtgtttaatttattaaaaataaaataaaattttttttagaagtgaattgacataaaattaaatttatatgagta

SEQ ID NO: 24418 - DNA, 4250 bp, Cannabis sativa
  modified_base (4209)..(4219): a, c, t, g, unknown or other
gcatttcacatcatcatttgcttttccacttgcatatcaatatgatatatttggaaagattgggcctggagttcattatgcccttatataacttcacttgtggcattctaaatttcttagacaagagtgcttctataattcttctgacacatggttctgcatcctcctctttcaaattagatacaaccccacttttttctgaaccagacaatctatgagcttagttaatgcagctatctaatctttcaactgtttggtatgataatccaagaactcacatccacggatttcgtcattgatgttgttcctagggtcacctccagaaggcttgccctttcccctttggctctatctcttttggtattcactactacaaaacaagatttaagagacaatttttcagctgagtaataaaataggaaagctaaagcctccaaatagttttttgggtttccaactattgaaaattgacatttaaaggcagttatattctaaaaatcacaattataaagtgtacttaattgctatacatgtgtttttttttcttttagtcatgactggaaatgaaaatagcacgtgacatctatatcgtcggttatttcctaataaccgacaccataggtgcacgtaatggctgacgcgtgtcacctatggcattgaatattaggaaataaccgacgacataggattttataactctcttattcgtttcaaccattcatcttcttcattttgtctaacaactagcccatgagagaaaaccaaagcaaactcacgagaaaatcccaaaaacctcgtctaaaagccacattctagttattttaggactatttgggttcatttttttaatctctcattttcaatacccaaaaatatattgtcagtgttggattatttttttagtattttagtgtaaaacaagcttttgaggtggcaacttagggcgtttcttagctctaagttgaatcttaatgttcattgcagtaaaaatctattctacaataagtttattgatgaatttttctttatttttgttaaaaaatatgggtgattttatttttgtattttattaatttaattactatagtatgtaatgtgttaatgattgtatatattatatatgtatgtattttgtgttgtattgaatatgtattgtattgtatgtataaaaatattgtaattgtatttatatattttatgtattgtacatatattgaatatttcaaactagtggttttgttaaatattttgattgtaaatgagatatgagagtattaaaataatagtttagaaattagtttctatgaaatatatgaaactcatgttttttgctacctagtatctagttactaatttaactagttattaattttcattcttatttatgtattttataactaattagtcattagtaactagtaattagttaaaattattgacttaactaattagttactcaatagttatataactattaagtagttacataattaaatttttaattttgtagtatttttatatgttgtaggttgtgaggtcaatttgcaaggacccaacttacttattgttgattgatttctagctaactagaggtatacattcactatctcttgttattaattaattatgaatgcttagaagagtttgaatatcttaaatatttatttgtagtgaagtaggttttgcggtatattatattgtggtcggatggatagaataatattcatgttagtatagtttaaaggtcttaaatattcatccatagtgaagtaagttctatgattagatgggtggaataatatgccatggtattcacaccttttatttgggtcgcatttttacttttcacctttgtacattggcgaaggcctcttatagtggaccatattgtaggttactttatacacattctctcgagtatcaatcaaacttgtgtactcagagtatcttggttcatgagttcttcctttctttgcagatttgcttcagcttggagggtttagaaattcttttgccatgagaatcgcttatgtttgattctggagctttctgttgttggtttgtgttcttgggagtgacatatattcaatttgtacaacccaaagctggagaaacttgcatgtctagttacctgtacagaagtaccaggcccataaacgataggtgttgtgaacgtaggtgctggaggcaatatggccagagcagttttctaagttgtaaaatatttactgatggtgtcagaagtactccatatgcctgagcataagcgtcttccaagttaatgaatccttaggccgtggataagaaatcagataatgaatccaccctctttctttgaagctcgccccataataaggatctagtggatatacctgatgttaaagtcaccatcttcatatcatcattaatcttcatttttccagcaacatccatcatacactaaatgtattttttgagactttctcctggtcattgtttgatattagtcaaggaaccaaattctatgtccaagtcctttgctgtaataaattgtttcttgaacattgcttgtaggtctctccagttatggattgatcttagagataacctcttctaccagtcttctacagattttttcagagttagtgaaaagcaaagacactttgcatcatcactaatcttagaaacttgcatcattcaattgtatctggataaatggtccatgtgatccgtttttccttcatacaattctatttgaggcattctgaagtgctccgatagtggtacatctataattctcttcacacatggttgtgtatcctcttcttttgaattagacacagttccattttacctcagggagatcttctgtgtgagctttgttaactttgcgctccaagcactgagttttatcatctgaagattctcttccgcgaactcagtcattgttatgatttctcaaagattctctttagttttatcatctaaagatcatttgtagagagacttccactgttgttgtctgatactagatgcacttcttcaacatcatcaatttggctggagtcattgcagtaattcgtatacttctgggtagtaggctttttggctttagcattatatttatctttctgtgcagctctgtctcttgaataagtttggttaccctaccttgaggcatggtttcctttctttttatgttaagttggctgacagatttagatttcttttcttattcaacccgaggaggcttcttcaaagtttcacccacttttacttttcctttgtccttatgtggatcataagtttcaggatttttaggatcaatttttctagtggtgttattctctagagttgtttgtttggttttgtttccagaggtcattactattaatacaacttccattctcaatactttctcaagcatgtaaagaaaattcctcttgctgagttaatttgctttcaatcatttgcaacttcttcgccataatgaccacatagtctgagtcgtctagattgttcttctttttagagacaccatcatgaggcatgtcttagtaatcatcttttgatgtatcttggtgatcattttcaaaatcatcaaaactattctcccttgattcatcgttttcgattataggatcgtcaagattttggtctttaccgcgttgatccttgtggcgactagtcacctcattcaaatcttctgtatctcctacttagcattaggattagtataatgaagactagattttttttgagtgagtaccatgattactgaatgtaacctcgagatggtatcactgcttcctttagcttttaatgaaagcaccaaaatatttattgaaatttttgaaaaataaattatttaatataagaactaaagataaacaattaaaagaaatagaccgggagataacacttagagttgttatgtggttaaggctttaaagagccttagtccatgagtcagttttattatttgttatgctagaaaagccaaaagattatagtgagtatattccctttattctcttctcgagtttatgagttgagaaatttcaaccctttacacgaagggttttatgagtatttatagagtaatagaggttatacttagttaccctttctcctctaatggggtgtttacaaatcatatactttgggcttatcgtgtgaagcccaacccatgaggcagttattgtatgttgggatttattttaccaggannnnnnnnnnntaacatgtatgtttcattaacaccctaaata

SEQ ID NO: 24419 - DNA, 2197 bp, Cannabis sativa
tttcaaattacatgcgtccgattgaaagagtcttgagggtctcatggctaacttttggtaggaactactaacaataagaataaaatcaattaaaagggttggtccaagctttgcaattctaaatttttttggggggcttgggtttagatatgtttaccatcataatcaagttatgcttactaagcaagcttggagagtcatgtccaatccctcatctcttctctctaagttgcttaaagccaaatattttaagcataatgatttccttaatgctttaaaaggacatctgttcgttggaggagtcttctttggggaaggacactacgtcttaaaggcctaatctggaaagtagaaaatggtaagtctatttctactatcaactcaaatgggatccctactgtgaaatccctcagttttcttaataatatttcctcctttactcatatagtcttttttattgatgataatggttgttgggatgttagtaagcttaatcttttctttactcctgatgtagtggatgtcattgatcaagttccaattgatctttcttctaatgatagtctcatttggggacatcatccctcaggtattttcattgtaaattccacctatcacctggctaagtcttattctttctcaccttctccttcctcttctaatcttttctactttaaaagctggtgaaaaacaatttggactttaagaattcctcctaaaatttagcattttgtttgaaaaactttcaatcatgtcttgtcttgccttgcactttaaacctctacaaaaggaaagttttagataatcatatcttctctatttgttctagcaaagtggagactgtttaccatgctctcttagagtgttccaatgctaaaatagtgtggagaacgacatcttttaaacaattttacttttcaaataataattgtgatgttaaggaatttttcctaagagattttgagaatttgcaaaaggataagatagatatgttttttgggattatgtggatgatttagactaaaaggaatgctcatttgtattagaaaagaacatcatatttcacaaatgtagaaagctatgattctgaattactacaagattacatgaaagcccaaaggaagttcccctgcaacaactatagtatagtcggggagagccattacattgtgagtaattcaatggagaatgagcatgttcattccagactgccttcaccaggatgttataaattgaatactgatgcagccttggatgaaaggaaaagaagatctggtttgggagctgttgttagagactgcaacaacaatgttattgatggggtttctccgtcaaagataggagtagttactcctatttatgtagaatttcaatccctatatcaagctttgatctggtgttctgcagtgcgtctgccgattactcttatagaggtggattaccttcagctagtcacaaagatcaaacatagatggaaggatcacttctcactttctgatctagtgtccaagattgttaactccttgtctttatttcctaatatgtctttctatcacgtaccaagaaataagaatattttggcacacaatttagatagagattcattaggcttagataaagatttggtttggagaacaattcttccaagctaattctatgtaattgtagctatgtactttattgttgttttgtaacaccatcaaatcggttttagtgttgctttaacctgaattttctctgatactataattttttttcatatatatataacaattagtataaagtataaataaaaaagatgtaaagaataaaatattttacatacatgctatatattttgattaatacaattttattatttttatttgtttagaagaatatttaagttttatttttttattaaaaacattaattggttctatttttgattattagatctttataatctaatagtcgtaaaacttttataaaatattatgtagaaatatgtattcataaaacctatcctagaattcttataattaattatcgaaaacatgaaggacgaatctcgaaaacatgagagagcgattagttaaaaaaaattgtcatatataataagtactagcaaaaaattacgtgcgaggcacgtatactaaattttatgctaattttttttctacgttattaaaatatgatacaattaaaaattaaaaaa

SEQ ID NO: 24420 - DNA, 1593 bp, Cannabis sativa
ggtttgggccagggtccaactttgagtttcgggtcggggttcgggtttgggtccgagtcggggtttgagtctgattttcgggtttgggtaggggttagggtccgaactaggtccggggtctcggtctcgatctcgagtttggctcgaggttcgggttgggtttgggtccgggtccaattctaaggtccgatctggctctaggtcttgagttcgggtcagtcttttggtttgagtctagggttcaagtctgaggtttggggccagggttgacccagaccctttgtaaatatcataatacaagctaatacaaatcatttgttatgtattaaataatacgattcacattgtattaaaatataaagtcatgatgattaatacaatacaatactttatcaaaatatagtgttatttgttatttaatacagtgccacccttatatggcccactaagtaagccaaaaatttataaaataatttttttttaaaaggggaagattgtctatatgtagagcctctactaccaagaaagaaaggtgggtgtgaatcataaaagtttttaatttatatatatatatacatataatattttaatctgtaatataaaaaactgaagaaaaaaaatattcaagtatttaataattttttatttaaatgattttttaaataaacttttatgatgtcgaccaataaattttttgacatgaggaaattttaagaattacaaacaaagctgttaaattgggtacttacagactaacaagaattttgagcttagagactattactataattttttgagattagattacttatctgcatcaaagtaaatattttaagaatttatgctccaacttagtattaacacttggtatttttagaaatagttgatgaatcatttgatatgaggactaacagacttacaaaaaaaaaaaaactattactactattttttaagattgagaataaatctacatcaaaacaaatttttggggacttacgctgctattttccgtaaaatgtataattcttaaatttgtatgaaatcctattatgttaaaaaatatatatttttttatggaactattatgctaagtacttaatccaaagaacatatataatcttttcttctcaaaaaagagcatataaattctataacattaaagaaagataaaccaaacaagtaattatttaaattttgaaaacataaaaagaatatatgaagtattatttcaaaaaagtaaattaaatataaaatcctcaataacatatagcaaatacacattttttttttctctagaaaaaaaatcttctgaaaaagacaaaaaatatttgtacatgtaaaattaagattaccagttaaatttgtttcccttttaagtggtataaaatccttatatgcatctttattttttttttcaaaaaataataattataaaaaacacctggtatgccaataaaaagactagattcgtaacttaggaaaaaactataaatagagagatatgaagtgcaagtgtactcaagtaccattatcttagtttctcatcttctctctgtatatttgtgaaggagtctagagtatgggttttaaagc

SEQ ID NO: 24421 - DNA, 3195 bp, Cannabis sativa
tacggaatgcacgatcactcccaagaccacgtgcattccagctcacaagcttcatggcggcgggcaggcctgctcagaggcaaggcctgcacttccagaagaggcttcagtgcccggagggttgctcgagcgggatcgcttgatttggtgacggagctctccatggaccatttccatttgccttttgaatttgtccttggagtcgggcttgtttcttttcctcgaagcctttgagcccatgggagatgccacacccggctggtaggtgaggttcatggcttcaagtcttttgctggtgtccaggagagggagattttcaggtaaaggcacttgacagtatttggagctggtggaatgtgagctactggaattctggggggtggtagtttgacttgggttggaaacgggagaggctttttgaacactcgtgttactcatagtggcattgagcagggcagtgtatgaaggggtgattgtctcaggtggagggttggggttaatagtagtggtatggggctcagtttgggtcattggagggtgttcttgagtgtatgtcgaagggcccgacttgtataaaccaacttgttgggtttggtcatggggggggcaaagattttgggagccatatgtgggaaatggtggggtgttgtcgggaggggctacacacatagcactagccgggttggaagtcataaaggaagccaccgggggattggcgaaattgagctgttcaggagacaacaaagcgttagtggtaaccttaactttacccatgatggttttgatgtcataccttagctccgggggaaatggggcttcgtcacaagctttcatataatccatgcaccctttgttgtaactgtgtcccatccggccacagaaaaaacaaatatcggggaggttctcatattttaactcaagccagacaaccttgtttatccccgtgaaatggactggaatgcctctagggagaggccgagagacgtcaaacataacccgaaggcgaaagtagggcccccaagtttcacgaaaagatggccggtagatttcaaggagatggccgagagaggaagaagccaggacggctaactcttcagaacgtttgaggaaaggggtgttgaacacttgcacccacagcggtattttaagaagactatcaccattgagaacatccaaagagtttggaatgtccattaggatagcttgattaagataggtccaaggttgttggagcaaaacccggcgcctatccccatcacaaccaaactcaaccaaaaagagaccattggagcggtccgtaatggtcacgggactacgagagatgtggttccaatccctagtcattttctccatgaaattcctacggttaaatgatttaaccgtatgcactttgagaactaggtagaggggaacgggctggacttcgttctcaggaacattgagaggggagggatcatggagtgtttggatggtacactcagtatctgtgagattaagggcaatggaaagggagtttgttaagtcatccattaaatggactggatgtttaaactgagaatgcagagaaagcaaagatgacaaaaaaagtggagaaagaacaacattacaagtcctagtaaatcgacaccacagagaaaacagagctaatatcttttcagtttgcactaggacgtagacagaagagaatgtgtgatatttgtaataaagactcttgtagaaaatataaactaagtgagattgattaagagaagacacagaagaccaaaagaaacaatagttgttcgacactagtttttcagagggggaatgtttgttttgaaaaaggaatgaggcattacgggcgaaacaaagcctgaggaggtgagaagtggagataacagaaattaaaaaataccaaaaaaacagcagactggaaaactgagagtggtgtgtactcggggtgacagaaccgtgaggttgaaacaagtttttaaagtgtttgggacatagatgctgcgtattaatggtgataatggctaaatgggaaactggaaggtacttacggggaatgtttggactgagagtgcaagagtaccatctcggtttggctttaaatagaaaattcttcaggaaactaagccaaaccgatttggtaattgtcacttcacgagcattaatattagaagagagatgctgcacaaaagatacgtaatttgtactgggcagattacacatacagatagaaattaatgcacctattaattccaattcgacaaagaggattaaacctcttctagggatacatatgaattgatacttattgcagagaaacccattcaaaacaaaaaagtcgtattgtaatttaatagggatgccaaatttatacctaaattgttcagtgaagagttttttcctctgcaccgatttgacaaggaacagggtagattggaagagaaattgaatacctgtaagagatttattaatctccgtacgagtcgacgatctgggaaggaggccggaataaatgttgattcgacgggggtggttgggtcgagatcggctggtgcagctcgagtggctcggatgagttgagctgctctgagattcgcttgagagggaatcggagccacctaaatcagcagatctggggctttgcaatggtttcacgctgtggaaacgaacagaggagaggtgtgaacgctctggatgcaatgaaaaagccatgttcatactgtgcgaggggagagagaaagcagagcagaagaagagtcgggaaaagttgctagaacaaaacttggagtgtgagagaagtaatgtagtgagaaaggtaaatactaaaatgtatctttttgttttataataattggtaatttggtagatgtaatgtcaattatttgacaagtaaataaagaccctcttccgctcggctataaattagattcacaattagtgagtaacttgacttttagtaataatattagtaatattaattgtagtctttgttgaagaaaaggacatggatgccatgacattgtttcgctttcaacgataataatatagctgaaaagcccatcaagtttatgattggttattgtgaattgataaccttggccacaatcgtgacgcgtagaaggcatgtgatatgacttaattacaagtcggcacgcgtaagtcttgctaaaaagtatttgaggaaattagattctataccttttt

SEQ ID NO: 24422 - DNA, 3319 bp, Cannabis sativa
aaagagtgaaaactaaccgaaaatacgacccgaaacttagactaattttagcctaacaagtatcaggtaagtcttatctttgaggttttatgtcatattagggataatgtaaaattttaagtttgggaagagtttaattttatttctttattttttttcgttgtttagtgtttagtgttcaattttgcttgtttgttttagttgttaattaagctaatatatatcgattatgttgctattgttatttgtggaatgaattaaaattttgaactgttgcttgattccttaactctttgaattaatttaaatgcttgtacaaattgtgtatcgatgtaaattgtcaataattggattgtatcataattattttactttgatttgtggtaagattgattgaatagaatagaacttgcatgaattatttcttgagtcgaaattcttgacaatacttatttggaaaataatgtaggcaattttttttggatcgtttgggcctttttaagtttacttttatctttactatccctagtttgattgtttgagctttagcctgttcaattattttttttaaccactatatgaaattaactttgcatccactagcaattttttttcttgtcccttgaattataccattagctgagaaataagtttggggaagattaattgtgtgtgggttaaattattgttataagggggtgattgagacaatgtatgaattgtaaaagtattttttcaacatcactaattctatttattattctgaaaaaagaaaagaaaattaaagtgttgaataaataaagtgatgttagaaaaattatcagtaggctctcaataattgaaaatttggtgaatttcaagatagtatatttatatacgagtgcttgattgttttataatgtgcttatggtataatatagcttaaatgactttcaactatcctttacttaagtcatttcattacaaccttgaaaaatcttttgattcgagcaagaattgttaacattagtggaaagaggtaagtcatgcaagtatattgatctttggactgtggaaagattggttagagtagaatgattatgatgcttttcaaatactgaagttaagcatctatacattatttttcaaaggaagcattcaaattaattgttagaattttaggattgaaatgctggtgtaattaattgattgaagtttcataggtggcagcatcaatttgattatttgaaggcttagttaattgtatgtgtgtttgtatttttgtcttagtttttaatcttactcgagggcgagtaaggatttagtttgaggaaatttggtaggttatttttagcctaagtttcaagtcattttttagagttgtttttttttctttgttattactcttgggacggttttacgcttatttctttttatttcaagttttggagtattaaagtaaatattttgtcaaatactaaagggacgggacgagttgaaaataacaaacatttgaagtgaaatttttgaagctcgtcgcaacgagtgtaagtctagccacgaccaattatcgtcgcagcgagatgaagagtggtcacgacaagcttaattggaagaaccgtgatttttgactatgtacattgtcgctgcgactagacctttcatggtcgcggcgagatgttttgtacgaaacttacatgcgatttcgtaatttgactattttaaagtgtaaaattgacttctacaagagagttttgaatttttatgtcatttattcataaatagaactctagaaacaaagaaggagactaaggaagcgaacgtggcgatctgtgtcaagttcaccatctagtttgtttcttttacctttttaatttcttatgtcaagtttgatcttcaggttaaacatggatttgagttttgaagttatgaactaatttcttaatttaggaatataatgaatgctgattgattttgttccaatttattaatgtgatttgttaatcttcctttttagatctttgtgatttgttcatatttgtgtgaatgcatattttagattggccactctaacatgattcatgatactaatataaaatctcaaaagtgaatgtaggaatgctctaattgaacaaatatagattttgatgtgatatgagagtattcacgtagattgtgtgaccattagatttttgcttaatgcaaactatatgttattctatttcagagatgcattaggtaatatatagtttaggaccttaatgatctgagaagagttttataatctgtcatcacttaaagaaataagattagtaaattgcattaataattaggtaataggaacaacaactcatccatatttgatcaacattattcgttttctattaaaatttttgtcaagttttattatttcattccaagagtatattaattaaccatatacaaatataagtctaatttagtagtattcaattttaattctttgtggttcaacttcacctgtgtgagtattgtttaatacgtacacttgcgtaagctttataatttttgtaacatatgcaccgttgtcacattattttggaagcaaataggacacaccttagcaacgtttatgccatgacgagtgagattggcataacaaggcaaacaatttagagtcgctttcccatttttttttactttgggtggaacgaaaatagaacacataaacttctactaacggggctgacttgagaaaattgagacctgaccagtgacccccccaaccttgcgacggagctccaatacccacccttcatcatatatgagccattattaataaaaatatgtcaaatcaacatattttagttattaaacccagaaataggaatagaaagaatagctttgacctcaactacatcaaaaggatccttaaccaaaggaacgttccaaaactcaaactccaacttgagatcagaattcagaagcatgttgatcagggacggaggcagaagttaagaataagggggccaaaagataaaaaaaaaataataattaagggggaccaaatacataatttttcaaaaaaataaaatttttaacattaaattgctttataatttttttgtccaaaattttaggaggggccatgttccaatattaccctaaaaagagtatgtctgacccacatggtctttaggaatccaagcttcttccttaatacgaaccttatctcccttcccaacaagccaacaaatccttttcttccataaaaaaagaagttcgcttagtttcaaccacatccatcagagaactacgcgcataatagaacctttcattaccttagcagctaacgaataag

SEQ ID NO: 24423 - DNA, 1409 bp, Cannabis sativa
aaattttaactaacatcataatataattttatcagttatatgtcattaaatatttagatttaaatttagaattcatataatttgaatatagttgattataatattaaaattatattgatcatatttgagttcaaaatattaaacaagtacgcctttaaatacaagttgcctaattaacattattgaaaatatacagtacaaaacttgtatttagatgccaaatacgtaaacactgatctacaagtttgtgagtagtgtagaactaactaactagcttccaaacacatttattaagctttgggtcgtttttacgatcagtagaaaaaaagacagattaaagagagcaacatcccatgtcggatccgcgttctctgggtctgtaacgtaaggtcactgttaataggccaataaggctttggtgttgaaacttgatgaaagcattgaggtgcctggtgggactggggaaaatgagtgagataggcatggacatggatatggtcctatggacccctacaataccagatatatacattcatggtttacatttagatatatactcactccttcttggatatgcattattacaaaaccatattctgaaacaaattatggccaaactcttaacaatattgactacacctagcttttgtcttttatcactattctgttaatttgtcttttataaatatatttacttttggaatatagaatagtagtagtataaaaacaactcaaagagagaagaccaacttgaaggaaaaatacaaaaaaaaaaaaagaagataaaaagttcattgagggataagacgattaattgacctcgattctaccttgttgatacgttactctttaaattaattagtctgtttaacaaagaaaatgagcatgatattaaatatttggttgatcttggagtaaaatgaaagctatctatggagtttttgggaaaattataactaaaatttaattaaaaaataattagcaatgacaagaattacaaaaactacacagcaataaaacggagataaaacagaaataaacaaaatgttagaacaagaaacaattaaagcaataacaaaaaataaaatcgtccaaatcctataaattaatgtgatttatagactttcgagaacgctcttccagaaaatatctaacatttcataaccaaaataatttttggagatctttacacttgaaggaacttctcagagttccttgatcaagttagtaattaagctacttctcttaaataatcatcactaaaaaacgtaacagtactctacttcaatgcacatcatacaacctaggggacatatcagatttttccaaacaataatccattaaatctacaaatactgtaggaaatcacagcagtcccgaaactgccccctacaccaacacctaacagt

SEQ ID NO: 24424 - DNA, 3614 bp, Cannabis sativa
caattttgttgtgaccattgctaggcatacttctgaaaaaaatttgcccaagcatgggatgatggtgcagacgaagcagattgtacaaaaatcttcattatctgacccgcacatttaccaactggccaccttgcccagggcagaacaaacctatcctactaccaaagaagaggatattgtaggggacgttgaagtccaagaagtggaggactagtgcaaggtccgacctactactccttttaatgtcaaaggagatgaggaagtgggagtagctcgggtgctgccatttggtggctacaatgataaagaagagtcaattttttaggcaggggatgttatggagactggcgaggactacgttgttatagaatacaccgaggccattcttttgaagaagaaaattccactaggagatcaatggatttctccaccctccgttgtaatcatgaagaagatgaccaatttcctcgatcgtggtcttatagggaatgtcgaatgcttccttcccttccccggccaactggctactaacccaggagaaggctacggtgcttggttgggagctcacactaaacagagtgtaatgtttcccttgcttccatactttaagaaaataggcaattactaccacatatgtccgacctagttcaccccaagggccttaagtatttgtcgaccctgtttgtactctacgcctcacaaggatggggtgagtcatcccctcatgataccaactggctattcaatatcaagtgaggccccaagcataataggtcgaggtacttctatttctccataatcgaaaagtcatggttgactagcacaacgaccattgaagtggcaaagataggaggcttcgttgacgagttctactttgtcaaagggatggataccacctatactagttttccattggtgtcgtcctactaccgccctccgttaacactagaactcaggaagaggcctcaaaaaattctccaactccctcctactgaacgaaatatctttctcctggctactgatgctaacttcatcaagtacaaactctatccggctaattttgtaccaaaggctaaggcacgagaagagactgtgcccgaacaggaggctctgagcaaaaagaaaaagaagaggaaagcccctcctgaaagtcaagtacctaccgagcaatttatcacgaatagggaaaaccctaaaaagactgctcgaccttccacccgagaggtaggaaagggaaaggctgtcctagtgtatcaggaacaggaaaattcttcagatgatgattctccttctctattcattcaagaaaatgctccttcctacctgtagggtactttaacttactttcaaattgcattcgaatttgcttatattgtacttgtttttaacctttttattttattcatatgtagatatgtctcagaaggtgcttcaggctctgaacaagaaattggtgacaactctagccaggtaccttcggccaaacgaccaaaggtaaatgaggtgcagcccaaggagaagagttcaattgagtttcccactaagatctacgaggaggctgggttagaggtggagccactggctaggaagagctcaaaatctaagaatgctaaagggagaagcacagacggatctggactacctaaatctttaggtgctcctattgtgctgaaccctgaaactaaaaagagtaagcagatgcttcagttttaccaggaccgattccttcccgacgtgaacgatgagctgtccggaggcgatgatatgtccgtggagttgctgatgggtgggctaccaaaggaggcaactcgagtaagtactttttctttggtttttatttcattattttatttgtgcaggttttgacttatctttgtgtagctcaacttgaagatggcctacacttattctcgatgtaaatacacggccttaaggactataacgaccaccacaaacttgtagaaggaggtggatgcaaccaagaaggaggtcgaggctacgaggccgaacctgggtgaggggaacaaacaacttttggccgccaacaagagagttgaggagctgcagaaggagattcaggatacaccatctaccgcccaacttgaagcggaagttgatgccctgaccaaagacattaatgccttgaaggatgagagggaaagtctccatactcttctctctacgttaactcaagagatgactgatttggaagagagtgtcaggtcttggtgagtagagcgcgaagcactctaaaaggaggtggacaacctgtagatggccaccctagaggtcttcaatgaattctgcaaggccaaccaaactagaaattttgattacctcaatggaaacagataggcatatcttggtttatgtgcggcccaaaaagacaaagaagaatccaagacaaccaaccccaaagctccaaccgaccaaagtcgttatgccccgtccattgacaaccaaactgatccgtgtagagagctagagactccagccgtataagacctttttattcgtttttttagttcgacctatgggcctttttcagtacaatgtggccgaccaagcggcctttaaactttgttatattttattttgttttaagacaactagctagtcagacaacttttaatcccgaacttatcgtgctttgttatctttttattttaaaatgaatattttccattgtttttgtaattgcacatgcaaacttctatatttttgaacttgttatttacctatgttttgtacaagtatagttaccccccaagtgaccgagcagacttgtgactcttggtcacttgtattgcacaagttcatctttcgtctatttggcttttcggttcgatcagatccttggtacatggtaaattcataacttgctataaagaaaaataattgacacaatcagaatgatgataaatatcgttattcatttattggtctgaatgattttattacaatagtctcatgtgggaaggagattataactctacgggcaccattgcttcataaccgtaagccatagcggatgttgtctgcccggttgctattttctctgttgttcggtatgaccacaatacttcaggtaattcctctagccaattccctttggcttcttcgagctattttttcatggtgtccttgagtttcttgttgattgccttgacttgaccatttatttcaaggtgtgccactacggagaaactacatatgattccatgggtcgcatagaaatctgtaaatatttggctgtcaaactgtttgccattgttcgaaacaattttgtgcggcagtctaaactaacatatgatttttttgaatacgaagtacaacacttttttttgatgtaattgttggtaagcgctcgaactctgtccactttgtaaaataatctattgcgacaactacatattgtactccacccttacccttgggcaactttccaatccggttgattccccatattgcaaaaggccaaggactttgcatctgtattaactcattaggatgtgctcgggggatctttgaaaatctctagcatttataacatttctttacgtaggccattgaattttccatcatggtttgccaaaaatatccttgccttagta

SEQ ID NO: 24425 - DNA, 3020 bp, Cannabis sativa
tattaaattacttataatattaatcatataatcattagtaactattctacaattatttttttagttaacaaccttattatttttcaattttctattaaccagattatattatgtataaacaataattaactttgtaagtaacttctacaataaacctaatgttataaaaaaaaaatatatattttaaataatattaaaatatcataatatataactctccactaacttataagcaatttaaatgtctacaaattttactaaaaagttatgtcatttgtttatttttattttattgtaactcataagtttcttaaacaagttatgtgagctatcttttatttttattttactataacttattatattttaaatgaatttaaaattaacataaatgttgctacaaaataaaaataatgtaacgcataaataggtacctattcgaaattagtagttaaatatatatgagataattttatcttaaaataattctttttataaaaaaaataatataatataaaataaaaaaatagtatgctataataaattttgtttaaagtctacggtttaattattctttggtttttttaagggaaacttacaaaaatactagaatttgggttaacttttacaaaattactgtcatacggaaaaattttcaaaaatagagttttttttataaaataccagtagattacaaaatagaacaactaaaaaacaccagtagaacaccagtaaaaacttaacacattatactacagtatgaaacttataaaaaacacagtaaaaaagtaaaaaataccgcctagcagtatttttgtaaaaaatgacaaaagttagtataccatataaatttctctttttctaattagatgggcgccaattggtcaggtttgggccatggtttttgttttcaattatatggtatttagtttagtgtttcattagtttttgcttaggtgtcacgttacttttaattttgcatgagtttgaacaacgttatttttgtaattaatttgctaataacgtatatttatgaaaaaattccaaaaaaaatagataatttaggttcttatttaaaaagaaatgtagtattttcaaaattatttaaaattgtgtatttttaaaaggaaaatatttttttaacttttggactaggtggactttagttataggcctaacccccctatacacagagtcaagtttgattattgaatatatgctatgtttggtgtgatttatcaaaaaaaaaaaaaaaattagtaattgtattgtattgagtaatgatatgtataaacataaaatattaatatataacaagaaaaaaaaaataagttttcccattaaaacaccattactacaatttatctttttcatgacctgaatatttcgtaaaggccgtgaaagggttttgaagaattttcatgactgacaatgttggacatgaaaaatatttcatcatacccaacattgctcgacataaaaaaggcaaagggacataaaatttcatattttcatttatttaatctttttttattttcatgtcgagcatttgtagatactacacggatacggtatccagcaaagctgagtgttataattattattaaaaatcactcctgaatggtaaagcttaatagtagataacacataaagaggttaacatataagttttgatatatatctttaaaaaatgttgctcctttcaatcacatttattaatatcattataattattattgttgctgttgtttacactaaaagtagtaacatccatgtttgacctgtggcaagaaggaaaatatcctagagttgagtattcccgaatcatagaagttgaccttggaggggtcccttaccttatgccagttgacttcgggaacttcaaaatgagtgtttggatcccgccaaattgattccaactcactatctttcagtatttagtaccataaagacaagaagcatccaagtcccacggcctgggagttgaaaatacacaaaatagcatcaaagaaatcaactcgaacgcctagggtttcatccactgcccaagttaataacccaactaaggtttcagtttttaagactgtcttagtgcaaatggatcaaactttatactgatacattagccatgtcatgaacatattttaggcatcaggattagattcaaaacacttctatttttgagcactcggagcacccaggtgcccccccaagcacccaacacccaggttgacgttttatcaacctagggcgcttcaaagcatcaaactgaagaacaatcttgtgcattatcttcatcttcatgaaaatgaggaaacaagaactattaaggaagaaacagaccgacctagagggccaacgcccaagttgacattttgtcaacctaggccaattccaaggagttttttcgagaagtcttctgggcatattctttatttttttaaagattaagatacaagtatttttgggaatcaaacggaaccatctagtggcgtgaaattggatccagcgtccaggttgacacctggtgctgggtcgagtgcctaggtttacattttgtcaacatgggctatttctaatcatgttttcaaaaaagtattctgggtattttttccgtcatcataaataacaatgatacaagtaaactcggggagaaaacgataattccaggggcatgaaaactgagcccagtgctcaggataacctagtgccgagcctagcactgaggttgacaatcaacctggtgtgctggtttcgatcatccaaatgcaaattgtgctttgagcattctctctagcatggtcaaaaatggggtaggggaatgcgtccttaatttcaagaaccttggaagtatcaagacgacttccccaaaactccaaaaagagcacatagtgctcaggttgataggtgacctgaagcgttgggttttgcttattcgattttgattctatctcgagcgttcgtctagtatttcatagtaactgagagctatgaagtcagacaagtcaaattcacaactt

SEQ ID NO: 24426 - DNA, 1575 bp, Cannabis sativa
aagcctaaaatgtacctggcagcagcaaaatggaaaacaattccatatcttgatgttccaactaatgtgcaagaagctctagcacatccagattggaatcgggccatgaatgaagaaaaaaatgccctggtgagaaaccgcacttggatccttgttccttacatggatggtatgaatattgtaggaaacaagtgggtttataaaattaaactcaatcccgatggatctgttgaaagacttaaagcgcgcttagtggcaaaaagattcaatcaaagggccggtattgattatagcgaaacgtttagtcctgtggtttaggcttcaaccatcagaattatcttaaccattgctgtctccaaaggttgggccattcgacaactcgatataaataatgctttccttaatgggaagcttgaggaaaaggtctatatgcagcagcctgaaggattcatagatccaaacaaaccaaaccatgtctgccttctcaacaagtccctctacggcctcaaacaagcgcctcgtgcttggttcgataaacttaagtctaccttaatgaactggaagttcatgaactctcgagccgattcctcactgttctggtttgcaaattcaacagatattataatagtgcttatctacgtggacgacatcatcatcacgggaaatgatgctctcaaacttcaacaatttgcagataagttgaatcaagtctttgccctcaaggaccttggagacttacactacttcttaggcattgaagtggtgcgtgatgaaacaggaatttacatgagtcagtcaaaatacatccatgaactgttgaagaaaactaacatgatgcatgtgaagccttgcccaactccaatgacagttggaaaaatgctttcaatttctgatggagaacctttggagaatccaaccgagtataggagtataattggtgccttgcaatacttgacacacaccagacccgatttaagcttctctataaataagctaagttaattccttaaggcaccaacaacagcccattggtcagcagcaaaaagaattctgaggtatttaaaaggaactttgttccacgggttacacatcaaggtgtgtgatagacttaacttgattggtttttcggatgccgattgggcaagttgtccagatgatagaagatcaacagctggatactgtgtgtaccttggagattctctggtgtcctggtcttcaaagaaacaagcagtcgtttcccgttcgagtacagaatcagagtacagagcattggctcaagtctcagcagaattgacttggatccaatcactgctgcaggaactgaaatttcccttgccaacaacaccagtaacttggtgtgacaacttaggagcaagtgctctggccacaaatcccgtctatcacgcacgaactaagcatatcgaactggatgtccattttgtacgagataaagtcctgaacaagcagctggagatacgatacattccttcacacgaccaaactgcagattgcctcaccaaaagcctcactggttctcgttttcattttttgattgacaaactaggtgtggttgaa

SEQ ID NO: 24427 - DNA, 3546 bp, Cannabis sativa
attgctttgtggagtacttgtaatgtaatctagtgtaatgtaaattagatttctttttattcttcccttggaaacagattcaagagttgacttgtaacataaagtggaataagtgacattgtggaatgcttgggatttggtagtagtatctcaagtattagagatgagttcatgcttgtataagaaatatttttacagatctcttatcacatgtgcccatcattcataaagaaattcaaaattttcttatataaaagctttagagtgccctttattgcattagacttgggaaaagaatttacttgcattaaaatacttaacgcaataaggttgctgaataaacactttcttagcactcaccggtaaaccatcagaagttctggccactagcccaagacgacagttgccggttataaaacaagtaccagcatccacattgatcttagggagccattttttcctttggtagatctcgtgttacaacccctaaactcatacatataattccaacagcaatctaattaggttatacccaccatgactgcattttgtttttttttccttttgacgggtaaaccagacaatgaaccactcgaagtcatcttaggataatctcaaccaggaagtgatgtctttgttgtgaaagcttgacttcatctccaaaactgttcttttcccaaatatacttttcaaccttgcaattctaaagagcgtggctgatatcttctatagtgttgtttccacgcccaaagcaaacttggttagtaggaactgataacacataacaacttttctgttttgttagttaaaaatctgttagtattggttaggtagttgttagttattgtcttgatttctttcttgctttgtaacaaactcttgtggcttatataaataaaggactactctaattgttaggttagtttttgtcaagctaatctcaattagcatttttcactttcctactgtttcatggtaccagatgcctttgacgaacgttttcttcatctgtttctgcacctgcaacaatggcgaatgcctcctcctccactgctcatgcgtctatggcacatgcctcctcctcccctgcccctgcaaatcatccatggaatcctttttccaactctctcacctcatctcttactctgaaactcgatcgtctcaacttcttatcttggaaatctcaggtggttccagctgttattgggcatgatcttgacggaatattgtttactggagttccaccacctcgaaatcttgtaacaggaatcccaaatccagagtacgtgcaatggcgaaggagggatcaactcctccattcatggcttcgatccttcatgacagaaagcatacttgcattcaacgagaaacaaccttcttagtcagcataaccgtttaaaagataaaaacaaagagcagttgggtagttattaaatattatcccatgtgcatataaatgaaacgtggggaatgtctacgtttcatcagcagttgtaagtgattagatcccaataaaaataactactaacctatacacctataaatagggacagaatttatgggaaaagggaagaaaaaattgagggagaattctattatttatatttattcataattatactttgtattcaaataaatattcctaataatatggactcgtggagtatgtagattttaattataaaaccacgtaaaatatctggtgttcataattattattaaaatctgtagttaatttattacataaaaagctatatatttggttaatgaaaatttacattaacatctactactgcacattgattgtgtcaattaattaaataaaaaaaattaagaaagaaaaattttatatcattgtattttaataaaatgtgttttaaaaaataaactagattatatatgtatctaaattacaaagcaacacacatacaaccaattttttttttttcaagaataaactaaaaatatacaccataaaaaatacacatgaataaaaaaataactaaaaaataattgtataacaaaaaaaatattctaaaaatcacttaaaaacaattaaaaaataacataaaattaacaaaacaaatgcacatatatacaaaaaaaaaatgtatgtaataaactaaaaatatacaccataaaaaatgcatataaactaaccaataactgtacaaaaaaaaaacacataaacaactataaaacacttaaacaacaacataaaaacaactataaaataacaaaaagacagttataaatcaatagaaaaataacaagacatcaaccttgttaaaatatgcaaatcattcataaactaactcccaataaactataaaacattcgaaaaaatactcttattaatcatataaaagagaggaagatataggaggagtgctcttaattttttttttaagatagagaaagagtgttaaaaaaatatgagaaaaagtgtgaaagtaaaaaaaaacatattttagtaaaggttaaaagacattaattaagattatttttttataaaatgtgactaattaaagaaaaatagtatgaaatagtttgagtgtgaaaagtaagaaaatataaaaaagaaaaagaaatataataagtgtgtatttttttttttaaaataataaaatacaattttttgagagactgaaaaagtattaaaaaaaatatatataattatttaggatcactttaatttttaagaaatttcgaatagtttacaatatcaaaattaaaattcacatattttattattttttcttatacgtttggttaacaactgtttaaactttattttttggtattgtaaactattcagactttttatgaaaatttacaagtagccttaaataactacaacgtacacgatcataaaaaaattagactaaatttttttttttctgaatactggaacccgtagggggtctatcaaaatgaccctttaggggagtctactacagaatttcctatagtttaatattaaaatagactaaaagttattagaaatttttgtagtagaccctcctaaaggatcgttcatgaccgtgtacgttgtaggtatttatgattacttgtaaatctttaaaaaattcttaatagtccacaatgttgaaaataatgtttaaacagttactaaccacacatataagaaaaaataacaaaatatgtgaattttatttttggtattgtaaactatttgaatttttttaaaaatttactggcagtcctaaataaatattacatacacaatcatgaaaaaaaaattagactaaaaaatgttcttaagtgctgaaatagatagtgagtctactgaaacatccctttagagaggtgtactgaagacttacccaaaatattttgtcaaataaatatactaaaagagtatttttcaagtttaatacctaaagtgatcataaaaactataggaaatttctataatagactccctaaagagtcattctggtagatcccttattagtttaggcatgttatcctaaattttgcactctaacgtggcatcacgggaatggtgacacgtggagtcca

SEQ ID NO: 24428 - DNA, 2861 bp, Cannabis sativa
aaaattcatatttggggtgttaatgaaacaaatatgtcagtaaatctagatcctagtaaaataaataccaatactagctctattgaacgactcattaagaccaaccaaaaattcaagaacttgatcttcattttggtaatcttgaattatcttcatagcaccacaagtacaaacaggttatggtgtatattcttgaattaaatcccacagaaatttgagatgagtaaaatatgtagtaatactatttgcaccttgaacaaaagattatttagctcgaatggcttctaaaataagaggggtgatttttctaattaaatctttcttcaatattagactagattgttgtggcattatccatgtacatgatgctttcaactatttcattagacacgtcatgaagaatcgaggagataacaatgctattgcattcgttccataattcaaattcatcatcgtcttcttcaagagcatggagcttgtcattgatgaattttaactttttccttgcaattaaagccacttgcatagctcgacactatgagccaaaattttcacatccagtaaagagtttttgaactaaaatagctctagggtgatcactcctagaaagaaaataaggatttcgagcatcatcaaaaaacgatagattattcgaatctaaaacaaaaaatgattggatgtttcaaaagtgctttgagtttgaactccttcaccccgagccatggaagaaagaaacagaaaaggaatttacaaagagacctgctctgatacaatataaggttatggaaagaaaaagaaaggaagagagtgaaaactctatttattattcaatgaattaggaaaaacaaagtacaagctatatatcttagagatacaagaaactaattagttacaggtagcaagtaactaactaactagcaacttctcctaaccaacttctctaactgattttaactaattcaagtcagctcattcattatattgtattttaatatcgcatcttacacatttgatttaataaataatataagaaatcgctaactaattatagagtattgcatacatcagtgtggtgttagacacctcaacgtgtcaaataatgctcaattctataaaatttataaataatttattatgtaaaatagtatgcaaacggttgatgtaagtgtactatgtagacccatttttttggtttatttatttattattattattattatggaaattgtattttttatacttaataacaatcattattacaaaaaataccctattacttattttatacaatactattctaataactcctcattttacccaaaatacccttacaatttaattatgtttttcaaaacctaaaaaacttaaaaataatccattctctctctctctctctctctctctaaccccatatgaggagaaccacattgcaaaaaagcataccctatagttgccacctaccgccgctggaatactcagccaaccgcgtcgtgaaggacgtttgcccaaccatcccacatcagcccagcccccgaccctcgtcgtgaaggacatccgccctacctccctctcattgtggattaatgggtaagtgttttgtaaaatatttagtttgaaagtgttttgtaaaatattttgtttgaaagtgttttgtaaacttccttaccccatgtatagtatatttttgttagatttatgtggttgttgtttgtttgtttgctttttttttagttttgatataaatttgtagaaatcgtgagatctcgttgtttggagtattttgtctcttcatatttttctcgatgggttcttaacacgttctcgatgggttcttgacactattgtctcaaggttaggatgatctttctagactggttcttgatacattctcgataggttctcgacacagatgtcccaaggtcaggaagacctttctcgacgggttatcgatatgttcttaaaaggttcttcagagatactttctataaatcttcaagtattcaggtcacgataatatccctattttatgaaacaaatttgcattgacaagaaaataagaggaaccctacttagttttcttttttactttatttgtttaaggaaagtacttaagtttcctattttaattcttattagttttgggaaacctaactgatgtaatcattacctataaatagtgaaatcatttcactattatgggatccaaaatcaatatttccagagcacttaaattgcaaaaactattgtaagagctttcgagatagattaagaacttcttagtttttttctcacaatttatgtgttttatttgtttaattattattgtcattacttattatttctaatcacttgaattgactcattatcgttatctaaaagcgaggtcaacacttgtgtttccctttctaccttattcttctgttacattttatatttaatgatttatccattaaacttttttttaattagttagtatacttttgcttcatattgaactaaattaatcttttaaatgggcaggtaatggtacaaaaattttaattatcgttgagtcaaagctgatttgaaggtcatcaaatggatagtttattctatactttcattgatatttgctttatttttttacaattttattgaagtacataattatattaattctagcaatagagtaattcttaaagtttcatcatcatcctcatttgacatatacatatatgtgctatttatattgacaaatcttttatgtaacaaaaagagtttgttatagttgtcattaaccaaaaaaaaaaaattatactattaattgtaataatataacttaactaacactattgtttgtttaacatgcaagtgataatttt

SEQ ID NO: 24429 - DNA, 4726 bp, Cannabis sativa
ttagatctaattggaccaccaccaggttctccattacacttaaaaaaagacaaataaataattagaaaaagagatatacttgaaaatggagctccatcgtagtcatccattcctagatctcagccccgtcgaacacgaacggtcaagaaccactagtcgtcggaggagggtagggcgccgacgtttgaaagaacggagtagggaaagagagaggggaacattgcgcgactatggaggcatttcaagttgagatctgaaactccttccaagtcacccattgcctagtgctccagtctgccgtcttcctcatatttgttcgtcccattctgttcgacccatgagtgttgagagaggtgttaaaaagtatgaaaaaggaaattagggagagagattggaatatgaagatgggtgggtggctcgatggtgggtgactgggaatagtgtacgaagaagacgaagaagaaaaagaatagaacaaaaaaagaaaaaaaagttattttatgattttaaaataatttatttagttttttatattattttaaattttttaattaaaattattatttgagctaataaaaaattgacacgtggcatttcatttgagtttaacggagcagttaaaaagagggaccaacggactcacagaaaatatgatttgaggactattaccgccaatttttgaagttggggactcatctgcatatctgcatcaaccctaactttttgggaacttttgccgcaattatcccaaaaaattatttgcggtaaaacttgttgatcgtcattgttatactcatgactcaaataaaaaaaaaaagtaataacggtgatagtaccttctattataattaatttgttagtacaatgtaaaataatttaagatatattacaatttgattgtaaaaataaaataaatacctaataagagattgattaatataatgttacaatagcatttatacattataatacaatggtagaagaagaagaacattcattcacaaccttaagtgtagattaatgaggatcaccatgatgacttgaataaggtataaatacttttgtccaaaaacttattttctcctatctgttatcactgagggaattctcatggaaacaactttgagaattatcgagcctcgtgttttctagcaagtgcttgttgatagaaaattttattatctctatatgagcaccttagacctctttatatagtgtttagaatatcactatttaaaattttaactcacaacttcccatggatattatggagtcaatattaagtgtaaatatgagtaaaagagatgtaattcatgcacacaccataactcctatagcatgaagaattttaaattaagaggtgtaacacatttttacacacttaatataggtgataattgtggaggttacacatagtaacaagtaacttcacggagtaagtatctgtcaacctgggcgttgtgctcatctttaaggccctcaggtttgtggttttctctctgagtttgcttgaatctttattatttcttataacaaaaaaaaattcccatgacaatttttttaaaaaaacttattagaactggccatgttaacaatatgtcaacctggatgctgggtcccaaattggcccattggaatagttccgtttggtccccaaaaatagttgaatcttaatctttactaaaacgtagaatatgtccagaagatttctcgaaaaacatccttggaattggcttaggttgacaaagagtaaacctcggcactgggccttgcttttggcacctagaaagtgctattttttttttcctcaaaagtactttcttcctcattttttatgaagacgaagaagatgcaaaaatttgatcaccgatctaatacttggaagttttccaaattgacaaattgtaaatttgggcgttgggtgtccaagcaccgggtgctctgggtgctcaaaaatgaactttcttcgaatttgattctaatgcctcaaatatatctgtggtatgtgtagttaatgtctaaatgtaaaatttgacccatttgtactaagacggtctcaaaaactgaaaccctagttagggatgtgaacttgggcgttaggtgaaaccctaggtgcccaagttgactttcatggtgcaagttcatgtaatttcagctcctagggcctatatttgattgttccatgtcttcatggtacaaaataataaaagatagtgagttgaaaatgagttatcgaaacccgaacttctattctagagttcctgaagtcaatatgggcgcaagactagggacccttcccatgtcgactgctatgactcgggactactcaactccgaaatatcatctttcttgctacgcatcaaacattgatgtccatatcagtagagaaagttttcgagttaacaataacataatttgtgttttttatttattaatatatgaggtggattaataatatgctgacacatttcatcactagttagactattcagcacttaacatattagaaagtttcctaactaaaaatcaatttatgagattaaatattacacaaaaaaatataactctatctaaaataattaactaataaaaagtccaacaaaagaggacgaatataaatccattttaacaacagctgttcaaatcttagagtaaataataataatattaacaacatttattattattaattttttttttaattgcattgttaaattatgtcacacaacttgaacataaaatattccaattaaaaaaaaaaatttgttaggcaaaaaataaaaataaaaacatttaaaataacctgacaagactgggtttacgaccctattttgatgctttgctgacgtgtcacactctgaatggtcaataaaatataacagtcgtaacccctttatttaattttttcttacacttttaccccaaactaatttcaaattgcaaaaataccacaatcttctcaactaatcctttcgtttttaaatctctcaattttcgaaaccctccatttttggtttccaagatcaatttttttttttcccttcaattgtcttcgtcggcggataatggattcattggacaacgggaattgggattttctcgactgttcatttatcggagaaacccaatcctccgattttctatggtccaataacaggttcgtcttttattaaaggttgaagctttttgatgtttttttgtcgaaatatatgaaatatatgaaatttaatgtatttattgtttgggttttttgcagtattatggaggttgatttctcaggtggtggtggtggtggtgctggcaataatggcgagggtgaaggtgatagtaatttgcaagaaagggatgagaaagaatgctctcgtaagaggtgagtaatgggaatctcatttgttttgattcttttttatatataatgaatgattaagttttgtttgtgggttttgattcattctttgttaacaatcgatttggctgggaaaaattgatgctttgttttcttaacctttgtgattgtgatattgaatcttgaaaaaaggggttcttttttgggctaattaggtttcgtttcaccgaattgtgcccccgaactcttcatgctcgtaaaaattactatgaactattaagattgttgaattcaataatttttcgttcgttcaatttttactaacagcacttcatgtggatggaagttcgaggggacacaattggtacatgtcaaagtttgggtgacatgatttggtacatgaattattgccacgttaggtgttcgttagtaaaattaaacagaatttaacgaaagtccttaaatctatcaaattttaatagtttgggaggaattgttcatggttcacgagggagaagagaacatttccttctgttatctattctttatgctttgtagctttaggtcatgatgaatgatttttttaccttctttgtttttcgggtttgaattaagttttgtgttttgttcagggtacgcactgactcttgtagaaagcaaggaacaaaggcttgtcgtgagaagatgaggagagaaagattgaatgacaggcatgaatcttcatttagctcagtttatttgtttaaattttgattgtttatgttattttgatcgaattgccatatgggatcttcaaactttgggctaaaacttgatactttgtttttatcttggattgactaatttgttcttttcagagttttaaatcaaatctcatcttagaattgaacttctgatatttagtaactgatattcacaatatccttagagcttgttcctttcctactaatgtagtcatgaatatttttcaggtttttggatttgagtgctgttttagaacctgataggcctgcaaaaactgacaaaactgctattcttgatgatgctgtaagagttcttaaccaactgaaaagtgaaaatcaagagcttaaagaaacaaacgaaaaactactcgaagaaataaaaagcttaaaggttagctacatctcgttttcattgataacatgcctttattttccttgttcaaattcttttacttgctttttaatgattagttgtttcgttcatcactctgctagttgatttgctcaacttagaactggaatatgccctgtttgtgttctcaacttaccccataatagcatgatttatgattagagttctcttaaagtattttagatttaggctttgacaacatacttaataatccccattatcaat

SEQ ID NO: 24430 - DNA, 1981 bp, Cannabis sativa
tattaaaatacatcttaataaaaaaaaaattattatttttgaatagaaaattattttaaaaaaaaagttacccatgaatttctcatatcatttcactaagttggataaaattcaataatattttctttttgtttcaaggttttggatttttttaaactttttttggtaagaaacaaaaatggaatgctaagacaacaatggatcatattctaaagttttattttgattttttctggcatccttcgctttaaatttccatagagttctctttcatcttttctacttttatttgtgaagtattaaaaatacattatttaaaaatttacctagctttagagctaaaatttttattttaaaaaaagataaacattttttaatttttatatataatttgaaggaaaaaaatgaagacatatttattttaaaagaagaaaattagggagatcgctttttaattttaacatgctaaaaaatatatcacataatttaaagcaaaacaatatacataattaatttttcattaaccacaaaataaactaaaaaaataagaataattacataaattattgttcttctgtaaaattttcatatttttatatatttacgattttttataaaaacaacgtaaaaataacaaaaaaaaatacataaaaatacacatgcaaacaacatcacatgcaaacaacatcataatacccacaaaaaataatatacaaataataaaaaattaacaagaatattttcttatgtatttctgtaaataaaattattaaaaaaatatttaaaatttaaaatttaaaattttatacattatacaattatatttttataattttttattattttttgaaataattccaagaaaatatattcagttaatttctttaacaccaaaggtccaaaaacacggctcaaaaatgatagcttgacggtggcattaagccagccaagccaagtcatcgaatccacgtggaaagaaagaaaaggcagagaatgagaaccagtgggacccacaatcacgtggtcaatagtgggcatgacacgtcaactctaaggttggtcccacaagtagtatgggttttttaaatctttctctcacacacacacgtacgaacataggtttctgtgacgcacgtgtggagccgactgacactgcaaaaataaaaagtacagtgagataagaaaatgagtgtggtccccactcaaaacacaacactcttgccttgtccatatctgtaccgttcaaactgaacatcacacgtcagatcaatccccccgaaacaaatgtcaccaccttttttacacctccacaaccgtcagatctatcggggattgaataatctgacggctgcaataaatcaagatatatattgctaattagaattgtaaatataattaattttagagtaggagtaggagtaggaccatgctataattctacatgggtggtttttttcagtctttggctgaaacgatttgtcaataatgggggcatcaaatattatcagtatgagttggaccctttttaattattttattaagaaaattttgtacctaaattcattcttcttttttaattaaccattaaaaatttgatgtggtttagagtttactttgactagtaatattaacatttcaatgacttgatcttctttactacgtttttttgaggtattttgacttgaaataaagatgaagaaaaagaaaaaggaattcaaaagtaaaattttgaaaaaataaggtcaaattattgtcaattttcacgtgggcagggctttaaattaagttggagatatattctaataattaaaattaataatgttggtttaggctaattaatgacgtatatttacaaacatatataatgtccccacaatattatgtgtttgaaaaaataagagaaaagacataaaaaattcaatattgaattgggtaaataagtagtaatgtatgtatactaaccaaccaatccatgtgcttt

SEQ ID NO: 24431 - DNA, 2410 bp, Cannabis sativa
atggtatgattattgaaattaagtatataatgttatgtgaaattaaaattaattataaacactaagaaaatgaactaattaattagtcaaaagttaaataaatatatttaacatacctcattatgtttaagagttcttagagcagttttggttgagaaaagtttcttctcactgataatggtagataggtattctttaatgttaatgctcctattgatttatagaaaagaaatattaggtatgtaaaaattatttatacataggtctaattggaattaatttatgaaagataaatataaattagtttaccattaacgaagctcatttatttgtagaatgttcgtaaggttgatgatgaatgaactttgttgcttgaacaataaagatatacttattaaattatattatattataagatgactttcaataatagtaaaataattagttgaaaaaattaaaccattgtgagaaacaacttttagccgtgttgatattataatagaattttgaggaagaattttacatattacttttttgacggtcttagttagcttgccccacatagttaaagtttttaattgcaagctgtacaatatattttgttaaatctcaatataatatgtgcagtaattttaaaaaatatgaaggatgttagttttagacctttgatcaacaagaaaaaattcttgaatacttgcaggtccgaatcttgtgtggatttttttttattggatcagcactaaatgtaactgctataatttctgtaattcacattaaaacacatatcattatttatttggtaataattaagaagatcacataataaaaactatataaatattaccaacacaagtctttgtatcaatgtaggcgtcttgttgatcaagacaatacaagttgtagagatcttcaaagttgcattggttgtcttcaattgttccttaattgatgtagaagtgttgaggctccattcaaattgattgtcaacaattctaaactcttttttactggctttatataagcattggaaattaggtagacttttgaaacatttaaggtatcttcaaaatgattgattgcattaccatacagaatagcttgtagatgaattttctatttgtaataaataaaaaatacacaaaatgatataaaaaaaagtaacatctgtagagatttgatagttaattaatttacaatcttatatctttatagttgaaacaaaattttaacataatttatatagtttatataaatataagagttgtgataaatatacttctatgtcatcaagaattataccttggtacaattttttgttgtgagagtaacgtgggataagtttttcaataatagtaacttttgttatccattctctagtaataggtgtaattttttatagtaacttatattcaggattcatctttatctataaaaagaaataataacaattagtaaaagtgaaatctttaataattaatggtgataaaaattgaaaagatatataagaagagaattaagaagttctatatttttatatagtattgcttaataataatatttcatcgtaaacgatgttgaaggtatgattataattagctttgttgactgatggtggtctaatgagaacttttaaagctaataaagttttttctttagatagagtaatatataattgtctatgggagaaaataggctttagtaagaatacaccaactgaaactcaagtttgtcccagaactttgttaatagtcatagcaaatcttaatctaatgggaaactgagtgtgtttaaattggaatatatgttttttttttttttttcattttgcaatggagtaaaaagtattttgggtaaaaaaattcactttccacaataatcaccaataactattttagcatcaatattattagagccaaattgtcgacatattagacgtgttccattacataatctttcagaagtattaatattatgaagtaatataattggataatttagttttaatgttaattctagagcagggaatccacttagtgttaagctattcataaaatctacttgtaccccttattcaattttatccatggtttcgttaaaactataatattttatgcaattaccaagaaatcgatcaatgggaattttattaatatggctaatatacttatttttaggagttaatattacacgattgagtattgtattcatattttctatgtagttattaatatttgaaaatatcaaatctattaagtagtttagcgaagtatcatcatcctcataagataaaatcatagatcagagtaattttatctttccatctatagtcactggttcaattccatttataatatttaataaataattactaaataagggatcttgacttgcgcccatgttgtctgttaat

SEQ ID NO: 24432 - DNA, 1217 bp, Cannabis sativa
atatgtagctagaaagaaatgtaaattaatcagtttctttgatagatttcaatcacacacatagcatttgtccaattacaaaaactcaatcacggagttaaggcttgatagctctgagtgtaataatcccacaaatcactcacacatgagcaatgtgggacaaaacacactacagaagtttctttttttatttgatagatttcaatcacacatgtagcatttttgttcaattaccaaaacccgatcatgggttaaggcttggtagttatgaaaaaaaatgtaacttaatctttagaaaatataccaatactttcatcattatgacatttccaacttcagagccaacctatggaccagtcagttaagaatcagttggctaaaaactctattaaccacttataaacattgaaaagataacaataaaatcaaaatagtgagtaacaaagtttcaagctttaagtaaagttacctgaaacaaatgttatagaagaatggcaagaccaaatatgaatcaaagaagcgaaaagaataagaaacatccacaagatccctccaacaagaaacaaccgaataaacccctttttccaaacaatcttcatatgataatcttgatgcaactttccaccttcaacatctgccattttcaacacattagctaatagattattatacacaatacccatttcgagtattaaacatatgaaatctaaaaatcacttctttcccccatttttgtataaaataccaaaaaacaagtatacccttttacctttagaatgcgagctatgattacttcgctctcctcttctgtatgtacggaaagataccgaacgttgagtctctttctccatagttactcaccacaaattctcattcctacccattaaagaaaaaaacacattattcgtgtaattgtttcaatggagctctctaatatagcagaattatcttaaagaccgtgattcaattatgtataagcgagaataaaaggaaagatcccagatctgggaaacttacaatttgaggagatgattaagatttttgttagatttgatggagtgttcatgttcgcgcgagtttgagtccgactcagtaaagggttttggttcaagccccgaatccgactcagttcagtttattggaaatttttcatttttatgatttttgagtttagagtttgtaaaaatatgattttttatttttaagaaaaaactaaa

SEQ ID NO: 24433 - DNA, 10737 bp, Cannabis sativa
ttacttagttcatgtatataaaccattctttactcaataataaagtttaagattcatttcactaataataataaaataaattgttattaatataaaatgaatattaatatataaattgaaatatatcaaaatgtaataaagaaaaatggaacgatgaatatcgcattttttactcaaaatattatttgattttttatttataacttcaattattttaatgcactaaactgtagaataatttataaatcattattaaacacctaagttacatactttgaaaattttaaaaattatttttctgtaactcatttcttatacaaatattatttattctacaaattaattttgttataactcacttcataaataccttattataaattatactataccattacatactattataaataaataatcaaaattattaacaataataaattataattaataattaattataactacgcacaatttatatatatatatacatttaaatatatattatttgtaatggctatatagctataaaaatataactataattatcattacaaatatatattaataaaaaaattaatatagattattttacatgttatatactgttacatccaaaattcgactgtacttccaaaagtgacacgtgtcaattttttggagtatgaaccaacagatataacaacgattatatcattaaatacaaaatggaataacttattaaatatagaattaatagagtatattcataactcactgactgtatagttgtaggcgagacaaggatacacaaactataaattcctttattaacgagagaccatcttgccttggaaggcatagtcccaaggaaactacgtgtaatgtatagcgagacatacacctcgctaaatataagaaaatatcggtgagacgaatcatcccttcaaacacttagcgtataatccacacaataataactaagtgtaacaacttaaaaatatgcaggacatgattgtccagtctgcgaggccttatcttaagtttgctcagtacacttgagcgcatgccattgttggaaggcttataattaaaccaagttattatttgttgctcatctatatgcaacgcgaggtggtctacccacgtcaacgttaaccaccttgaagataggaatgacaagctgttgtccagttatcaattgttatccacaactgttcaaatagaacctgattaaaggccacgttttatgaaaaaaggttatgtaattcaaattaaatgtaaataactaccaacctatattcttaaaaataggggcatagtctacagaaaaagggacggaagatctttgggagaaaagatcactaattgtaatactgtataaagtatccagaaatatcttaaataagatagactcgtggagtatgcagatttaactgcaaaaccacgtaaaatacttggtatcattattactattattattcttctcagttttcttatatatctgtgtttaatttattacggaaaaaagctcattatttatttgttaacgaaaatctatgttaacagtttggtgctttcattgagagcctacgtgataaaactcaaaaaatccctcctaaccaacaaaatttttttccatggatgatgacaaccgaaacgataatagtcgtcctgaagagactaatcgtaggcctgggaaagagccaatgggttcacagaggcgacccactttagcaacaacgcgtttaagaagaagccaaggtggtcatgatcaaaacccacaaagagggattgataaaaccaattctaatactgattatgtacctagaagtgaggatgcctatcatcccactaggtatgtaccattagtagaattggaaaatcaacaactccggcaatgtctggtcgagtctaaccaacgtaatgctgagttggaaagagaggcagctatagccagggtgactgaaggaaacaatgcacaaaactaacctgatcatggaggaagaaggccatcaggttcaagaaccaggaggcaggagataaatcaagaaaattgctaagaacactcatgatgagcaacctgcggaaactggggatgttctagaagacgaacaacaaaataatcaagcacctcgtcgaggagtaacgcaaagatcgcagtgatttacgaatcacaggaatgaaaacaatgacgtgccagaatcttctcatagaaacgagaacataaggcaacccagaactagagaacaagagatccttcgtaataacgagagaaatcctgggatacagcctagacagtgggttaccatcgagacaaccctagtgttcttattgaactgatagggaggaggcatacacataccccagcggaggcatgtatccaacctttcctgaaggagaaggcctgttcaggacgaggcaagttctagctcgggacattcaagatctcgagagcacaatcgatctggaaggcatacgccaggaggagatagaccttgccataatgatgatcgagaaagtaggagtaatgcgaggggctatcaatctaagagttactcaaacaaaaggtctgtgagcaaccatgaacgaagacagccagatctttgtgagcatttgaatcgaagacaactcgatttacacgagcgcttaaatcagaatgcacctgatttacgccaacaactcaatgctaatcgaaaacaagaggatccaatccaattgcaaatcattgagttggaagagaaattatgcagataccaagatggggaatatgggaaagtgtcgatttatgactcggaggaagaacccaagcctttccatctagacattatgaattgtaattcccccaaggatttgaaaaccctcacgttttgcaataagatgggacttcggaccccgttgctcaccttaaaaatttcaataccataatgcgagccagcaatgtctcgactaatttacgttgtattttattccctacctcattgactggagtagcgagtagctggttcaataagtttacccatcattcaatatcttctttggagcagttgtccaatgatgttaagaaataatttcaggtagcaagagacaggcgacctgaagcatcctcccttactaacataaaacagtaaccaggtgagacactcaaggcttccctgagtcgatttagtattgcaactgctaaagttggacacttgaacggtagtatacaacttattgctcttcaaatagggattacgactaacctctgaacagctaggggcgagttgtaggatgactgacaaggtcgcccggtgaggaatatcaatgaattcaatgagaaaacgcaaatgtttgtgcgcaaagaggaagcaaggaactagatgaaattgttaaagacttgatcgggaagtaaacccagcactgccacaataagcattgtctcgacaaaggctgacaatccaagtgcctctaacactaagagaaaagatgtctctagggaatgaaccaaaaataataagaaatagaaaaagcatgataagtatgagccaatttacactgtttataccgagcttaatgaaactcgggaaaacatctttcttgcaaatgagccaataagacatgcgagacacaaaagaaattcaacaaaattctgctaatttcataaggatagagggcatacagcggaagaatgtcgtcagttgaaagacgagatagagagccttttctagtgcggttattttcaacagtatgtaagacgacaaggtaatggacaaaactagccaaatatgtcaaataaccaaggaaaccaaagattacaacctcttcttgtagaaggagaggagatattggtcatctcgagaagggccgcatctcgttgcaagaaaagtagtaatgcccaaaagagatatgtcaataaaataaaaaatgagtgatcagttttcttcgaaatcatctaataaagtcaagactgatgaacctccaattgtatttttggaggaagacgcaaagcacatgaggtttccacatgtcgatcctctcgtgattacaatttcgcttgccaacaaaagagtaaaaagggtattggtggataatggaagctcagtaaatatcctttacaaggataaactaaggaatatgggattgcgaaatgcaaaattaaaaccttgcatggtgaacttgtgcggatttactagagatagtgttaccagtcaaggcattattgaactcccattaaccataggcgaaccaccattaaacacaacattgatgcaagattttctagttgttgacctaccatccgtctataacatactaatggggcgcactgcactgattggacaaggggtaattagtttaatcaaaaacctctctttaaagtttcaaacaccggcaagtgtaggtgtagtgcgaggtgaccaactcttggttcgcaaatgctatcgtgtaaaactgcagaatagaagggccaaccatcagttaatggtggtcataacagaggaaggtgagaagcaagaagaagatctagatcctcagattcaagacaaaaaaaaataattgaaaccaatcgaggaactagaagaagttgttttagatcaaaaaaatcccactaaatgtgtgcttattgggaaaaatctaaatgaaaaactaaaatagtagttaatgaacttttcgaaggcaaaccaagatcaatttgcctggaacaattcagatatggtagggattgaccctaaattgatttgccaccatttgaatatcgaccctaattacctagctaaaagacaaaaaaggcgacccttggattttgaaagacaaggggcacttaaggaagaagtggacaagttattaaccaacaatattatacgcgaggcgttctactcctcgtggatatcaaatcctatttttgtcctgaagccaaacggtacttggcgaacttgtattcacctttcagactaaaacaaatcatgtcaaaaagattgcgttccctttaccagatgaccagttggtggatgcaactgctggacactggacacgagctaatatgttcatgaatgatgaatgcatattctggatataaccagatcaagatgcatgttcctgatcaagagcatacaagtttcgtaaccaacatgtgactttattgttataaagtcatgccttttggcttgaagaatgctggggcaacatatcaacaactagtaagtggaatgttcaaaaaataaatagggatgaacatggaagtctatgtcgatgatatgttagtaaagtcggtaaagtgtgaagatcatacaaaagatctcgcagagtgctttgaaatactcaaaaagtacaacatgaaactcaacccaaaaaagtgtttcgttggtgtctccttggggaagttttaaggtttcatagttaacacgaggggtattgaagcgaatcctaaaaatatcaaggctttgatagagattccctcgcccacaaagccaaaggaatttcaagccttgataggaagaatgggagcactaaacaggttcatctcaaaatcaactgataatttcttaccattctttaatgtgttgcgaggcaacaaaaagtttgaatggacggacgagtgctaggaagcctttaggagcataaagaaacatttatcaacacctccagttttggccaaaccaataactagagagactttataccctctacttggttgtctcagatatgcaattagtgcagcattagtgcgagaagagggaaagcaccagcaacctatgttagtaaaaggttactaggggcagaatcgatatatccccctcttgaaaaactgcccctatgcataatccatgcatctcgcaaactaaggccctacttccaagcacatcctataaaggtgttaaccgatcaaccattaaggcaagttttgtcaaaaccagatgcttctagaaggttgataaaatggtctatcgaactggggcagttcgatgtaacctatcacccgagagcatccatcaaaggtcaggctttggctgatttcctaatagaaggaatagttctagatgaaaatccactttccagcgaaacacagaaacttggaaattatatgtggatagagcatctaatgaaaattgcttgggtgcaggagtgatactgctctcgccagataactttaaatttcactacgcactaagattcaaatttgattcttttaacaatgaggctaattaaaaaagctttgttggatggtttgagaatggccaaaacgttaaaagtcaaaaatcttatatgctatcgtgattcacaattgattgtgaattaaattctaggtcaatatcaggccaaaggtttaaagatggaaaaatatttggagaaatttttaaaaacttggagaagttcgattattttaaatttgaacaaattccaagagaaaacaactcaaatgctgatgcactagccaaattggcctcgcaaaatgaacttgatgacctaaaattaaatttggtaccgatggaaatgttgagcgaccctagtatatgtgaaaaggaagaagttgtgatggttgaggcctggccgacatggattacccacattgttagctatctactcaacaaacaacttcctacaaacaaaaatgaagcgcccaaacacttgtatttcgtgccttgctataccatagtagaaggcaaattatatagaagtggttattcaatgcctcttctacgatgtgtactcccctcagaagcaagagagataaacaaagaaattcacgaaggtttttgtggggatcatgcgggttggcaaagcttgtcaaagaagataatccggcaaggatacaattggccaacaataaataaagacacacatgaatttgtcaagaggtgcgataagtgtcaaagattttcacatataccttgcgtaccaccaatagaattgagaatgatgacctcaccatacccatttgcaatatggggaatcaacttgattgtggcattacccacagggcgaggaagggcaaagtacgcagtagtggcattcgacttcttcacaatatggacagacgttgaaactctagtttccataaacttgcaaaaagggttctgatttttgtcgttaagaacataatttgtagatttggaatacccatttaaatagtatctgacaatggaactcagtttgatggcgaattatttactgagttctgtgaaagggataaaatcattaagagcttctcatcagcttcaagaccccaagcaaatggtcaagtagaagctattaataaaaccttaaaggatactattaagaaaaagttggatgttgcaaaaggaagatgggtagatgaactaccacaagtactttgggctcacagaatgacagagaaaatagcaacagggcacactccattcacgttggcatttgggtcggaagcaatcgtgccagtggaagttaatattacgactcacaggcgagatttctataatcaagaggaaaaccaagaactactaaaattttccttagatctacttgaagaaaggcgtatagaattgtaaattactaatgcaacatatcaacatcgaattacgagatacttcaacaagagagtgaagaaaaggctttttaatgtcggagatttggtgtttagacgggtatttgcaaacacgagagatgcatttgatggtgcgtttaacccaaaatgggagggtccctatgttttcgaggtaatggttagaaccaggatttataaatttactcggctaaacggcttgctaataaaaaaccactggaatgttgaacatttgcgaccgtactaccattaaacttatgtaattcttgttttttctctttgtgatgtaatatttaattattaataaagtttaagtattattattcaagtaattacatattattcaagtaattacaaagttttattctttaaaattacttaggggcatatatatgtgtatgatcaactggaatttatctacaaatacatgatatattaaaaacccacagtcaaaaattggacctttctctttagaaaggaaaatcgaagtagcagttgtaaatgacattaacacgtaaaaataacactatgctacatgcgaagctgaatacttaacggctcacatttgctaggcatgtttttaaataaggcatagagattccttgaaaaaagaatgcttaacctaaaaaaatattaatagaaggcctaactattcatatagcaatctgaaaatgtacaaagtaattcataaagtgaattattcaaagtctgttgaagtttgcttattaaattaaaaatggcagattataactgctcgcgtgaagtagaactgataagaattgctcgagaatagaaagcaaagtagattaataattacttaagcaatctcagaggaagaaaatgaggtcaatggaaacgttgttaacctcgcttttagccaatgacagtgagtcaattaataagcgattagaaatataataaaaatagagccaaagtcaataagcaataaagaacaccgggttttaaagacgttcaacccctttagttcaacataagcctactccccttagattgtattgacttaagaataaagaacatggtgtttcctctctaaaagctctcacaatgaaatctctgagtgttttttcttagatctctctctaaagcaattcttttgatccctttacagtgaagctagatcactatttatagggcttaatgcatgagggaacgtttcccttttgcgtacaatatctacaattggtaagaacatttattacataattagaatacatgaaatgaggtattgagatagcctaccatatccttctgatacaatccgatgattgtagggattgctttcatgcttgggcttcacgatgctattctgaaatagtcaagtcttggtacacagctcgaagatctaacttcatgctttgctaggatagtctgccctttgctctactcagacaagcagacaatgtgcgtgcagatatgttgcttgaagtctgtttggaatatttctcttcccaagtacaaggaatgatggatatgtgtcactcatacatgctgccacgtctgcacaggacttctgaagtcacacgtggacctcactcggtcaggatccttgtttgaatgggtggcaagtgtttgatgcatctgttggtgatccaacatgattatgaccaaaagtctcttcgatattcagctcattaatgctgactgatctataccttgaattactcaaaaaatttgcacgcttttatggttgctcttcaagtacttgaatgcctaacgtttacttttggggggaaactgaggcatttaaaatttgaaatgattataattccccactaattagcttataaatatggtagaaatccctaataaaccacttttattatttttccttcttgatgatttcagagcaacaaccctttttcctcttaaattcttcgaagaattcccaggaagtgccgatcaatgtcatccgaacaactctaaagcttcaaatagtgagtaagttcttcatcactttcctgttttatgtttaaatatttgattttctgggtttccactacagaaaatttgatagttcttgagcttgttctaggaaaattgtagaaaatctaggtttaggaatatgagattttgattatgttcatccatgtgacttgactgtaattgcattctaattttgattccacaatcttttgtttcacttgcccattcagggtttagggaaaattaaccctcaattcaaagttttgaaattttgggttataaacctaatattgtgcaaaatcttcttttctaacccttcgattggacctggtcggtatattcaatttttttttgttcaatacctcggccaaatactcatcttgtgtcctacattttgtagataaaccctggtgagttttggggaggagaacatcaaatcgaccaggaacttcttcaacttctgtacaaagatcatcctcgtctttgtgccagtccgtcctcatcatgtgacggtctttccaactcgagctttgaggattgggagataagtagcgaacatacgccttctccaaaacgtgaggtgcaacaccatttttatcttagcgagatcgttgagctatggacattttatctgggagcttaagaaggggttgaggcaatactttccatctaattggacgtatattttctgactagatacaattgataccattcccgtaggccgtccaaaccctgctgctgtaggtacgtccataactgcgtttgctgttaccattgccaaacataccgatcaaactccgtctaagaataggatgatggcacgcaccaagcagatagtgcgcagatcttctctgactgaccctcatgtttctcgaatttcctcaatgtcgagcgctgaataggcccgacctgctgccgaggaggaagacaatgagggggacgccgaagtccaaaagctagaggatcagggcgaggtccgtcttgttactccatctgaagctgaggaggaaggagttgctcagggatttccctttaggggttttaacgaggtaggggaatccatgtccgagactaatgaagtcatggtagagggtgaagactatgttaccgaggaatacaccgaagttgttcctcaaagaagataaggtgccttaggagctcagtgggtttcacctcaatccatagtaacccaggccaagatgaagaatttggagaagcacaactacttgggaaatttcgaatgcttcttcccctctccaaatcacagggcaactagccgaagacatgggttttgt

SEQ ID NO: 24434 - DNA, 4895 bp, Cannabis sativa
tgagatttgtagtatgtattggaaaatggaaatatgaaatgccctcaaaatatttgattagcaaagtgaagtgaaggttctgtgtcgagtttcactttatttatcaattggttccttttcttattttcttttaattacttccagtttggatttttttcattctgcacagctatcatttttttttctttgattttgtttttatgcattattatttttgaattctattacagttggagacattcaagaggcagctaatgcagtcgctaaatgatgaaaattcatctgtaagattttttggtgacaaattctagatgcttatctttattataattacgatttgatgataatctcacatgaaactcattagctatgacattttgttcttgcagccagtccaaactgttgacattggaacatgtgaccaatcagtccctaaggcatatcctgataatggtactactagtctctctactgataagctttttcattgctttcttccttggctccactttgttcattgttgtcttttgtggttacagatgaagtgacaaatggctacaatggagtacattccttgagtggctctactgacacgagatactctagtgatgaaggtatatgaactatttgtcatgattgcacatcatttttcatttctaatattaatgcttccttgatgcaaacacaaagctgttcttgagtttatcgtttctctagttgttcctaatctttagactacaccttaggcttgaatagccaaaagatctattgtatacttattggatgttagactgaaataaagttaagaaaaggagttagactgaaccatcactgtatttactattagttatttgattattgttcaatatattaacacaatatcagagcacttagtggttgtttagttatcaatcaacgctaataagcctaatattctgttctacagcaaggaattctgggaacaggttttccatgacttcatatattactccacggcttactcctactggaactccaaaaattatttccacaactgggtctcctagaggatattctgctgttacatctccacatcaaacctctggtgccacttctcccacaaaactgccatatgattcacgggcatctctgtcttcttggtacccatctagccagcaatcttcagcagcaaactctcctcctcgtagtcgtggattgccaggtttgcattgttacgagttatcattgtctactattataacagtttggattataactccactacttattattattattattgagtgctctcatatcctatttgcattgtgtacacaggtttatccttctattaatgcaaagtaaacctattttattttctaatgataaatctagtcaatgttactgatattcttagaccattttaacctcattatgcttatacattaacttgtgcagggcgcactccacgaattgatggcaaagagttcttccgtcaagcccggtaggttctgttaattgtgcaatgtatgatgggtggtttactggaatgttaaaaaatgtcttcacatgctgatgaattgttttgattattttgtaggagtcggctctcatacgagcagttcagtgcatttctagctaatatcaaggagctaaatgctcaaaagcaaactagagaggtatgttgttgaatccttgcaattatgctctgtgatgatgcaattggatatcttagactggttgcttaactagtggtggtggttcttatatttttccaggacaccttaagaaaagcagaggaaatatttggcacagataaccaagatctttatttattatttcaaggattgcttaatcgcaatatccagtaatgcttcaagtatttgtcggttggaagggtttgaaataagtggtacgtttctctcccaaatttgtgtttctgtgcacatgtaagtaacgttaacttcatcctgtacaactatggaattgcaggtaacagagctccagcaaggcgagcacatggagggccttgagcacaaaagttagttatgaattgctgtttgaaacgtcgtggatcaactcattcccggttgctttaaatggatgatttatgatgtacttggtttgctgaagttaactagtgtcttcttccctttcaaaagctgtggtatggttttttaagcttcgttaatatgtatcgttaagtgcaggtatgctttgtacataatggctttattttttcgcactacctgctgggttacccaaaaaggttcaattattggcattttccttttgaaagtttttcattcttgaatttgcatgtacaaaagaaccatattcaacatcagtcatgttctgttctttctcactctctttgtcacatacacacacaagatacaattcatctattcatttgttaaagtaattcaggctaagttttgattgtgatattgaatatcggcggctcgggtcttcagattagcatcttttcactttaaacttgtggtttgcaacattgacaaggtcacttaaaatcatgctctgaactgaatctgtaccaagtctcttttagttaaattagttgttgatgctgaaaaagaaagaaagaaagaaaaaagacagagatgtttgtacaaaaattgatagctctgcagaaatgtacaatacaatctaagtaagtgacacttgaaagggtttgatagtagaaattttttggtccttgatttaacagtgaaatcattttcctgtttgtttggatgtacgaaaaatctaatgtaataataacataaacgtttaaaaatgcaatgccttgattcgagttggagacagggaataaagagctttttattttatgctagattttgttgtacggtagtcataccatgtgccctattgcatatatgaatgttggccaatatgactttgaaaaaagaaaagtatgaagaaattattgattaaatcatgtaattattgaaattcaaagacattgatcttcaatgatataaattgatttgactggttaattctatgacacttatttattttggttgccaattgccatggttattgtgataacttggaaaagaccaggattatgaattagtgggaaaagttaaagaagaggaaaatgccctgtatctcaaagtgtaacaaatctataaaagtaggatcttggaatggtgagttgaaacaaaggagtgtactataagaaccagaataattttgtagtggtaattgatagaaaacaagaagattgctgttttgatcttatgcctcaatatctaccttatattcatttttagattacattgacaactccattattattattattatgaatgaatttcagttcctatctttacttattttggtaaattattaacaaggaactacaaaatattcatcattaagaatttcagctcctatttatacttaatttgttaaattattttacacaagaaaattagttgaataagaacttcatcagcttctctaatgtgatacttaaatcacttcttgtcttgtagttattgtaatgaagactcaaaaaggaatacataatacatatcatcaattagtggaatcagtttgcttaaaaattgagacaatcatttcttgtctctctattaaaaaaaataaaattctattcaactctacctcttcaatttttttctttttgggtctttttaattagtttaaatatacataattttaaacccaaaatgagaaaataaaaaaattattcacatgcaagtgggatggaagggaaggcaatattggccatcaagaagaatagaaagcttaggcacctgatactgatcagtaccagcctgcaaatctcttctcttatctttatttttcttttcactttttttttttgtggaaaataggcagagaaaaataaagattaaaaaaaaaatatatatccactagaagcaaagaaagcatctcatgcatcactaaaaatgtgccttcaaggtttacaattaaatatataatgaatattataaatattattaatttattagaagtagagattgtaaattaatgtactttttgtgacaagaggaattatattattttattggacaaatttaaacataataatcaccaaataatctgtttgaaaaattcactttttgtgtggtgtgtgtatattatatatataaatatatatttctaaatttgtcgtttttgagtttctccataattaaattgatactagcttaggtaatataggatagctacccaggaatcttttaagataataaaagattatgtaatctctaagaagaacaaaagtacatgtttgcttctatttgatccttttctttctccaatagtagaaactagaaacatatataaataaagataatttaaaaggagaagataaaagtggaaactttaaataatcccatatatacataggtctatgttttagcatttatccttaattaacaaccttttttttttaccttacaaataaaactttattgtggttgaaaattagttcaacagtaacttaaatttttacattaggattatctcaataaaatattagaactccgttttataactcaatttctcttaaattagtagtggttctccttttagtcgacgatctcagaaaagattactctcgaagaagcaattcagtaaagtattgatagagctagtgtaatcaagaatcctttcatgtttgaatgttgggatcttctatttgtaggtgggaattggtgccacgtattctctcgcactttcttttctgttctgccttctgaactccatttcttaagctattctgaactcaactccgctcttcttgcaatcccagagctcctcttatctttaagtaaaacaatgtgttttttcttttttcttgccatgtcattttgtcaatttccatataaatataa

SEQ ID NO: 24435 - DNA, 4902 bp, Cannabis sativa
gatggaaaaatccaatatccaataaataattggattggatctgatgggtccaaatccattggatgtgatccaatgaacacccctaactacacatgcatacggtaaaattttagaaccttaaatgaatgaactgtagttatggattttcaatagttgtgcacaactgggaaaccaatgctatacctggtaaatggggcatatcctttcgtagttatggacatggccaaaaaaggcaatgtcgaccttgtatctttgccaaagcttttgtaggtcgtcccttccttcaggctctgcaaatgagccctgctgggcgtaccaagcatttgatgaatagccaagaacacggtgagctataaagatcaaccaaggctgcttccttctatctgctgatgcaaagcatttctcaatccacttgtattgttctgatcctgctctccagtcatgttcactatcggctacacagaatttaagcattccataatctgctgagtacctgcatatgttgcattacatttacattactttattttcatcctcttgtgacatctagtatagatcaggaaaatattatcttctcatgagtgaatatttatataaactaaaaagctgtgaagttttaccaaaacttggctcgattctcagctggaacatagtagagagtttcagcaggtacaccacattcacctcctgaatcagatgtgtcccaaaaagaccccgaatttggccaatcacgttcatgattaccactgcatttacatgataaaaaacattagctcaatgtggcaaaactgataaaaatagaagatattagatagaaataaacaaaccttgcaaccatgtatggaacagcagaagcaatgggtgagacttgtgctataaactggtcccactcagataggtatccatcggcatatgccatatcgccgatgtggaaaactatgtcatagttcttcaggtccttaacgagttgatctgtggtgttgagtgaacctggttgtgtgttaccatagtcattcgaaccatctctctctgcctgaaataaaaaaaatgataattactgatcataaatttaagattaatacttaattgtggtaccataaccatttagtaatatatattaattaagctataaagtacctttcccatgtcgccaaatacaataatacgttgtaaagagtcttgtccagggtacggtgaggctctaaaagagtaatatttactccatacgtatgaaccatcatataaccgatgacccattctgtaagtgtatctgaaacaattgaaaaaattactatgttatactactctacttccttttatgttatatcttcaaacaaaactcaattacatactgagagtttggccatagttctttaagaaaacttgtgtgtatgaatccaggatgacgccatccaactgttcttgcaggtgcacctacaaaacaaggtcaagtatagtttagttttcggggaacgcctatagctctagtttatttttttttaacataacggtatttattatagttataacttgttgacgtgagtgaactagcaccatagtatgaattagagagttttagtaaataatatatgtataccacacatgctggtacgatcataagtgagtgttccagctggggatcgttgctgggtttctcctttaagaccccactcaacaaatggaacagcctcatctatgttgtatccactggtccaagttacagtcatctatattccaagattataaattaaaaagcaaatagagataaatagttgttatataataatcaacttggtttaagtaacttacttcatcccaagccttgcctatagcaagacgaggataaaggggtgcctttggattagcaaatactggtagagtgttcgaaattgccaccaatttaggctgcaatattattattattattattaaataaatgggattaacagttaagttattatttatgttatatacttagtacttacatttgagaatccacctgtaaacaaggcaaaggaaaaatcggctctcatattgattaaccgaaacttcaaagtggctacaccagtggtcgtgtaatctttactagaatagtttgcattttggaactaaagcataaaaaaaagaaacatgttagagaaatttaataatatttataggggcatttataaagagcttcacagaaaaatctttacgatgtatgatttaattaagacacttgatttttattttcatttttattattgtgttcatcgtatcattgcatttcttttactaattttctaattttttttaaataatttacattgttaatataataatcaaaattttcatagacatattatgactacaacacttttccccacgtttatcaattatttgtccaataggcaaaaacaaaatctttataataattataataaaaaaagtaaaagtaaaatgacctttcaatgaaaataaaaagaaaaagtgaagtgattcaaatgaaattagttggcgacaactcctcaatctaagtaatttattggctaattaagatttttgtatctgaactttgatatgtactaaattatgctctttgaacttttaaggtcgttaaaaatactcaatgaactattgagattgttggatttaagtatttttatctaattttatttaattttactatttcagtgattgtttatgtactaaacaatgttccctagactttgatagatatctaccaaatcatggctctcgaattttgacatgtactaaattatgcatcttgaactttcattcatgttaggattttttactaaaattgaataaaagtccttaaatctaacaattttagtagtttaggaggcatttttaacgaccttaaaagttcaggtacataatttaataactgtcaaagttgatgagtaaaaaacttaattagtctaatttattagattatataatatagtttttccgatcaaagattatatatataatatagttgactaaactactcattgcactcttcaaaaaataaaaaaataaatacacattgcccaaaaaagtaaatcatacaagaaccattaattgaaggcactcaatttattttatttttttattatttttttttttaaaaaaaagagtaattgaaatagagacaaaatgtgtaaaaaaagaaaaataatacataacacaaaccttaataggagcagagcatatgtaaggtttttcaacttcgctatccttggctccatttggtgggcatgttgaggagctgcatatacatgatttcatgatcatcttcataaatatttatatatatatatttatacatatattaaaaatgatcatttaatttcatttattatcatcaagtcatttatacctcgatctattatgacttatatatatatatatatataacattagattattatgaatagacttactcaaatttcgccggagagaaaacaccaacccaatcatcgttggctggttttgaattcttaagagtcacactcacccattttgcatcttcttcaataccattattatttttaccctaattatgcagtatacccacaacattaattaattgattacttaatatattacataaagtacctctatacaagtatttaatttgtaattactacctataataaatacatattttttatattgtcagtgaacaagttgtaatttttattatttataaatttttttttttgaataatttaagatactgaactcatgattcaaacaatttattcaaaattctgaaaatttttgagtaaaattatagtaaagtaatctttgcattagaaatttcaaggaaaatcagggcttgaaatttgacaatctagttcagaaaaaactcgtagaattgtataaattctaaagttacatgttttggtaactaaatgactaattacttgtttttatgaactatgtgttaataaagtaataattataaaaaataaataatacgcacgtaccaatatagtcaaaataaatgcgcaattagttgtttaaattctaattttgacatatttaaaaatatgcagtgactacaaacaatgaaaactctacaatttttgtataaatatatagtatttagaaatacctttttgggttgaagatcaataattttagcataaatagaagaggagttgttattaagagcaagcttgcagttgagaatggcaattttagagagtggctgatccgcattaagatttatttggtcgtgacccaaagctgagcatgaaaataatcccaccaccaaaacccacaccactaataatctcttcatacacacttcatctaagtatgtcattttcaaattaacaaaataaatgaatgttatatatctaaatatgtatttatagagagagagatcagagatgagaaagttagcacattagttgtgtgtgtgtgtgtttgcttgtgctactatgcttgtgtttgattcgattaattagccgttccttaaatagaaaaaggatgagtagtaagtgggtattcttaattaataaaactatgcatctttttgtatataatttaatatcgacaattactttataataaagtcttaataattaagactgtctttatgttaatgaaactataaagtaatcaaattaagcacaaaatttaaatacacttgctgaccagtattatatatagggatattatttgcggtataaatgcttatataattgacattgttgtatttaaaattcttatgttaattgtttagtggcaaaattccttaaatagtaattttgtcacacttaaatttcaatgtaaattttttagcaatataaagggaaatttacacagtttactgtgttttcccattttctttcttttatactgttacactccaaaaataacttttgtactgttttttttttt

SEQ ID NO: 24436 - DNA, 2492 bp, Cannabis sativa
aagagtttttagcgattaaaccctctcaattatcgttttacttgtacttaatcattcaagtcaaattttagcagtaaaaccttttaaactacagaattatagtaaattaaatttaaggtatcatccagttaactgtcactaactatcgactgcttatgtatatattcttgtacacgtgacacatttatattggtacatctaatattattatttcaaaatttattttaaaataataaaatattataaattttgaaataattatattaagtgtactaatataaaagtgtttgtgtataaaaaagtataaataagcagtttatgttagtatgaaaaatagttaagacctaaactaattggaaggttttattactaaaatttaaacttataaggttaagtggaagtgaacttagaataagaagatattgacctatcatccacaaatacgcagtttgctggatcaacttcaagatgttccacagcctccaaataaaaatcaggatcaggcttcctctttcctgaaagatatagcaactaggaaggatcatgcacctttcaacccaagaattttgggtaagaaaatagaatttctttgcaagcacagtgagaattcaataaagttgttgactcaaattactttcttggaaatatggaactgggccattgttcaacttataaatatagaaacatatgcacaaattctaagagagaattacaaattaaatgttaagcataccattcttaaatgagcagaatgtccaggacatatatcttgagatttttaacttgtcttcaatcatttcacacctgcaaaagagtaattcctgaaaatgatgtgccaattcttcagagaaaaggaaacttttatgagagaattctcatctcaccaggtgggatagttggtaaaagcatgcatctcatagttgttgtttttaagtgcattaagcaattcttcaactccttcaaggtaggaatatccacttttcatacagtttttgagacctgcaaagaaatgaacacgaataaatcatgtgaactataagaatagataaacaaattaaagatattaagataaaagaacaaaacagaccttccaagtccaatggcctttcatctttgaagaactttctggctagctctacctaaaagatgaaatgataaagaactataataaaaccaagaaatggaaactggtgaaaagccttggattgttaaagagtttatgagacacctccacacctcatcaattgtccccttttcgaattccagccacgcagttgggtgtttgcattcgattagttccttcatagacattctgcttgtaaaatctaaatgtgattaacgagaaaacttaaaaattctactaatttgacttagataagaactaattcttaaatacccagatgtaaaaattcaaaatttaaaacaaccacaagcattagcttaacactgtcaaagaaattggaaagaaatctgggagaatatgaacagaaattgaataaggttcaaaacaaacgaagcttattactaaaaagacataattttggtacctgaagaaggcaggaacatcgtggtaaaaagggtcacgaacaatggtatccattatgtcgaagaggagaatgggaagttttctattgttaaaatctgggaaagaagctctggacctgttcatctcggagtgtggggccttgagatccattcttgttgatgtcgagtgtaacaaagagggtcttggaggaaaacaaacagagggtaggctcaacaacagaaccattttcaaagagaactacaaaatcattcgcttttaatggatgtttggggggactccatgggtgcgtagcattgtctccgcttgcgggtgagctcggtgcaatcagggaagaaatcaaggaagctcgacgagttcacctgagaaactccaaggtgttgtaagactgccaaacggcagtgaagatggtgagtgcagacaatcaagcttttggtgagtttgagaacctggttttggatattagggaagagatgaaagatagattttgtaatggttttatcatttatgtttagtgattgcaactgggttgctcatttcatagcatagcaagctttcagactcttctgggagagaggatttcctctcgttgcttcttcacccatttgtattgaccccttttgttttctacctttctctttttttttttttaaaaaaaataaaaccaagcaatttggtaagcttgatgtgactattaaggagcttgaagataagctcaactctcttcagagtcttccggctggatctagaaattggaagcaggaatgtgaagttcgccgggaactcaacaaatcaagggaaagaaaagcgatctactggaagcaaagggccaggatttcgtggctcaaagatggggataagtgctcaaagttctttttcctttcggccgccattaaaggccggcgaaacgccattgaaagtattatgaatagagataacgtctggataa

SEQ ID NO: 24437 - DNA, 1138 bp, Cannabis sativa
aagaatatctcttattgattaataatgctgaaaaagaggccttacatagacaatgttacaatgaccaaaaaggacccaacaacttgggaaataacagaataaccaaccatagaaatcaattataaaaactacctaactaattctaatacttagtcacccaatttaatattttcttcatttatcctaatttccatgaatttacgactatggattttttttttaaaaaaaaaaaaaaaatacattcaatattctaaatgacatgctattatctttaagttttctcacttgcattttgttttaatttttctttagaatttgaagagcaatggaaaaatcaaatctgttaggaaaataaaagtgaagaaaatggacttgtatcatatttacatgtgattcatcttgattattataacttagttaaagaactttaactgatggcaaactgtgtaatattgtaataatctatatatttatataattttttttgttagagtatgtgtagtggtgctctttatttgtaatgttacaacttctctaatttgtgatttttttaagttaattactatttctatattttttttcattaatataatttataatatgtagtgtaaactatgtaacaatagctaatttataatattagcataattgcatattattttaaattgtgatgcaaaatctatcatataatgatttaataagtgcacatacagttacttttttcatatcatttctctttatattaattatttttataagttatatcataaacatttaaagtagtaaatttttttttaaataaaaagctaaccttgaataaaattaccccaacaatttttgtactaacgtatgggtattagagagactaagaactaataagagtcaattactcttatgtaattaattatcaaaaaactactcaagtactaaaaagactaataagagcccattatattttattattttatggaaataataagttgaaataactcattcaaaaacagctcatacaataaaataaaataaaataaaaatctaattttatatatatgggtgtacttttaatggatattactcatgaatgggtaaaattagaaaattttgagtttttatgcttaattttttatctaattaaaaa

SEQ ID NO: 24438 - DNA, 2787 bp, Cannabis sativa
caatatcaactttatacttttgccagagtttttgaagactgtccctgcccataggctctccgaacgatccttcgtccacgtaaaagtctccagaagaatagccaaggacacgatgtgcaagaaagatcaaccatggttgcttctgtctatcaactgatgctaggcaattttcaatgaatctgtattgttcagtcccttctctccaatcaagttctgtgtcagctacacaaaatcggaacataccataatctgttgagtacctgttaaagaaagtaatgtgatgttcaatgccagtgagaagtttctaccaagtcctataacaagtgaaaatttggcatcaagatcagaatctcagatattctattggcaaaacaagtggggtgagtaattctcctccatgtagtaagggtgaaattgtgagcaatgtgaaaatattagagagtcattattgtgaacaatataaaatattgagttggtgtttgttgaatagatcaggatgccaaaggactattgagaataattatatgcacttaactacaacacaaaattgctttaaagtagactagacccagatgtgtggtcattgtttcataccagaacttagccctgttctcggcagggacataaaacatagtttgagccaagacaccgcattccccccctgaatccaagttttcatagaaagatcctgatccaggccagtcacgctcatgattaccactaaaataaatcagaaaaataagatgtaagattaagcaataattttgaacttaaaacaaacacatgatctatattgtagtgacaaacctagcaaccatgaatggcacagttgatgctattggctcaaccatagaagtgaatttatcccactgcgaaagatatccatttgcataacatatatctccaattaggaagacaatatcataattctccagatcttgaataagctgattggtagtattcagagaaccatgctgataattattgtattcgttggatccatcaacttcatcctgcaagaagaaatgtattagaaattaaatttgagaaaaaacattctagtcggttaatcagatgaatcagataaccacgggaaaacacaacacacacagcgatcatgtctttcgattctagaccaccatccatcagtcaaacttaatgcaccttttaatttttatatatatatacatatatatactaggatttcctcttaactctacaaaattgcacatgcacactcacacacgtatcaagttaggaggagaaaaaagagatagcagtattatgcttccatgcattattgagtgaagaaaaatagtttgagtgtatgagtcaaaacctttcccaagtcaccgaatatgacaacacgttgaatggaattttggccaggataaggagaggatttgaactggtattcatgactccatacataagaaccatcggaaaatttatgacccaacttgtaagaatacctgagaaacgttaagaagctatactcagcaataagttccatctgtagtgcagcaaatgaatactccccccccacgaaaaaaaaaatataggaaaatatgggaacctagaatgctcccatacaaaaactatgttagaaatgaacacaatacattgtattaggccacagttccttgagaaaacttgtgtgtataaatccaggatctcgccatccaactgttcttgctggcgcacctgcatgtatacaacggataacaagaaatgttatcattgcttggaaggtttttcaggatgatcaatacaagaagaaaaatattcactgacagttctataagaacattgcaaatttttcttgcctatttgaattacctatcaaaaaattgaaaatactgtaatttatgcatattactccgtttctctaatatcaatgactttgttcttattcatacagtcatgcacctatataacttaaacaataccaaatgtaagtatctagcaatgaagaaaagtttacacaccacacatgctgttacggtcaaaggtcaatgtcccagcaggggatctcacgtggtctcctccttttttaccccattcaacaaatggctcagcttcatcaatcccatatccacttgtccatgttactgtcatctaagtatcaagtaaagagagtcagctcctttgaaaatcctaatatgcattcctctcattcaacaaaacaacccataatagaacaaaactacactaaaatattaaaggggaaagcttgccgttaaagtgcttaacatttagattagttaaacgagagatgacatcttttatacatgtaaatccaaataagtgaaatgtcccatttatgatatacgcacctactaaacaaaatttaaaaacaaagcaaacttacttcgttccacatttttccttgtgctaaacgtggataaacaggagaatttggatttgcaaaagctatagcacctgttagtcccaccacctttggctatttgaccccaaaaaagaaggaaaaaaaaaaacattattgcagagcaaaacaaagttgcttaaatgatgtacaaaaagtgaaactatcacaaataaaatacgagtaagtagataactacagcatgtaaaataaaccataaaggaaataacaatgtgggaaataatgaaaatcatcttgtgaaatcatgataagccattttggagcttaaatttgagtgagacttatttcgttttagtaacgaataactatgcttgttatatttgtgttctcctaggtggtaagtacatcaaaatcatatatctaaagagcattcttattgg

SEQ ID NO: 24439 - DNA, 2851 bp, Cannabis sativa
agctaatataacagtaatgataagtcagaggaaaaatagaaacggggaacatatcatcataatcttgttaccccccctcaagatggaccatagatatcatggaaggccatcttggacaaatgaccattgagagtagtagaaggaagaggtttcgtaaaggcatctgcaagttgaagattgctactaataggtatgagtctaatggtagacttggcaattttctcacgaatgaagtggcagtctagctcaatatgtttggttcgttcgtgaaaggtggggttgttagctatatggatggccgagtgattgtcacagtaaatgaaagctggtgttggttggggaatatgaagattggtgagaagatattgaatccaagtcatctcgctagtggtggcggctagtgcacggtattcggcctcagctgagcttttggacaccgttgcttgcttctttgttttccatgagatgaggcaatcgcctataaagatgcaaaaactggtggtggatcgccgagtggtgggacaagtggcccaatcagaatcggagaagccgcggagatgaagggaagaatctgtggagtagaaaattccttggccaggtgaacctttcaagtaacgaaggagatgatgaagggctgtcaagtgtgttgtccgagggcatgacatgaactgactaagggtgttgacaacaaatgtaatatttggccgcgagagagttaggtagagaagacgaccaatgagttgtctataatgcgaaggattgtctaaggtatctccttcagtgtcatctaatcttagtcttggatccataggggctttagcaggcttgctgctggtataaccggtgtcatgtagaagttgtaatgtgtacttccgttgggataaaaagagaccagttttggcgcgggcaatttcaaacccaaggaaatacttgaggggacccatagttttgagtctaaatcttgcttgtagggaggcttgtaaagcatgtagaatgtctatgttggggccggctatgataatatcgtctacatagacgagaagagcaataaaggtattatgagatccctttgtgaagagtgtgtagtccgcttgggattgagtaaaaccttcttgcaagagagcatcagtgagcttcttataccattgccgtgaggattggcgaaggccataaatcgatttctgtagcttgcatacaaggtttttttctgtgaccgaggatggaagtttgaggccaggtgggatttgcatataaacttcttcttccaaatcttcattgagaaaggcgttgttaatgtcgagttgtaatgtgtgccattgtttgatggtgacaatggccaagagaagcttgaaggtaaccattttggcgacaggagagaatgtgtcgaagaagtccaatccttcttgttgtgtgtagccttgagcaactaatcgagctttgagacgttctacactaccatcactgttgtactttattttatagacccatcggcatccgatagcacgtttgtcaggaggaagtggtactatagtccaagtattgttggtaataagcgccaagagttcatcatccatagcttgtaaccaccgtttgaattgaattgcttgcttgtaactttgaggttcaaattcagctgtaactgcaagactgaatgccttgtaagtttttgaaagtttagaatatgaaataaatttggaaataggataagcagtgttagatttatcatgtagtaaattatagcattcaaaatcttgtaaatagctaggtggtttggaaattcttgtagatcttcttggtaaaaccgtaggttgagatggtgaattcggctgttgctggattggggaagaatctgcaacaaattcctgttggtttggagttgcagatggtactgtagtagatgtttcttgggtagaatcaagtgtatcctgtagagaggggttaggaaagataatactagtggtctggtgtgatataatctgtgatgtgtgtgtcagtaacatgtgtagtgggaagaataagtggagtgaaaggatcaatgatatgaggattagtattaagcttatgaaatgggtacacattttcgtgaaaaaccacattccttgaaacaaatatttgttgagtgtttaagtcatacaatttataccctttgataccacgtggatagccaagaaacacacatgttcttgctcttggttcgaatttggttctgtgggaggttatagtcgaagcaaacgccaaacaaccaaaacacttgagatcagtataatcgggtttcttaccaaataatatttcataaggtgttcgtttttgtaggttcggtgtaggcgtgagattaattaagaagccagccgttaacaagcactcagtccagtttttgataggaactttggactggaaaaataaagatctagcaacattgaggaggtgttgatgttttcgctcagcaactgcgttttgttcgggagtttcaatacaagtaaaatcatgcaatttcccatgtttagcaaataattctttgaaagtaagctcaggagtgttatcagacctgaatcgtttaaagatgcaattgtattgagtttgcaaataggaaagaaactccggtattattgaaatcacatcagatttttgtttgaggagataaacccaagtgaatcttgagtggtcatcaactaaagtcaaaaaatatctgtgattagtgtaagaagcaacattataaggaccccaaatatcacagtgtataagatcaaaacaatgagaagtaaagtttgcattattgggaaaggggagcctcctttgtttagccaaaggacagatgtaacaaggctctttattatgcaaattctttgtatta

SEQ ID NO: 24440 - DNA, 5382 bp, Cannabis sativa
tcccattgttgcccaaggtaaatcttataacagctaaaagttattctttttcatgtttcacttaattaaagttttatttctaatgtgcaattccttagcacttgattaatgttaatgcaaatagttgcagtcacttcagctagactgtaaactaaatcctaatatttgctgattatgatgtgataaaaaatgaaaaatgatgcatataatcttcttaatttgctgtgtatgtacatatattctcatcattcaacttggagagaatcattcttctaccacccaattgttccctttcttcaatcagaaattagaaggcaccttttcttattatggattcggatggaatgctcaattgaattgttaactaaaaccgatttcaacaaccatactaaattagtgttcttctttcttaggttagcttttctgatttagatggcttttgattcaaattatattggcttgttgtgcagatggaactgtgaacaatttaaatgaatacatggaaatccacctttccgacgcgttgaaaactgttgaagctgattcggtgggtgctgttttcactgagaaacttggagtggttattggtgagaatcagttggaagaattcttttctcatatttcatgatcttatcatctcacaactcttgcatcaactggacttgcatagagctttattcttttcttttgtaagataatatgtttcgagttcgattcatcagcatcatatttggattgtttgttggcttgaactaccattttctgtaaaatgtcataagaatttaaaacaatacacatgaattgtttgttactactcaccactatgttaagttatactactaattaaaatgacatgtctcttggtttatataattatgtctacaccttatgtgattattgaaatataaaaaatagataatcgtctcacataaattttatttctgattttgccttggtcttatattgccactggggttattatggtgtctaatggcaatactctacaacttagtataattttttctcttgatccccagaaatcaattgcctcgtacaaaattcttcaactaaaaagtgtgagagagaaataataggtacaaacaaagtgttattggtgtaagacctaagaccagtgttggttctagtatctaaaaaaatgagctatccaaatattgacttttggaaatgtctcaacaacaaataaaaatataaaatttgatgagttaaaaatttcttatagaatgttggaaaaaaaaagtgaaataacttttgatcttgaatcaaacaatacttttatttatactaatatgatactcttaaagaaaaatactagaagatatgcttaacacttcatattattgtttgtgtgattaagtatcgagtttattttggtgcctaatagtaatactttttttgtaaagagatgctaaaaggcattagtatcgcttagcatcctcctatgtgttaatatcgttattggtcaaatcaagtaatttttaaaaagtattgctaaccaatcgtaaaatgaaatatctagaagtattaggcatcattggcgcctaataaagaaatgctaaaagccaccaatagtgcctagcatcttcttacgtattaatattgttattggtgtaattaagtattgagtttcatattaacttttagacactatcgctaaacaatcgcaaaatgacacgtctagaaggtgttaggcaccattggtgccatgctcttttaaataatatttactttatgcattattattattattattattattattattatttattttatcctacattttatttgacatactagtttattattaaagcttaaaccacattgttatttagtaaaatagtttttgctttgtgatttttcaaaattgatattgctgaaaaatcatgagatattttccgttgagcactaaccaacaccaacggtcatttctatcatcattggcgccaaactcaacatttttaaaaacattatgctccaacggtcgactgaaggaagctctgttggaaatggcggttcagggtcttcaagttgagttccaagaatacgacaccgtattgaatgagtgtgtaagccaaagggctgctagagaaggccaaagggttcatgcccacatcaccaaaacttgttatgatcctccactctacttgtggactcgattgattgtgttctataccaaatgtgattttcttgctgatgcacggaaagtgctcgatgaaatgactcttagaaatgtggtgtcttggactgctatgatttctgcttattctcaaaggggtcatacctctgaagcattgaatcttttcattcagatgttaagatcaggtatagtttttacttttttatattgtttatttatttatttgcttatttaattattagaataattgattttttactccccgaactatgacacttgtaggttttgcatctgaattatatggaaataattgcaattttcgagattatttatcgaaccaagtacaataaccttaaacattgaaactttaactctaaaatttcagatacacaattccatattttattgttagagtaatatctatgcaattattttttgcctggattctagaattagccttatatcagtcttacttacattagaaaattgtttgcaaaaatgaacgaaatgcaaccgaatagaaaaatttgccattattgtcttagttataggggaatttttttaccaaaaattaattcagggggttaaaagtctattaatcctattcattctagtttttatttggactaagcctttgcatttttccatgtaaactttgcaggtacagaaccaaatgagttcacttttgcaactgttctaacttcatgtattggtcctgagggattttacttaggaaggcaaatccattcttttgtgttgaaaagaaatttcgagtcgcatatatttgttggaagctcgctgctcgacatgtatgccaaagttggtaggattcatgaagctcgaggagttttcgaatgcttgccagaaagggatgttgtctcttgtactgcaatactctctggctatgcacaactgggttttgatgaagaggcattggaattatttcgtcggttacaaaatgaaggaatggttcccaactatgttacttatgctagtctgttaaccgcgttatctggacttgctgcactggatctcggtaagcaagttcataaccgtacccttcggtttaaactgccttcatatgttgttcttcaaaattctttgattgatatgtattcaaaatgtggaaagctcacttattcgagaaggattttcgatagtatgattgagagaactgtcatctcttggaatgccatgattgtaggatatagtaaacatggaatgggaagagaagtagtagagcttttcgacttaatgaacttagaaaacaaggtgaagcctaattcggtcacttttttggctgttttatcgggttgcagccatggagggatggaagataaagggcttgaaatctttaatgagatgacagaaggaaaatatggaactaaacccgagatggtgcattatggttgcgttgttgatttgctcggtcgttctggccgagtagatgaggcttttgacttcataaataaaatgcctttcaaggcaacagctgctatatggggttctcttttaggtgcttgtagagttcattccaatgttgacgttggtgaattcgcagggaaacggcttctagaaatcgagcctgaaaatgcagggaattatgtcattctttctaatttatatgcttctgttgggagatgggaagatgtaagaaccattagggagtttatgaaagaaaaggttgtggtaaaggaaccgggaagaagttggattgaaatcgatcaaattcttcatacgtttcatgcaagtgatcgttcccatccaagacgagaagaggttagaacgaagctaaaggaattatttgtgaagtttaaggaagttggttatgttccagacttaagctgtgtcttatttgatgtggatgaggagcaaaaggagaagattctcctaaaccatagtgaaaaacttgcactggcttttggtttgattacaacttcagaaggatcgtctattcgtgttattaaaaatcttcgaatttgtgttgattgccataattttgcgaagattttctcgaaagtttatggaagagaagtgtctttaagggataaaactcgattccatcgaattgttgatggaatctgctcatgtggagactactggtgagatttggttgaattttttcacctgatttgtaaatatgaagaactgatctaacatatatggcatgaaaaggaactgatatggacaaaaaagccaagtcatttgattaatcccctaacatgttcatggatcacaaagtgaaaaatttgatagtgaaaaacgtgggaacataaaacatggtactttgatgttgatttacttgataactctacaattttacaaaataatgtaacatgttatacatagaatagtttagttattgaggttttagttaatatttttgtgtttacattagttttttgtttgaacaaattaatttgcatatacatgtttttatatagtgatgtcttcaaagaaaagaatttctgttcatacatatttgacattttattgaagatgttcttgtattgttttggcattacaaattcgtttataacaaatcaagggcctttttttttactattgaaaatcatatagacatatactattactttatattacttttttaattagtttaattaaacttagtaatgaacttttttacattttcttttgataaaaaaatttagtaatgaacttatattagatgttcctaaaggaacgttaatgaacttccataatgaaaggaccataataataatctctttttctataaaaaaataataatatcgttgctattaggtactagtggtgtctagagtagcaccaacatagtagagtgacactttataagtagttaacatttttttttaattattattaaattaaaataaataatatttaattttaaattacactaatagccatataatattagacaccactaatatcctttatccatttgttcaaatacttatttgtgccaaattatgtaaaatagctatttggtaagggaaatttgattttttatgcttacatttggttaaattttttttcctaaacaaataataactaatatttgtaggatatgataacttttatgatatccctaaaatacctcccatttacatcacccccatttacacaatcggaccccacatcggacacccatcagacaacccatcgggccgcccatcggaccacccatcggaccatatctgctactattttttttttttttt

SEQ ID NO: 24441 - DNA, 4883 bp, Cannabis sativa
  modified_base (4848)..(4856): a, c, t, g, unknown or other
gtttaagctgaaggaattggttcggcggatagatggtatctcccttcctctgctccaatatctttttgttttttatatattttttcttcttaaagtaatttacatgagcagatggtcaggcttgacacaagaattgaacaaagttatactatcatcctcttcctcaatgctctgacattatagtttttaactattatatttactgatttctgctgtttggacaaggacttatgttttcctgttaactgcactagaacctgtttctaaacatgtggaggaacaagggctggaatttctacaatttgctttccgctggttcaactgtcttttaatacgcgaggttagctgttacagacacttgtattgaacattatacttcattagctaaagctttattatcagtccaattttaaattattttattttttcacatttgattactgaaaaacttctcaattcttttcatatgttgctaaaggaaatttgggcctttcgttttgttttgaaaaaattaacaagtacaaagtgatagaacctataatcctaagatgtcttaggaatggccttatgagttcattaattcactaaagctaattagtttggtttattacagatcccattccatcttgttactcgcctgtgggacacctatcttgcagaaggagacgctctaccagatttccttgtgtatatatttgccagttttcttttaacggtgagattatatatatattcattttacacagatttatctcatttagatgttttattttcaacttcgatatcggaatgaaggctactgtattctttggatttcctttcatcattcgtatatggactcactgtcactattaccttgtttgttatattcagtggtcagatgagcttcagaaacttgatttccaagagttagtgatgtttcttcaacatcttccaactcaaaactggactcaccaagaacttgagatggtactttcaagagcttacatgtggcacagtatgttcaatagctctccaagccatttagcaagctaatggagaaattgtgacacccaccagtgtgtgatctggtctgttctgcttgggttctaacttcccttttacttgttatattttaatctcaaattgttggtgatgatgatattgtatatgtcctctcattgtggatcgtgtacttgtaatgttgtacttccaactgcttctttgtagactttcctttgattttgatgagtggagtaagaaaagaacatctacttcaattcaattgtataacaatttttgccataaatttcattctcattgtttgaattcagaatctaaatcttacatattaatttgatatttattatatctaaacaaattaaaatctttcaccaattccaatccaaacctctgttgtcaaactagaccgaccattctctttggctgtagaggaaaccaaagttagaaaatataaaaagtaaccccaaaagaatcattggacaaaacaattgatcatgaattataacatggttccttacccgtttgcgttctaattcttcaagaaatttgtcagagcagtccataaactcaacacaatcattctttacacctcttacaagctcttcttctcccactttctcaaggttcctaatcaatattgtgaaggttaatttatctggagtacaacctgatgctttcatcaaaccataggcctccattgccttgtcaatcataccaagttgtaagtaagctccaatcatctcagtaaatacccttgtgttaggttccaacccttcttcctttagttccaagaagagttcttcagccatttcaatcagtttgttctttcccaataatcgaatcatgtcacagtatagtgacacatctggtttataccatacttcctttcttacaaatttgaatacctattacacctgatttcacttcagatgaatacagatttggaaatataaaattataatgaaatcaaataaagtaaaatatataataccttgagggctaagtccaattcattttgtctctgtaactcggccaaagtgtctaacaagtctatcttcaagaggcgaccaagtctggcaccgaaaacctcctttagctttggtggtgttgattttgctaacttgagtgactgtactgcctggatggcttcagtggagagtacccttgacctccacaagggctttcttggtccatcgcgaagcccacacgagactcttggggaacggcaacaacgggtcactgtggaagacagagcatagggatttgggaggttatgccggagactcacccttggaaaatgagatttgagggaacccattaaaacagaatccatggagatctcagacgaaccgaacctcaagcgagagaaagaaaggggaactcgaatggaacgacgctttcttgaactttctaaattttatttcaaaaaaaaaaaaaaaaaatctaaattttaatcatttttaaaactttccatttttttaaggaaataacctagaaaaaaaatattatttttgtgttatagtttctccaaatgaaaaggtgtccgtaatcattttttttggaaagttgttcactcactattatcgatcttggtgtcttgtggaatgatagtcgagtacggaagggagttcccggatgactatcatgccctcaccaggatcagtcttcaggatagctagcccttccctagaaaggagtttcaactggctagttatccttcctggattggtagttccggatagtcgacttcatatcctatctagaagtgtcttcagcgaaagtccgtggtcctcgagtttggaagctcattcatgatctcggaggccctggtacttacgctaatatggagacttcgctaaatgaggagttggttaagttagatatttctaactaacttaacaacctcgtttcttgtagccaccgactttaagatcttgatcctaaggctataaatgccacaccagactcaccaaactaactccacaatcaaccatcctagccgaaactccccttactatgttttctttttgataagaatcccaaaaattccacgtccaatcaacagtgaaagtcaaactcaacatgtcattctcatgaataatattatttcctcgcaatgaagatcctggtttgatgatttcaaatcatagaaccttgttaaaaaaaactctaagagaggaaaaagaaaaaagaaagattggattaaacctttgttaagtacaacatcccatacttaggaggagcttagccactaaaagaatacaactggagcagtgtcccactcctagagggttttcttcgatcaattagaaaatctcttcaggatgccgcgtcctgcttctagagagctttctataattgataatgcttttattttctttttgatttttgtgatccaaagagtaacacttgcacaggaactttaaatttataaactcgatcattatattcttgtgagacctcaagcgtttatatcaaaacaacgcttaactctggtgtgcaaaatccttgaatgtcactgcagccgctggctctcgtataccatggtaacacctggcttcgtatgccaaagtgtatgtgacatatatggctctcgtgtaccatgatttttgtgaatgctcatgtaacgtgcatagctcccgtatactatgtcttatttgcccccgggtgatcgaagaaatgtcttcattggtcatttgccatatcaaatctcgttgggctttcttgatcacgggtctcagggagttgttacatgtgtgagcactcgtctacttatctagagatttgtgggttggtagtgtttaactcactaaagaaataactgtagttacctcaagaccaactctacaagctttgtttagcgtttgagagcattgttaggtctgtgagctgcaattgattaataacaataaagtaccaataagctttactcaacgcttttattcattatatattaaattcaattgcatcactgtgagctaagttgaaagaaaaagaagtagtagttgtagatcttcgttttacatcaaagcttagttgaagtgatccccactacactaatgccatgttcgaataatagtgcaggggccataccttcgcgatggacctcctaaaaatgtctttgtcgcttcttgttggtttaggaggcggtcgattcacttgcacaaggtaaagtgaatctcattgtgaagcgaactatttagagaacaattgctttattgatgatatcgtcacagatgctccctgttctaataccttgaaccaacactggattcaagtggcagtcataacaaactccaagttgtttgtctcgggttcaaacacttctgtgacgatataaggtctctctatctcattggaaatcttcagtatcgctttcttggtcactatctttagaagactcataagacacatcttcaccgttgctctcctgttcttgataattgttggaaacataggaagaatctttgtcactgtcccctctcctgagtcttttgggaagaagagggagattcttcatcactattttcttacttaagatctttttgagaaatagcaggggactcgtcgtcactatctcactgcttaagttcatcttgggaaacagaagaggagtctgtttcagtggaggcattagttgttgatctttcttcactgtaatgactgcatgattaaatatggattagtatggctattagcattaattatctttaaattataattttatatgaatatttatgttgtgggtcctttctttaagaaataggcagagttataatttctcaatttaaaaattttaaactctaagggctcgtttggaacaccgtattaggtcgtattgtattnnnnnnnnntatattgaattggattatatatcatat

SEQ ID NO: 24442 - DNA, 5260 bp, Cannabis sativa
  modified_base (2201)..(2210): a, c, t, g, unknown or other
  modified_base (3683)..(3687): a, c, t, g, unknown or other
taatgttttatatatatggtttttgttagtttctaaaaaaaaattatatttttagtttgattggttagataatgtcatatttagtggcatttactttttatgtcatatttatcataaccttaataatttttctcatattttgaaaaatagctcttatatatattatataatcaatatatatttcaaataggaaacgtgaccacttaattttttgacttggtagtacatacatgccacttaatttttgacttggtaatatattggagttttattgtgttcctattaattaggatcaagatccacctttttctaaaagattaaaagcaatgttcataatggacgttattatatttatatatatataacttaaaaaaaaaaaaaaaaagcagaatatattgtttttggctgggttatgatatttttgctgtttctgttttctttgttcaatcattgtaatgagaagacctattgaatcctggagattactttgtaaattcttaaggacaatgtgcacgcctcaagcgttatcattttattattgtatttaatattttcgaacaattttattatgactaaaggtaagattttttgtagtaaaataatttataaatttataaaaaacttattatatttgaagtttcaacaaccatgctatagcacgtagctatattaaactacttttcttctctccttggtaacgttatgtcatgtacgtaattttcaactttatgttaagaagtgaagtccaaatattggaaaataaatatggcacctaaattttagtttgcattgatatgatggaataattagtgtccgatttcgttttcattaattttctgagtcaaaatttcacatatatattacaattgcacttttgttatttgaccgactccaactgatctagaaactcatcactttcagttccattatttgcgtgaagaacattctaagcacacaaaaaattccatgcgcgtgtatacaaaatattatacattgacatatatagggacatgattttgtccgtgattgtactttcacggaatatattcggtgatatagggctgagggctgagattgatctaggtaaggttaaaaaatagtaacatatcctgacactctttaatgtactctgagactatctaatataccacagaatacattccgtaaaagtacatcacagaagaaaatcgtgcccttatatatgtatatatttagtacatatgcagttatgaagtactattgctaaagtagtctatatttgatgatcaaaggagaaaagaaatatattaagaggtttattactacatcccgactccattatatcatctgcatgtgtaacgtatgaggatatataactacgcatactataagtatatataatttatacacaacgtgattatatgaaatatttattattattccacacaaatttaaatttcgtgtcaattttgcataaattttatgatattttgatcagtcgtgtatagtaattaatttgttaataatgttttaaagaatgtatattttcaattgttaataagaattaatatatattttccattaattaatgtatattatcgcgtaaatatataattataataatcagtcgtgttaggtttttttttagaaaaaataaaaaaatggattgccttttaaagttcgtccatcgattctatataaaatatgtggttatctctcatttttcttagtgaatagattagtttagttagtttattgatttcactattataagtgaaatggcttggctattccacttagccgagccagaaaagaaaacatattagatataaaaagaaagaaaaagagaagactttaaaaatattaccgactcgctcaatttattaacttacttaataagagtagggtggaattcaattgattcctacttcaagcattgggtctcctgtcttaagtaagaggagtcatggaaagaacaggttctaaatcacgatcaattcctttttcaaatctcgctgcagctgcacgagcccttcctgcatgccataaatgacctacgaataggaagaaccctaaaataaaatgagaagtagctaaccaacttctaggagagacataatttaatagaatttttagtttaacgaaatttttaaattttttacatcaattttaacaacatatcccaattaattaagagaataatttttattaattttataatnnnnnnnnnnatatttaaaaataaaagttatatagaatatttatataaaaaaattattttaattatagatatatttaaaaataaaaatcacatctatataaaatatatatttaaattttttattttaaaaataattaatgatatatatatacatgcttctaataatctgtacactttattataaccacaatttcctaactacaaattaaaaatattgtatctatcactatcattcttttttttaaaatatatgtttggacataatatataatatatattttgaaagcaattaattgtctaatcaaattcaaattttgtcaaaatatttttctaatataatccttatatatagagaataatataaaatacgtataataattaaattcattcttttatatatatatataataatatctaatgagcacatcaatgtagtttcaatagttaaaaaaaattcttaaagatcgaaatttcaaattctattttataaatgaaaaaataaaaatatattacctaattaaaataattgaatatacatgtattttacttaatatcacttaaataaatttagttaaaaaaaaatttattatatgtgcattgtaacatcaacttaataattgtatatactactatgtaatataaattttaagttttctaagttttttatcttcacatatttaacaatcctattagatatatattgaaaccaataattaatgtgatatgagttaaataaaaaaaaaaaaacaaaaaaacaataatgttaccgtgtagaatgagtgtaattaacactataacattaacggtccgtgttatccttagaaaaaaaatttaatgttacaatgttaattacaactagacaaaatttgataattgccaaacccacttaaatgtgtagaatgagcaaacccatttgcccatagtataagttatatatcattataacaactagctagtccgctccgcacgtacaagacttttcacttttgagtcaataatctaggtatgttgaaaataacaagaagccatccccatcctattcctaaaaaataaaataattaaaaagctcttcataatagtagaaaattacaatacaatagattggtgatgaagtggaaattaattgtgattaattagtttaagtagtgtttgatcgttgtagtcaaaacatgctatatgtcgccatggtggaaaaggtcaaagtaaattaatcatcaattaaataataattgatataattacataacgcctccttttcataacatacgttccctcattagtagctacatgaaaaacattttttttttttttaacaaatgaaaaacattttattgataaatataaaatgtgtttatgtaatataatttttaatttgacagaatttttaattttctacatcatctttaatagaatattcaaactacttacaaaatattctttattaattttataatattgttatatatatttaaaaataaaaatnnnnnagatattttatataaaaaaatttattaattatatatttttaaaattttaatttaatttaattatatataaaaataatttaatttaattaaggtttacatatatataattatatatatttaatttaattaaaaataaaaattacattgatatataaaatatatatatatttaaaccttaatttcgcgatatgtttttttttttagaaataattaatgatatatatatgcttttaataatttgtacactttattataactacactgtcttaactacaaattaagaatattatataaattattattttttaaaatatatatttactaatatataaaatatattttaaaagtaaataattctctaatcaaactcaaattatatcaaaatattttctaatataatccttatatatagagagatcaatataaaatatgtataaaatacgtataataataaaaaaaaaatattgtatatataaaaactgttatacccgaaatttggctacaattcagaggatggcacatgttaagtagtggaatatgaaccacttgatataatgaatttatatcagttaatgcgaagaaaaaaaataactcgttaaataaagactaatagaaaatattcataactcgctaactatgtagccttcagcgagacaaggatagaaaactattaaaacatatatcgacgagacacatacctacctcgaaatacacaagctcaagaagataactcatttattcacaagaataaatgcagttatgcaacacaacctcgaattatggataagtgtggcatttacttcgctattcaaaaagaacttggcaaggcgaatgacttgctgccacttagcgtttctttcacattataaaagacaaggataacaacttgaaaatatgggagatgctatcatccaaatcagtattgaccattgacaagtcaaacgagatactattatccaaatcagcattatccatcgataagtcaagcgagatgctattatccaaatcagcattaacaatcgaaaggataagaataacaagcagttttgcaattattaattgttatccacacgtgatttaaataaaacgtggaaattaaccacgtttcatcaaacatttataatttgaatttaaatgtaaattactgccaacttatattcctataaataggagcagatcccacggaaaaagggatggagaattttagagagaaaaacagtaatacgatcaattatatcttgtattaaatactcaaaaaatatcttgaataagatagactcatagagtatgcaaatttaactgcaaaattacgtaaaaatatctggtgttatttatatattatttatactttatttattctttattatttttgtgttttaatttactacgaaagggcttaaaactggttaacaaaaattggtgttaacagtttgctgctttcattgagaacctacgtgataaaactcagaaaaatccctccttagaaataaaaatatgtgcttggctaataacaatcaaaatgatgaaagtcatcctgaggaaactgcacatcgccctgagaaagaaccaatgg

SEQ ID NO: 24443 - DNA, 1757 bp, Cannabis sativa
gaatggataatgtgctatgtttatggttgatatattatcacaaaataatctcaaagggctggtactctatggagtttaagctctaaaagaacacacttaatccggattagcccacacaccttcaacaagagctataagttcagcttttggaatactccatggcaacaactagttgtttcttgctcttctttctaactaatgggatttccccacatcttggtgttgtaccttgacgttgatcttctatcttctactggacccatcaattttcatttgtaagggcttctatctctctttcttcattctttttaaacaacacagttcgatgaatgagttgtgaacacttgaaagtcaatggactaagcaatatgtagaggagataatggtaaatatgtttattgaaaacaaatgttagttacattcaccccaagtgcaaagtgttgagatagaaagattgtgtttcactgagtgtaacatctaaagaaacatgcatgtgttattataccacatgtaacctttcttagtggactattaacctagaaagacacatttagaagaactaagatcgaatttggtgcgattaaaccctaaggcatggacataagatgcacgacctaaggttttgaggggaatttgagagacagggtgagtattaggatagactttcaaaagtagggcaatcaaagcttgagattatagaatccgtgaaggcatcctattgattactgtagttaaaatggcctcttcccagaattgataagaccacgaaccacttattgattactcataagaccacggaccacctttagcagatgttgatgcttgcattcgataatcccattttgtgaataataccatgagatgctagataatctttaagaatagaataacaatacttagtaacattattcgtatgtagaacttgaagattattgtgcaattaatttttcttttatcacagtgaaaattttggaaggtggctgcaacatatgacttatctataaaaaggaatacccaagttaaacatgtatgatcatcagtgaatgtaatgaaccattgagttagaaatatttggaactcaggatggatccgatatgagtgtaaatggatgaggtgatttatagggaagtgagcagaaaacaatgcgtgtatgttttccaaattgactgatttcacattgaaattggctatatttctaaatcaatgtttttagatattgaaattactacagcggaagcatggtgggtggcctcataacccacaggtccaagagttgtaacttggctatgataccatgtagaaaggatgagttttttatctatgatgatttttattacaatgaattttaattgtattagctataaaatagccaaccttggtcaaccctaagtaattactcctagaaattagacattcaaagcgtgtttggaagtcactgtgttacatataagttcctaaatttcttgtttgggacaatagttagtaattacacagtgtaattacactcaattttcatgggtgggaggtgcggaatcggaacgcctcaattacctctaattacacaattgtaattacatggttaggaaaacgtcttaaattgtgtagttacctctaattactcccaaatccaattctatcgtagctttcctagtgcaccctacaacattaaaggaaaatatttggtttcccttatgggaatgatacctattatcttcaacaatactaatgtcagaagaaaatttaccataaacaaaacc

SEQ ID NO: 24444 - DNA, 5164 bp, Cannabis sativa
attagcaaagacagcactgtaattgaaaaagcaccgaagcgtgccttagcattagggcgttacaattatgaaagcatgttaagaagcataatagtttataaatatttatttaaatgcattgacttaaaatccataatgtgtagtatatagagtttatgtgatcactgtctaacctaccagacttatgggttcgcaggttaagtcctattaaattgatgcccaacaaaatacgaggagttagggtaacatggccaagaccggaggcagtctgggaggtcaaaatcccctgaatccccatggacgcggtagggccgtggaaggtttcagggtggtagacatgagaatccaccccaagctcctccgaattgggagcaaaggtttgcagagatgcaagctcgaattcttcaacaagatgaagagattcagaggctgagatagcagatcctccagcagtgcctttacagcaagccaatcgttatggtttcaacggtgccagcaaaacaacttgttgttggcactcgtatgaagtcgttgtatgagagattttacaagcaggcaactctaatttttttgggaggaccggatgttatgaaggtcgagtagtgtctcactattatagtgagaatcttgaatttcatgtgtgtcactaggaataattgggtgacttgcgctacgtttcagttctaggagaacgctcttgtgtggtgggggtttgtatccctcacctgagatgtgaccaccatgacctgagacgagttttaggaaatattcaatgccaagtattataatgagacagttcgcaatgctaagcaaaaagaattcactgattttgttcatggagaaggcatgtcagtaacagaatatacaatgaagttcgcccattaagccaagttggcttcaagtatagtacccacaaacttcagtaagaaagagaaatgtttggcaggtttaaatgccaagattaaacatgatctggtaattactacaagtgaaacaacgacttatattgagatggttgagaaggttctgcgagccgagggagcaataaaatttcttcagaagccccgagaaactccaagtgttggtgggaccatcgctcttcctacttctggttatggtagggatggtggtgattccactgctgaccataagagaaagactttctcgacatctggtggttcaggacagaacaaaaggttccaagggaaccaaggtagagatggacgccagggttattcttaccctgagtgcccacgttgtaagaaacactatctcggtgagtgcaattggaaaacattcttttagtgtggtatggttgggcattttaagaaagattgccctcagacgaagaaagaagaacagaagcaagtagcaaagctcgtacctgctcgggtgttttccatcactcaagctgatgttgtagccagaccatctctggtgacaggtcagcttcttgtcaacaactcctattttactatactatttgactctggggctacacattcatatgtggcatcaaaagtaattaatcaattcggtaggccttatgatttcattaaaagagggtttggaaccctactgccttgcggagagttagttttctctagaaggtggattaggtctacgccagttagggttgacaatatggagttgagtgttgacctagtagagttggaactaatagagtttgatattatacttgggatggatgttctatccaagtattcgaccagcattaactacaaacagaaaatagtaacttttcagccggagggtgaagatccatttgtttatgttaaatctgttcaaggttcttgaatcccgattatttcagttttaaaggctaaagattgattacacagtggatgtgtaggatttttagtagttgtaattaagtccagcaagcctgaaccatttaggcctaaggatgtcagagttgtgagggaatttcttgatgtttttcccaaggagttatcgagattgctgccacaatgagaaatagattttataattgatttggcacctggggcgtacctgtttcaaaggcaccatataggatggccccaggagaacttacggagctaaaaatacaactcctaaagactacatttcagaccaagtatggtcattaggagttctaattgatgtcattcggattgacaaatgctccagcagcctttatggatctcatgaatagagtgttcaaggatttcctcgataactatgttatagtgtttatcgacgacatccttgtgcactctcaaatagaagaagagcatgagcaacatctctgaatggttttacaatgactcagggatcacaagctttatgtaaagtttaaagagtgtgaattctggttgtcgaaagtgtccttcctagggcatattattggaaaatatggaattatggttgatctgagaatgatcgaatcagttaaaaattggctgaggccaagaacagttactgaagtacgaagttttcttgagttggtagggtattgtcgttattctgttgaaggtttctctaagattttaatgccactaacagagttgactaagaagaacttacagtttgtatggtccgacaagtgtgaaatgagttttcaggaattgaagcagcgactgatcacaacaccggtgttagctttgccattagaccaagaaaagtttgtcctttactgtgatgcatccagacagggtctgggatgttctctaagtaaagccgacagggttatagcctctgcttcctatcaactgaaggaatatgaacaacattaccaaacacatgatttagagcttgttattgttgtgtttgctctaaagatatggtgacattatctgtatggggaaaatgagagatctacacagaccataagagcctcaagtatttcttcactcaaaagggtttgaatatgaggtagaggcggtggttggaactagtcaaggattatgactatgaggtttaatatcttcccaagaaatccaatgtagtggcagatgctttgagcacaaaaggtcccgggcaggtctttaatactataatgatagctcctcattagcctcagaaatggttaaggctagaattgagtttatggttgggaagttacatagcctgacacttcagttaaatttgttggacaagattagaaagacacaattagaagatgctgagctagttaaaattttagatgaggtattgttcagtcggcctatggacttctcgatctcgaataatggaatgctactttacaaagcttgagtttgtattccaaatagcgatgagctcaaaaaggagatacttgatgaagctcatataaaccttatttgttgcacctgacaaccaccaaaatgtatcaggatttgaaaccctattattggtggtgtggaatgaaaagagatgtagtcgaatacgtgtctaaatgtttaacatgccagaaaaacaaagcagaacaccagaggtcggcaggcctacttcaaccagtaacacttcctgagtggaaacgggaagatattacaatggacttcgtaattggtttgcttagaaccacgagaatgtatgactcagtacgtgccatagtggatcgtttcacgaagtcatcacattttctactagtaaaaacaacttatacggtggattaatatgaagagttttatgtgaaggagatagttcgtctccatagagctccaaaatcctttgtttctgacagggatccaaagtttacatcgaaattctaggtaagtctttacagagctatgggtacgaatctggagttcagtacagtttttcacccgtagactgatggacaatcagaaagaacaatacagatactggaagacttattgcgagcctgtgttatggactttgagggttcattgagtaaatacttgtctgttatataattttcctacaataacagctatcaaagtataatagggttggctccccatgaaatgttgtatggtaggaagtgtcgttctccaattcattgggagaaaacagggaaagtatttgggtcctgagttagttcaaaggaccaatgaagtgatagacaaaatcaaggcttggatgcttgcttcgcaaagtaggtagaaaagttatgttgatctaaagcacaaagacattgcattttaggtaggagaacatgttttcctatgagtttcaccaatgaggggtatcaggcgctttggaaagatgggtaagttaagccctaggtttatagggccacttgagatacttgagaaggtcgggcaggtagcgtatcagctagccttaataccagcattatcggctgttcataatgtatttcatattttgatgttgtgaaaatatgtttcagaactgactcatgtcttgagttacaaagccatagaactatagtcggacttatcctataagaaacagtcagttcaaatccttgataggaaagaaaaagttcttcgaaacaagaccataactttggtcaaggtactctggaagaatagtaaggtggaagaagccacctgggaactagagtacggcatgaggggataattgtaatgactgcatgttagattatggattagtaaagacaattaacattaattattgatattttataattacatatggttttacatttgttgtgggcctcatttttagaaatgggcattagagttataatttctcaattctggagattttattaacttctaaaagtattatttatgttaaatataaattatgtaatatttataatttttgctcgatgatgatagaaaatgcgatggatggccgttaaagtcacatggataagtttagaaccttattcttagtgggacaaacatttgaaatatttagaaggtcaggtttaagcggggttatagttttagacaattttacccctagacttataattgcttaaattagaagtaagaggggcatttttggtattttgcttttgggattaggtggcttgatcctaggttggcagctgaccactagaagaaatatgattaattttatgagttatcctttttcatcaatattagaaaatcaaattaattaatgaaaaacaaaaggaagttcatccctttctctctttctctctctctctcaaaccctcttttgatttcaattcttgatttgggtgtggatttgcttaaggattgggaagattgtggcttgg

SEQ ID NO: 24445 - DNA, 1752 bp, Cannabis sativa
aaatataaaaaaacaaatataaaaaaacaacaaaaaaaattataaaaatatagttgtataaaattttaaatatttttacggttttcaaaattttatttatagaaaatacagtgctttgttttaatgttttcatattatttttatgttgtactcttgttattttattgttagtattttatatattatttcaatgttgattttctgttacttttatattttcttgttgtttttttgtatttttttatacagtaaaaatgtaaaatatatatatgaacgtaaatgtgaaattaaaaagagtactttgtacaattaaaactacttacataggtataagctcattaaaaataagaggaaattagactctatatccattttttattatcttcttttatttttatcctcttttttaaagtctatcatttttacttatttttttaaacactgtacaaattttacccttgtcacttcaagatactctccatgtgattttcttatgtcagggtattttggaaacagtacataaaaaaagatgtatgtttcaattaaatgtaaattagaagtagatttaattaattgataaataaaaaagatatttttcaatttactccattaaaaaacatcaacttatgttgaagcccaaaaatccaatctgaaagtgggcctaaataggagacttttggggcaataactaagaggtatattacataatattatttgtgtgtttacattgtgatacatagtaaatgatacattcattcaaataaattgtaatttttacacttaataatatgattagttgaaaagtaattctatatgatattgtgtatggtgattttacaatccacccatttaaaaatgacgtactgatgcaccctctaattgttttagcattcagaagaattttttagtctattttttttatatattcatgtacgttatagctatttaagatatcttacaaaatttcgagaaattcaaaataatttaaactttttcgaatttcttaaaattttacaggatgttttaaataactataattacatgaccataagaaaaaatttgactaaaaaattatttcagatactaaaacagattaagatgtattgatcatttcttttaaggaagtgcattataaaatttttgtaatgtatataaaaaattagaataacttaagggtgtatgcatgactactattttctttgttcaaaatgcagccagttactttttttttttgaaaggcagcagtcagttactagttactactcaatttatacgtttatgttttttttcctttcctttcgtttgtacaatgtgctataatttcttaagaattggtaaatagaaaaaaattacactttccacgattattttggaaatgttttaaaattacaacttggcttaatactttcactctatttctttaaaaattacgagaaagacagagaaaaaaaaaactgggaacttttgagttttgagtgcactctttgttggtgtgtttccttttataggcttcataagccaagtgtaaatacaagtaaataaatgccaaaaaaatcccacaaaattaataaaattgattaatcataatattcaccacaatatcctttattaatagattatattttaaacatcaattttctattcatacattaacctcaaaattgattaaatacgattttccaactgtatggtcatctatgtatatatagagcttcttatcttatatatgtgtcctcagctaatgtgttaaat

SEQ ID NO: 24446 - DNA, 2185 bp, Cannabis sativa
agaaattaattgaggagtgtttggtttgtgttgggatgattggttttttatagtgaatgaatataaatggtttcgtccccaacgtagacttgagctaagccaaacgtcatgagaagaatagggctgtaaaattagaatattgttaagtttatgaagcaccctgtaaatctaatccaattccctttattttgctcatatataatattcccactaattataggttttatattttgggtttaatctaatctttaatattctattttaaaactaatctaatccaatttaccaaattacagattaatttagatggttattttttttttcttctaaattgtagactattaactaattgtgttgtgatacttttttttttatggacttgtgatactttcaatcttcaatttataatttcaatttttataaaataaaattaataattaatattttattatatacaaaataatttaaaatttacagcatttgtatttatattggatacaagcgattagttcaaacttcaaatattagtagttttattgtaccaaaaatattgatatattttatttgtcaattgtcttataaaagttttattataaaaaaattaaaacttaaaattattattttatacataaatattttttttacatcctttttataaaaagaatatgaaaccactcaattatacttatttatcaccacatatataaatattttttaaaattatatttacatttataaagtttgaattagactgattactttcaatattaaatttaaaagtgcatctaaaaatatacaaatgcatctgttaactttttcaatccaaacaaacacacatttaaaaaaaaaaaaaaatacaaatgtatggatttgattgaattaaatcatgccaaatggattgttaaatcttaaagatgaccaaaggagaggtgaaccatattattgttcaattttaaatcccattcgtttagtttaataagtaatcttgaaaagtgttattattaatttattatatgagaatatatataatacttgacattaagtgtgaaatagctacacaacactctttaattacttaattgacactatggtgtgatgtagcgatgttgggctcattaagttagggtggtgagttgtgatcttaataataataatcaataaatgaagttggtgggttgtgatatcttttctgtttcgtaccgtgattgatgatacgacatagatagatgcctagttatataactccaattcagtccttttatataattgaacttaattgattactatctttcttttttaatggaagaaatgaatattttgaaagataattagaatttttatcatgaatttatgtatattaaattatatcttaaaaatgtgtaagtggttatttatttatttttttttttaaattattaagatggctggattcaagaagttatgcctaattttgttcaattttactaacgaaatgattatccacgtattaaattatgttatctgaactttgatatctaccaaatcatgttcctaatctttgatatgtattaaactgtatcacgtgaacttgcatccacgctatgttagattttttatttgggtttacattaaattttattggttttattaaaacttaggttgattggatagttctttagctcacattgttggtgatcaatagttaatggacttaacatctatgtgtaaagtctaagtgaagcagaagtgtaaacttttctagctaactaaagcctttgatgagcaggtccagtccaactaggattatgtagctaagtctcccaaactctataaatacatattgtctcatcacaattatatacttttgataattagataaataaactgcttctgattgagagactagggaggaagacttagttggatagtattgcactatcaaattgccataattactatagattaatcaagtatgcatatacctaattattatatattgttatcgtgttctatattatatacaaatagattttgatttattgttaatttatctaacatgccatgcttgtgttagtaaagttagacaaaaattattgaatccaataatctcaataattcaaggaagatttttagcggttttaaaagtttagagaacatgattttatacatatcaaagtttagtaggacaaaaattctaattaactta

SEQ ID NO: 24447 - DNA, 1461 bp, Cannabis sativa
  modified_base (584)..(585): a, c, t, g, unknown or other
ggaggaggaagcggcggcggaaaaccgaagacgggatgagaaggttgcggaggaggataggaatttgctacgccttggaaggtgccgtagtagtattggctctctggatcaataccgatccctctggtcttggaatcttgctcgctcatttttcgattatgaaattcaattgatctcgatcgatgatgatgatgatgatgatgggtggcggtggttagggttagggttagggtttcattttcaatcaaatcaaaattcctcttttctggtttttctcttcttcttcttcaattttctcttttttatttttattttatgaaaaattgaaaattatattattattattattaggaaaagaaaaaagaaaaaaaaaagacaaattctattattgggaaaaaaattgatttttttttttttttttttatgcttggtgatggtgtggcatcaatgagctctaggatgcacgataagagattgacttaggtaaattatttgaaaattgctaaatatgtcactcgtgcttagtacaatttttggtatcttggtatgattaagtatcagtctcatataatttaagaaaatannttttaagaaatatcgttaatcaatcgtaagatgtaacttatagaaagtgttgaaaacttatgagaaacagagtattgcagagaaaaattgtatatgtttatctttattgaactaaaattgagaatacaagagtaaggtctatttatagaccaagtgagtcggtgaagactctaacagaaaaagatccagctaaatgaaaaatataacaactttcctaacagaaaattaactaactcttaatagccccctcaagttggagtgtaaatattaatgacacccaacttggatacaattttattgaattgagatggaagaagagctttggtgaatatgttcgctaggttgttgttggaagaaacatgtagtagctggagggaatcttgttggaccttttctcgaatgaagtgacaatcaatttccacatggttggtgcgttcatggtagacgggattctcgctgatgtgaatggcagcagtgttatcacaatataactttggaggtgaagagagatgaaccccaaagtctttgagaatggcaaggatccaagtgagttcggatgtggcatttgccatggcacagtattcagcttcaacagaggaacgagatacaacttgttgttttttttatttccacgatatgagagatttgcaaagaaagatgcagtatcctgaaacggatctccttgtgtcttgacagctgccccaatcagcatcggcaaaaaaggagagttgaacattggcagaagaaaggctagtttctacaaaggcaatgatgttggggcatgaaattgcaggggaaaaaatgccatgtcctggtgtctttttcagatattattaaagtctatgagcagtttggaggtgaggaactcggggacat

SEQ ID NO: 24448 - DNA, 1884 bp, Cannabis sativa
gtatggtttatttacatttttgtagttattttttgtaaagtaaaagaatatatggttttatatggtaaagattttgttagtgtaaaagtggtataaaatttagtaaatgatagacattagatataggggtataaatatatataatgattaaagtgttagcgtaaagactcagtcaatattcttattactactttttatataccaaataaattaaattcataattataattataatgtatgctctaaaattattacatttacaaatgttacataaaagctcataatcatagtatggaacatagtaaaatacactcttctaaacaaatgttttggtatattttttatttgttttgacattttgatgtatattatagttatttagaatcatttataaatgaacaataattcgaagtcccgaaccactttcaaatttctgatgacacatattagagtaccaaacaatatagttagcatctttacaattaacttttccatgtcaaagaaatttcctgtagatctaatttatctttttaaggagattcttcacgggtattataatttgtgccttgtaaatatgaattgaaatcaacattaaattaataagagttactctttcggcgaaggacaaatttcgagagctttaagttgttactatgctaaccatattcttcattagagcattacaatctatcaaccatagagattcttggaacaaatcgaaacatctaagtaatcattaagaaaattagactaaagaactctttagaaaattcgaaataatttatagtactaaaaataaagttcaaacaattgtttattattgtataagaaaaaataatgacatgcagaacaaaatatttaaactttatttttaacattataaatcattcgagatttttttaaaatttataaatagtgctgaataactataatgtatattaagaaaattagactaaaaaactattatgaatagggcaataattatactgaaatattcttttagatatatataaaaatataaatataaatgggctgaaattgaataataattataaataataatgaaaaatgtcgtactcatttaaactattaaaacactataatgacaaaaagattttctcaaatttgatattacattttggaaaacgatgtcgtttccttttcacactatattattaaaaatatatttttatataattatataatcttaacaagtttagtaaagtgtacactacacttcacatctttgcaaaaacatgcaataatttttttattattattattaaatattccacctttaattcagcctgaaaatgagtttcgtaaatagaaaaataaaccattaaaaaaagagtcaaatataatctttagaaattgaaatttagttaggaaagaaaaaaataagaaaaacgtaagaaaaaaatggaaaataaacaaattatcatatttagtattgaaagaaaaattgtattgaaaaacatttaattcaacaaaaaatttcatttcaattttaaaaaattgatttattttttattctctacactttttttttttgtggtacattttttttttcaccaaaatctaacttacaaacgtaacctaaaagttaaaatgaaaatttaaggtcaattaaaataaaataaaatatgaacatatttataagcaaaatgaagcacaataataatactttgagttgaaagtgttacgatctaagattttgtgcacttctttgtcttagaaactagtttaagcttggttatactttaatggtattaagaacaatgaattaacattaagttcaaggtattattacacaccattttgaaaaaaaaaaaagggaatttttttatttttacacttgaaaacagtttttttttttttttt

SEQ ID NO: 24449 - DNA, 8002 bp, Cannabis sativa
agaaaaagatcgaaaacttactcaatgtttgaagcaaaggcgttgtccagatgaagctgctcggatacttttgctagaaatcccacaacaaacttgaaagaaagctcctttttgctctgagtttgtttcgtggagaaaatggtcaaaataaattctgagaaattttagcttcatttataggcaaacttgtggaaaggggtactcaattcaaaatccctagacgctttgatttccccccaaaagtaaatattgggaaatataaagcaatcaagtgcctcaagagaataatcgtcaaaagcgtgcacggggaaatgtgtctcgaggcattaacaaagtcaaagcattaattcgtcaaaaatcaaagggatgcctggtcagactcacatcgaatcacgaacagacgcactcaacacatgtcacccatacaaatgtagaggcaggtcggatgaagtctacatgcatctttagaagtcctgttcatacttggggcgcaaatgttatcccaatttttacactctgatgtggcatcacatactggtgacatgtggaattgattctccatacctgtctgaaggagatgttttgatcagaataccgcatatacctacacgaataaggtccttctagcccagtaatggacaattcgaacagcatatcaacacttagcaatttcagcatttgcatcgtgaagaactggagcaatccctataaattttgggatcgtatcatagagatatggcaagcggcacaaatcccacaatctttgcattctatatatttaatatgtattcttaccaattatagatattgtaagtaaaaggtaaactttccctcaaacatgtaggccctataaatagtgatccattctaagagagcatactcagagatttcattgttagagctctaagagaagaatcacagtattctttgttcttaagtcaatacaaatcagggggagtaggctatcaccaaatttctttgggacaaacctctttaaaaactatgagttctttatttatcttttcatatcatatctgaattatatcctttatcgcttattattatgactcattgtcgttggctaaaagcgaggtcaacaatacgggtgactagtgcctgacaacggatactatcaatcccaacttcagtggcaacgacagtaggatttagaaataaatatattttggttaatccattgaagtctagaaaacgttctttgaagttcctaataataaaacataattaataactattgctctcaaaagaaaatcatcaagtttataagagttttaaatcatacttgcaccaaactgctataggttaggctcctaaaatttcatggtgcacaatttatgtatgtaagtttttacaagctaaatcgagtaatctttgacctttaaatcttctgcaacagtaaattaaaatactttcgatagtgactactttctcacgtagttttgaaacttagtgaatgagttagtttgtcgtggttggacataatgaccatgctatgttgtcttacttgtcctctcaaagtgttttggaggctgtgttttaagaccaagtaaatcttcaaaggcatgtttgcttctcctcacgggtaggttctaaagactgttggtggttggctgtttctatatgaaaaaaaatttcattaattaatgaagaaaataagataagtaaacaaatcaaaacataccaagtgtttttccagaaggtgtaataaagtcttttgaccatgctacctaacattttatagcttgacctactgttctgaatgtatattgggcgatggacatgaaagcagcgccatctccacatttgttttttcgatgaatatccgactataatttttgattaggtattcatctttgtgaatcgagaactttccgtctttcaaatattattcctttacaatgtgccccaaagtaacattctgtaccatcaaactttgatccaaccgatagtgcatccaacacgaaaaggtctgcatatccaaattgaacaagcaacaattcagtttataaattgaccatatttataattttgtgttagatctattggtaaaataataataagattacctcttctaaactacaaacagttcgtggcagcggtgctgttggagcaaaaaccttcctacaacgcgatggtggtgatggagtagtgacattggcagcacctgatggtttttctatgggattgcatgcaaggtaagcatgggcttgttcatttgatgctcctccaacatcggttgtagatgcatgagatgtacccacaacatcgatatgtaaggaatgaactagacaaaggagctcatccatttgctcccacaactatctgtttctcccctctatctcatggatgtgtctctccaaatcttacaatgcttagttcgacccatctattgttttccttttagggtgtggaatgtggaaatatttgttctgggtgattcctaaacccgtggctcaaacccaacaataatgctcatctgtcccaacaccatggttaacacaaccctcttcccttccgcatgcacaactccctcttccacttgcttattaaattcgtcctaagagcataacaaataaagttagaaatggtaaactgaagcataacaatataaatgaaattatactttaaacttacactaagtttaacgatttctgtagttgggccctcaacatcgcctttcgtgttcatgtgaagtcttctccatacttcacatctatcaaaatcagtaatttggtggcctgcctctttctccattttttctaaccatccttacaccacctcatccagtgcgatggttgtaaatatttttttgccttgctctgttgggccttttatctcctccccttgaattcaggactcaatcatgtagccacaaactctctccattgttctaaatcacttatgctatgatacatttttggtagcttctcgggaagttagggagccgcatctttaaaattaaaagtacaatctattagggcatttttccaatccttccacatctctccacctttggaaatggttaattttatatctgtctccaatatattgaacacaaactgaaaaagggacaatcatagttataagtacaaatcataatcaataataaaaaacatgaataataaaattaataatacctttatgtcatcccataattagtttttaatatgtttactcacttttatcaagccacgatgtatctcaaagttgaacattaactcacacccatgctctaattggggcaacttttgccatccctcctttttccaagtattgtccatattattgtactcaacctccaaattttttcactcgcttttcatttttgttatatcgcttcatttgcttctccaacatgtatttttctattgttgttgtttaggatcaacactatattcttctgccacagatagttatttaggatcaacactatatcctttttgcacggaaggaccatcatcatgatcataataaaacgaagcactccactcatcatcgcgagctcgttccatgatgtataatcctacactaattggaaaataaacattggaatatacaaaaatatgcatattgatagtcaaaagtaaatatatgataaaactaaatactaatatgtgttcgatgactcatgtattgatagattccttcatccataatccttcaccatcatcacaagatgatatgatattgtccccaactgtgacataaataggcggtggagtgatttgatcaatttggtcactaagcatgagatcatccccattagactcttgattagcataatcgattggttgcattgtgaagacaactaaccggcatgcatctaacggatcactcatgtaatgcacttaacaagcttgggacgccattataaaccaatcagacttgtgtccaattcaattgaagtccactaaattgaagccaaatttattgtctttaaccccattatcattcctaacccaatcacaaaggaaaataggcatccaaaaactactgtaatctaactcccaaacttcatgaattactctttaaatagacatgttatattttttgaacaaaagaaaactttttattgaaaagaccaaaccaaacactggccggaggcaacaaccaacccccacaaaaagaaaaatagcagctaccaactattcactgcgctcaatatattacaatcttttgtcttttgactggtacaatgaaatccaaaaactctagccttaaccatacactctatcaccttgctaagggaagaagctgaattacaaacaacattaaagagacaatcattcctatttctccacagctggtagagagtggctgagaagacaacgttcaagatcaacgaagccaagtcgggtttggctggcaaaatcctcattttcatttcactgatgttacattaaatagacatgttacatttaataagctttttgacttttgaactagatatatggaatatcttagcaactatcataacaccactattttatgtttttctagatttatcacgggcttgaatgcaaaattgattagtatttatatagtatgattggtacttgagtacatcacacgaaggacgtgatatggaaagtagtgtattggatatattgcttgaagattcacacatttacacatataactattgacatacaaatggattagtgagtaaaggttaatcaatgtatgatgtgtaacaaaacaataatgttaatactacttttttttaaccatgtaatgaaattttagtaaagttcatcttgtagccatttttgtttatgttctttagtcggattagtggtcatatccaatcaaatgttctcttcaagtatttgatggattaattttagtttcaaatgaatattattattttatttaaactaagaaaagttaacttaaacttactcaatgtatggttggacctcatcaatattttacaacacaagccagtgtgcttcttcacgatcatctgggctttcactacaaagagaaataccagtactccctctacttatttccctattgacccgagtagggcaaaagctaacagctgtaaaatctaacaagtagtttgagcagaatttaatcgtctcttcaacgatatatgattcaacaatacaaccttcaggcctacttttattattcacatagccctttaagattttcatgtatcgttcaaataggtacatccatctaaagtatataggtccacacaacttcacctctctaacaaaatatactactacgtaaacaattatttcaaaaaaggaaggcgagaaaaattattccacataacacaaaacttctagaatttctaaccaaagattctctaacttagaaagatcaacaactttacaataaagagatttgaagaagaaacaaaacctcattattgcatatctaactttcttaggaaacacataatggatactgacaaggagaatgagttgaatcaatatattatgattgtgagatttcagaccactcaaaattagtttgttcacatctacccaatctaagacatttgaggagtacccttcaggttccttcacctagaagatagaacctgcaatgccctgacccaaagggatgccacgtgtgcttttttacaaatttatttataattacttattaatttaggaaaagtgtggttcaattaaaaactttctgattaaaatataatatacctttcataaaaaaatgccacaaaaaatacagggattccctggttattaattctttcacaacttgtttcaagactgttattacaaaagtagagtctcatttgcaaacatagttaaagggttgatcctgtcccatagaaaccgagacaccgcagttgatatgtacattgttggtagacctcttactcatggccgaatcacagtttctttcgtccttacctgcatcacgaaacacccgtgagtcacaaagacttagttagaaaagcatgtgtatacaaacacatatatcatgcattgcgagaaaatcatagaaaaccatggctaacatcctatcattatagtaattggatatttatcccaaatacataatcacgcatttaacatacaattaattatcatataagacaatcctagtttgaagcttcataaagcatccttaccgcttgttgtccacgagctaggtatataactatcgttccctgttaaagcacccgataagtaagaaatttatctgaagtttcaagggagtaattactcgtttcattaacggtaatgaccgtatctttcctttgattataatcgagtcacaaacacaaacgataataatcattacctagatcataatcgagtcacaaacgataataattgttacctactaacatgcttagtgatgcatagaacttttattacctcagtctaatagtcaagtgtgcgggccgacctgagtggaactacgctcgacgatcccgggtcctatgtgatgacaaccaaacccgataaataacttatgcaaattccagaaacaaaccctaatcatagaactggacatatctaacttcccactagttcggtataattcaaacatcactaaaatactctgatccaagctttaaaaaatacactagcgaaaatcggttttgaacctaaaataagggtttccccatgctggcaaaaccggttgagtggtttctctatacttataaaattggttaaccagtttacttgcagaaaatgggacactctgcttttgcaccaagaatccaaccaaaacgcctccaaccctactcaaaccttccaaaacagctcaataccataaatacaatgtatttagagcaccaattcacaacaattcattcatttgaacaaaataacatagctaagtgaactaaagctcattaaactcaatctaacccaattcaagtcaaacaacccctatgtctaacaaattcaagttgaaacaaacttttaatcaaacctaaaatcaggttctaacctcagtttatacctctgccccttgaaatcctaaaaacctaacctgaaacctaaattacaccataaaaatccatagagaagatgaagaacacaccttgccaccagaacaacacctagggtagacagattcagcttacaattagtgagtttgatgaagaaaattccttggttgtagtaggtttctagggcacatagaaaaaagagagaagatgagtttggttggtattttctaagattttctaaccttttactattttaattcttttttttaaaacttaataaaaataactaataatcaactagtattattagaaactcatcaatgaaaaaataggctaaaatgattattttaccccacccttaaaggttaggcaatggaataacctagggtattttggtcattctagctttccccgatttaacctaatttccaacattttaacctagtctagtataatttcaatacaacgcaacttaattgtcatgacacttctgaccactctatcaagtttgcaaggccgaaaacaaaaaatattttattttgaaagtggtatccacaataccctcatagtcaaacaaaatccccataattaacaaattacgctttatttgttcgcctactaatatttcactaattaactcgtaattagcttaagtaggattataatcctattctaatgcccacttaatcacatattttaaaaaatatatgtccaaataaatatcattatatattctaggatattagaacttttccctccatgtaaaaattttgtcctcgaaatttatctaaacaacttgggatacggctcctgcaactgtaactataactcccaagtcccctttctatcttgttgtattcttccatatcatatcaactagtgatatagtcttttttccacaacactttatcttttttattcaaaattatgtactgacttttcctcatacgataagtctatttgaaattcaatattctcgtaacgctgtatatggattgtatctacctcatacttctgaaacataaaagt

SEQ ID NO: 24450 - DNA, 5220 bp, Cannabis sativa
gctactctctcgagctttggcaccactagccacttctcgaagattagccaactcactctctagagattcaatcttctccttcaaagtagtcacctggtcctttgcagcaacaacaagatcttttgcaacctcgagcctcttagcaagctcgaccaccttcttgtgtttttttatccatgatgtaagcataaccaactcaatcctgaagaaaagaaaaatttgtcaagtgatggtaaacaaaagagagttaagatagaaggagacaagaaaaataattttcccaaagatgtcggtgaagcatctttgagcaataacatgcggaggttcggtgctaaccaacttctacaacgagatattctcagccttggacccgatcaaggaatcaccatgggcaagaagccaagagctctacgcacgtagctgctccaccaaattcgaactcgagttcggagtactagtctcagccttatccagagagattatgattagagatatctcattagcaccagtagtactaaatttctcctggtagagactttggcaggaggagcagcatcaacaggtctactcctctttctgacattcttctttgaagcaacaaaagcagtagggataccctagacaacttccctaaccagaggtttcctttggcactagatttttcgtttcaagtttgaacaagatgtcatagcagccaggaaactcatattttctatgaagaaaaaagacaagcgattagtacaacaaaagaaaagaaaaatagcaaagttcaacattcacaatgtggagcatcatccactagttgattctccatccttctccgaagcagttcgagtgtagataacttctccatcttcctagtctaagaacacatatattctccttgaatactctatgtcattttgaactaaggttgcatcttctaacactgtttgagagaagatgacagttggactttgagcatcctcgtcatcctcctcgagtggcattatccaagattcattagcaaagtaagtgtcaacatacactcgctgggaagacattatcagtccaaccttacaaagattcttaacattgaataaagttcttccatctctctctctcatagatcaatctcaattagcatggcatcgactctcctcttcttgtcaattagaggagcaggtcttttaaaagggctagccttttggaaagttatgtgtcccgatgaaaaaactggcatgtataagtactcctggtggtaaaggtcttagttacttttggtaatattttctatgtatgggctgaagtggtggaaatgatagaagccttcttctttttgagtttgaattatttttaagtcttaaaggaagtttattttgtggagagttgtcaagcggtaaaatatgaagaaggtggcaaatatcctatagccatttggatttatttggtagggacaaactccaaagaaatcacctattgatataaactatggattcaaggaaaagtaagcacccacattcatgtgaaatctagaccaagcattacaataagtgttctgggagccattaagaccaccatatcgtggattttggacaacaattttgagaaggcaataattatcctaaattaattgggcttgatattcagtaagagtgctaaaaactttcaatggcagctttgagaagctcagttgccattactttcccaccacgggccttgtctaagttcttagacttgggcacatttagcttagctctgatgaactgagccacatggggatcatattcatcaggaaaccttatacttctcttcatcctagtcatgacttcaagttgcttacaactcaaaaaaagccttattgtctgtaaaaaaattcaaccaatttcaaaagaagaaattttcaattgactaggaaagtgttttagaattttggaggtcttagaaaaaaagaattcgaggattctttggagtttaagaatccttggattaagatcaacaaaggaggaggagaagaaaatttttcaaaaaagtggcgtcgtaagaagggaaagaaggaaaaaaaaagaaaaaaaaaattctactttggaggatgaagaacacttgaaggcttgatgaagataaaattcaaaggagcttctacaaagtcttgggcgtgggattcaaaaagggaaatgtgaaaaatttggttgacaactctcttacttataagtgttttcaatctcccaatcctagaacaattgggaatcttttaaatttaaagctttaaagaaagaggtaaatgataagaaaaagatataaatatattttttccccttctccattaagcttaaatttcaaaattcctatagaaataagaataagaatttgaatttaaaaggtaacatccattcctaatgctactaagattaaggaaaaattagagatttaaaataaaaggataaatgataaacaaaagataaaaaatattttctctcttttttctcgccctaattttgaatgacattaataaatatgattaggatttaaatccaattaatcctagtgtcataacaaaaacaagaaaatttcaaaatttttaagaaaaagataaaagataagtttttcctctttttctttgttaattaatttttgaaaatttacaaggaaaagcaagagaatctaaactccctaattttattaggaatgcttgaagagcaaaaataatagtctaagattatcaaaattgatgcccatttggtagcttttagagaaacggactcggttcacgtcatcaagtcaactccacacaagtgtaaagttgacttcagggcaaatgttaaccccaaaaactttccctagtgatgtggaaatcaatatttgacacgtatcaagaaggatgatatcacacagctgagtagacccaagtcatagtaattaacctaagaagggaccccagccctgcgtccatgttgacttcgggagctccgagatggaagttcagactttaataattttaatccaacatactatcttttaatattatgtacaaggagacatggaacaatcaaatccaagtcatggtagctgaaattagatgaacatgcaacctgaaagccaacttgggcacctagggtttcacccaatctccaagttgacattctcaactagggtttcagtttttaggactgtcttagagcaaatgtgtcaaaatttacattgcgacgtcaactagacatacaaagacataatttaggcatcagaatcagagtcaaagcaagttcattttttagcaccaagagcactcggtggccaggcacctagcgcccaggttgacaatttgtcaatctgatgccttccaagtatcagaccaacgatttgacttttgtatcttctttgtgttcatcaaaaatggggaaataggtacttccagggaagaaatagcacttcctaggtgcgaaaagcaaggcccagcgcccaggttgtcacttggggctggcctagtgcccaggttgagattttgtaaacttggcccaatttttgatgatgtttttcgagaatctttcgagcatcttctctattttcaacaaagattaatattcaactatctctggggaccaaacagaacttccaaagggccaatagggggacccaacgccaaggttgacaagtcgtactaggcccagggcctaggttgacatggtgtcaacctaggctgtttgaaatcaagttctcaaaaaagtgatctgggaatttttttttgtcattagaaataatgaagattcaagcaaacttgggggccaaaccataatccctagatctttgaaacagggcctaacgcccaagttgacaatcgatctagtgcactggttttgatcacttaaatgacaaatctgattcaactattgaatttagaatggtgaaggtaggtgacctcttcctcaagttctagaacctgagatgtatcaaaacgacaacccgggtgctcaaaaatgaagtacatacccagcacccaggttgaaaaatggcgtggtgcgctaggttttgcttatccgattctaattctatttcaaatgtctgtctagtttttcacaataactaagatgcataaagtcagagaagtcaaattcacaactttgtatttctcatttttaacatgggaaactcactcgaaaatgaaaagtttcgagtccctcatttctgtaaaataacaacatcttcgagaactggtgaccagctttgccagaatactgaaacagactaagtgatgtcaaaatatcacttaggcatcataaaatacatccccttgatgttttttcacttacccgtcatccaagttgacatcatatgtcaacctgctgggtgctgagatgtcaacccgggcgctggatgtcaacttgcgttgggtgatgaacaatctttagtaaaatggtcataactcactcaatattgatttgattgatgcgataaaacttatttttcaaagctatttgaatgctctattaagtcatgtatcacacttcaatcgcatttctaaagctatcgaccccaaatttcatccaaatggagttacaaaaataagctctggcttacccagagcgggtcctcccatcgcgaccctgacttcgaaaattgacgatcaactccagaagttaatttttgacgttagatcatcatctacggtcagaaatagccaacttgtatttgtcttctatttttgtgggcctccttcacctataaaaggagagctccctttgttcgtttttcagattcagaaaactacccacaagggagagcttccctctttagcgagcgggtactagaagtgagctactatacatttattgtgtctatcttataattacttaataattattttattctcgccattctagcgagcgggtgttgcttagaactcttagtctaaatttctgtgtcaacatatatctttgtgatattttgagagaaaaaagaagaagaaagaaagtggtataaaagtgtaacattacaaaaacagtaggtaattatgaaaaacaaaaaaaataagattttttttaataagtaatatttaaaaaatatttactaaaaaataaataactataaaagtatacattttaaaaatatcaaatattttagcctttatatatttctaaatatatgggaaataagtaatatataatagcttattatgtatacatacttgatagcagctagcaaattagtcaaatagtcattatggtacttgatccttttatcatcctt

SEQ ID NO: 24451 - DNA, 2260 bp, Cannabis sativa
tatatacaaattgatcttgggtttatattaatttatctaacatattggggataatgtctcccttgagtaagtaattgttgttcaaaatttttcagtttttggacaaggagtagtttaagagattgttcaaatgaaaaaggaaaaagaaaaattggaaaagaaaaaaattatttttaaattttataatagttttaatttttttaaaaattatttatgtcacatgtatatttgtgtacactccagcaatttattttagcatttaattttttttaaaaaaataggcggagaaataaagagcaaaatagaatagcaatttagagagttttgcctaaaaatattaatttgtattaatttgtagagttaaaagtaataaaatgtataattaaagtaggtttgctgttaatatttttctttttaaaattaagtcaactagtagcttaaattttgtaaatttcttttcattattttattttatttatatatttattttaaaagacatgaaaataagacattcaattaaacaagatattatgttgtatttgaaagatggaagatctattaatatgctcacaatagtagggtagttgccagatagacatattatccatatcgaatagacaataaattttgttttgtaatttttttaaaaaaatcaattaataaaaatagtaaaacttataatctcaaattatcacacatgttattgttcaaaaaaaaaaaaaaaatcactcatgttacagaattacaatatatccaccatttttataacatttgaagctgtaaacaaacactccatggtatgggagagattattattgattgcaattgcaaataaatgccactaacttgtccatttcatcatctaagaacatttattgtaccattaaattccaatacagccgactaactaatatttcggttgaagatgtttcttctttccttttccctattattggttctctccttacatataaatttatgcgtgcacattttagtcaattcaatacaccaagcactaacggtgtctaccattaaaatgtggtgttttattggtttttgacattctatacaaattttttttattaaattatataaaattaaatatttaatcgtactaatgataatatgatatgtcaaaaaatgttattagtgttttttaacgtttctcatattttatatttataataaaagtagaaattgaaacgctgttaaaaatatccaacactagataaaataatacttaagaattttgattggagtgctattaaagtggtgtgttactagctatttatttacaacacttttgataaataatattaatgtaaatatatgtcaaatttaaatcatgttatattttattttaaatttaggtagcaataaatatatatatacatatatttagtattttgccacattaatgaattaacgtgttttacaattttttaacttttttatttaataatttttatatgttttcaatgaaattaagtatttttgttgaatttgtaagataaattgcaacaaatgcattaaggtcatatataatactgactcctttgtttttaactaaatttagtataaatcttacacacaggagtggtcaataagttttaatgttacttattaaataaaaatttatgaaattcaatattgaattgaattaataacatgtcattatcaattccattaataacaatattattagataatcataaagcacagtatatagtgattcataatataagagaaatattaaaggcattagtactgctgtaaactgtaaaatataatattactattaatgtaatttaatattgaatcttactattttttttatttaaataaatattacattgtataatctgaaattcaaatttaggatcttccacacatccgcaccctcttatggccacttgagctagtctcttttttttttatataatagaaacttttattaaaaagcaaaatacctaaaaactaaagttcatagtggcaataaagggtgccacttcctttaaagaaaacagtttaaagcagctattagttgcagcccaagctgctaagttatgggcaccagaattcaaataacgaggaatccaacacaaccgatacttcgaaagctcacggaggagaatgagggtagcatcaaacactccccgagccctccactccggcaacttaccatcgataaggctttttcaccgtcacttgagctagcctcaaatggttgaatttcacttattttaattttttttttaaa

SEQ ID NO: 24452 - DNA, 3162 bp, Cannabis sativa
  modified_base (1135)..(1158): a, c, t, g, unknown or other
aaggcgacacatcttaagggtgttgggtaccactggtgcccaataacaatgctcttgttttaatgcacttataattaaatataactaaaataattaataaatttgtactgactcaaaagtttgaaccttaatttaattaaaggatgagatagcataacctccaccatataatatgaaataattgtcaatgcacttttaattaaataatcacaacattaaaaaaaagaaccaatagaaaaagatacaaaaataaagaacaaatcatgagtaaaaagtaattttaatagaaagttgttttaaacaagtcttatgatttccttcaaaaaaaaaaaaaaaaaaaaaaacaagtcttatgattaataggctttttttattatgaaaatgttttataagtttgattaagttactaaaacttttcactttgtagtgtgaaatgtaattaacaaccactaactcaaaattatggataatagtgctgtactaattaaagctaattagctgatgatccagctagcaaacctgattttgacgttcaaccagaccttaatttttcaaaactgaaaccttaaattgatctttttcttgagtattgtacttttttgcagttataatatttacaaaataataaacatttatggagtacctaagtttctacatattactcttaacttttctttcttgagaaattaatttaatatacattgatatctatgcatgttgtatattcattcaaataataatttatagcatcacatactacaccaatctttttgtatctacattagtatgtgaaccaaacttatatatttatttatatttctgttaagtattaatattagtgtttaacgctattaaactaaaatatgtaagatttatattaaatagttatataatacaatatatatatatatatcagctaatggcggcgtcggaacttgggaactatttctgccagagttatgtggatttagattaagtaatcttatatacaggcagaacaataatgtgtctatttgataaaaaaaaaacaataaatatgtgtctacatttaaaattatttacattcagcgactccaaattaatttaagtaaatgtaataaaagcaatctgcaatgtttattattattattattannnnnnnnnnnnnnnnnnnnnnnnttattattattattattgttatatggaaattaataactatggatctcaacgaatatgggaggtcattagacatacaacaacaaaattatatagactagctgaagaccgagtatgtaggagaattattattaatcatagttcatataaaggacaaaatatttgaagtattagtactttaattaatttgcaccacacttctatgcatactcaaagccactaaggctagcttagtggtttagtggtgagagagtgatgagtaaaaagaaaggacacaaattgaaacccaaatcttactattaattgattgtaatactacactcaaaaaaaaagtatatgcataattatatgtataatatacaaaaatggtcaatcacaaccctaagatcatttaatttgctacgtatcatctgatcaatgggtgaccattaataagatttcaaagatacaattaatcaatttatgttaacacgcatacccgaaattcaccaaaagtatgcacagtatactattatatttatatttatatattggctatagctagggttctcttcctctaaattatataatattcatccctctatatatatagctcttaatccttcattaattattcaaacgaaaatattactgatcttaattgaaattaattagagatcgaaggagatgagtagaggaggaagctatggcggtggacagagttcgttgggctatcttttcagctcatcagaggaaaagccgccgcctccgccgccgctgctgccagttgagccgccgtatggcgtcgaaaccagcagtttagagaagcctccagagagtcgcaaaagtattaccaccgattctgggcagaaggaaaagatctccaacaactatcacagagctgagggtcctaatttgggcaactttcttactgtaagatattattattttttttattcatatataataaatataatacgatattcttaatttttatcacttctcatcactaattaattcgttaatgtcttgatcatcgtcaggatcggccttcgacaaaagtgaaatccgttcctggtggagattcatctcttggatacttatttggagataagtgatcatcgctattgttttctcccataatatatagtcaataactctttgagaatatcattatataaaatatatatatagagaaataaagagtttaatagtatttgtatgtttattctagaataggggaactgaatttcccatatcaatggattaactaatttagagtaatttataaagtgtgtttgcttgggttgtatattctgatatatgaacactaattataattaataagcaccctttatatataatctggtttgctaagtttactctccaatttcttataattaatcagtttttgaatgcttatataaattataagttaagtatatattatatcgaatgtatattaatgatggtgtctctgttcaatgttgattaatcttgttttccatccagatttggattgtggggattatttctttttctagtacacaataatgttaaaagtcaattaaaaaaaaataatattaaaagtgatatgtcgatctcatattccatcaacaaattattatatacaattgaaatcaccaactacatcttcagatagttagccctagcaaccacaaatataccataaattttcatggtcaactccctttctccctagctagctttttcttgttgctctatagatatacattgtttaaagaataagaaaataaaattaatttctcatttctatatgatattttatttatacatcacaatatatatatatatgtacattattaattaagctatacaaatatatatgccgggtttacaacaaaattctcttaaacataggaaagatcataatatataaacataagaatggacaatatcctaatttttaatagtatccaaaagctaagcaatgagttcttaagactcctagacaatatcatacattttagaaacaaatggggtgtc

SEQ ID NO: 24453 - DNA, 5855 bp, Cannabis sativa
tcgagattctggtgttaagaaaccggaaaaatggtatttcatcaaatcgtaagtgcctataactgtttccaaagagtagcgtcactggggatttcgattgggtgttgtaatgataaattatttttctttgacgatactggttggagttaataagagaaaaccagtatttgcatactaaacgacattgtaccagggatcgaaaatcattaattctgacaaatatttcaaccagtatgcggttgttgagaatatcattgatgctctcttttggtacaacacaatattcttttggttctgccttgattttctccgtgactctggctataattctcttcgtacttttcatcataattgtgatgatacacaaattaggaatgaatgttttttttttctataaatacaagatgaagaagatgatgatatatatagagaggatttattactataaatatcctaatttgaaatggaaaaggcatttttaatatatttattattattataggaaaacgattgattaaaaaaaaaaattctttttaaattactttatttatcttttttcgtttttacgttctctttttagaattttcaatttaataaacccttatttacataaatatttctttcttgacttttcaaattcatttttacattttgttctgaatttatctctttcaaaaagaaaaaaatcacaacttttttactcttctccattgtaaagatgctacccactattttgtcgccattgtttgagtcggagctacctctagaccagtttctgaagagaaatgcaagctcagttcgagcgatgactgccagccacgccatctccgacaacaccgacctactccaactgctcccagcgctgcgattggtggtgacttccagttcggccaaccatcaagtcgacttggctgagggccgtcgctgagggtttgggtggccaatattgattgatgtgcttagcaaagttgcctccgaatcgctgcgtcagacatgggttctgaaaagtcaaataggagattttcctcttgctcacaaggtaagcactactacttttttttagggaaagatgcaataattaagaatatcccatatattatatagctgtaatttaacaaaattaagaatttgtcaaactaaattttgctaactccacattatcaattcaaattaccatttacaattacttagaattaagtctgacaacttgtttagttagataaaattcaactttttcttttaggcatatttagattttgtaggttgtaccacataaagttttttatcattgcaaaataatagtaataataatagtaaaaagaatcagggttgttaattggctgtgaagttggtaaaaggcttggggcatttggctgtgaacttaattgctcattcaaaactgtgattaaaatatttcagttgagacatttagtttagaagctgtaattaatataggccaattttgttggtaaaagtttaagctaataagttatttgcgatgatgtattctctaaatagattttatcttttaacctgtgcttaattgaagtgtgaatttacccacagcataaacaaagttacgaaatagtgcaactaaaattgcttaatttacatcagttaaggctagaaaaggtttgaaggtcattatgagtgctataaactcgatagcgttaataatgaagaaaaccatctgatcacccgcaatataaactccattgaacataagcttgataagaaatagagtcgaaatactatagaaacgtttctatatctgaactattagacttattatcacataatcattttagagcatttttaaggctaaaccatctttaaggccaaacagaccatcttgttgaaccctaaaattcttaagaaaaaaaaaaacttaaaacaatggtgaggtgtttctcatattaaaatctcatccaaatctattgccaatcaaaatgctaaacatggatgggcctgaccaatctatggaaagatcatttgtacagaaattttgctccaaagagaactttttcttccaagtgtgctgttgtgacaactgattttatatttgttcttcttcatcttcttatgtgatagaaagaaagtccttagatatttatatttgcttcatgacaagccaaagtccaaagcttcatcattccttgttactattttttagaactttttatgttaatttgatttgaaattttgaatgattcctatttttttagtttgatatgattatgacctccaatgtagttttaagaggattcttatattatatggtataatagtttcattgttctcattttagtggttgtttccccagtttctctttttgaattttaattttattttttaattttgctggaacattttttttttttgttattttagtgattggttcctcatcatttatattgctcatcattctctttgattataattatgtgcaacactctcttcatgaaaaagaatcatataatgaataaatagtactagaagcagccccttcattgctaatgctttatcaaatctttttaaatgctagatgtttaaatgttagatgttaacatttttattgtgtgttgtttctatttttctctctctctttttttttttttttttaattttcatgcatatgagaaattgacatcttcattttggcagcataataaatctttagagtctggtgttactgttatatcttcatggtcatcatgtgtcaccttacttaaaattgttgctttgaacattctggtggcatctgacaattgaaccttttagtatctttacagtaattatatatcatgtgctgacccttctgagcattgctcaactgcttgtaaacaggggaagtccaccagtttcctgggggtattagaggcacattggccaatgctcacaggtccattccacttgcaggcctttcctctgaaccggcgaaacttagttgtgaatggcgagctattccagtctatcttcaccaagccacctctggttgaccagttatctgcattccataagcttgtgtgaaccttcatcccttgcttgttggggtatgcaatgccctggttttcatagttttggaaaactcgaatcagcaaactatcaatttaccacctgatatttcaaccaaagagtttagtgttttgttttgtttagtattttgtgttttatttcttttaaacttacacaatcttagtggggttccaatgaatggtgtagttgtggaaattagctgttggatcaaattagggatagaattgatgctccttgcttcctttgccttgtgtgtagaggtttgtgtggataatgtaaggttgtcccaagacgattcttaagaactcgaaattgatctcgtaatttatagttttcatttctaggttaaattttttctatttttaattatagtcgtttccatttcaaattataattttcatttttaggttaaatttttttcatttttaattatagatgtttccatttcacacacacatatacatatgaggttaaatactagttgttttctttttttttttagattaaattatttttattttcaatgtcagttgttttctttttttgaggttaaatgctagttgttttcatttcacaaactatactttccattccgaagttaaatggtttctatttttttagattagatgctggttgtttctatttcacaaactatagtttttattttgagattaaatgctagttgtttccattttacataaatgaggttaaatgctaattgtttttatttcagaaactatagtttctattttgaggttatattatttctattttttattatatttatttcaatttcacatatatgatgttaaatgttagctgtttccatttcgatattaaatggtttccatttttcaagattaaattattttcattttccaagttaaattgtttcaattttcaatatgagttgtttccaattttttatgatatttgtttctatttcacaaactgtagtttctagttcgttattaaattgtttctatttttcgagattaaatgttagttgtttttatttcacaaactatactttccatttcgaagttaaatggtttctattttttttagattaaatgctaattgtttctctctcacaaattatagtttccattttgaaattaattgttagttgtttccattttacataaacgagcttaaatgttagttgcttccattttagaaactatagtttccattttgatggttactgtttccattttcaatataacttgtttccgattttagtgtgagttgtttttattttttatggcatttgtttccattgtggttaaatactacttgtttctattttaatgttaaattgtttccatttaaaatatgactggttttcgattttagtatgagttattctttttttttttttttcgattttcaatattcctaaaaatatataattttaaaatatgttattattttattatggaaatattaaaaaaaaagtaaaaccctaaagtataccatcttttagactctttctctctctctatggtattgtctcttctctttcacagtaaattgtagccgtcggtgctgccaaccaacagccatgctcgctcgtcctcccatctccaactctgaccaacagaccagacgagtcgacgacgacggcaactgcccccctcgcagacgacaacggcgcaggtcttctattaatcgcagacgacaacaacgtagcttctccttcgaaaaccgcaaggacgcaacgcagatctacctcactcgtggctgaaaaggtagttttgtttgagaaccaatgatattattagtgattaattattattccttttaatcgtgatgctctgtaatctgtatggattttgaaatttcaatggatatttccctcattagagattcatatatatatatatatacaattatatattatatattaagtaaaagttgcgtgtaaattttatagaggtcttttctgcccacttaaagcttgttctctcttgaacgtggcaatttatttcaatcctacatcatatatgaatatgtatatatgtatataaatcatctattcttgttatatttgttgtaagtcttactcatctaatctgatctgcatcatcgtaccatgtctttcctgctgtgtgtaagtgaagtttcaatagattactatttcaatcactttaattgatcatatcattagattattgagaatgtaggccaactatatatgtatataatttgattatcttgaacccaaaaaaaaaatggtcctcctaatcaatatatattttatcttttgtaggggtcgaaacgcttaaccaacatttttgaaaagacatcattagctacttataaaatctttattctaacttatatacaaagtggtttgagatttatgtggtctggttgtaactttttttttttttttacttctttttcactctgtttctactaaaatggaatacattttccgggtctttgaatatatatacgagtcttttgggtcttgtctcactttcaatatgagagacttggttcaaaccaaagatgatctttgtttgataaggacactattcaagtgagttatacttggtcattgttggtgaaatcttgagtgtatatatattatatttttttatatgtatacataaaacatgcattatatatgtgaatctgaattcagccatctaatttcttattatgtttgataatatctttatttattatttatgtatttcaatggcacggtataccaatgagtttattctttttctattttagattattgaagtgggattgagaataaattcatcatcacactagacaccgctatgaattttgcaact

SEQ ID NO: 24454 - DNA, 1887 bp, Cannabis sativa
atttgcacgcatataaaataaaacagacataaaatagtcaaattttgtttggttgttttttgtttttaaaaaaaaaaagaaataataagtagagtgtcttgtataatgctcatctacttatgaattttctgttaaatttatttaccaataatgtttccttgttaaaaataaatatgtaaatttgttgttcctacaatagtaaaaaaattgtttttctcaataaaaacactcttaaatttgttattcaatttattaaaaatctaaataaagtaggcataacataaattacataaatcaacaaaaccttgacaaaaatcaacaaaagtttacatgttacattgactcaacttggataaaactaaaagagccataaaaagccacaaaagcctcccatatctattggggaaatactacaacaacatcactaatagacaacacccaaaaatagattacaaaacaacatattacataacatatgacacacaaagttctatataataacctttttatttaattaggaatttccaaccatccatttagaccaatattcatacctaatttttgttctttctttctatagattaaggaacacaaactcttcaatagaaggtacttgtccaattttcaaaagggtatccttattaggctcttcatcaacaccaattgccataatagcctttctcttaagggcaattcttcccacactcataaaactcacattaacattttgcgaagccaaaatgttcccaacttgaccaatcatgcccggttggtcaacttgtctacacaaaattaggttaccttcgaggctaacatccacatcgaaattcccaacacacctcaaatgaggcacaccgtatttcactttcccttcaatctttacctctccattttccacaaccgagctagcaaacctagactccacacccgagattcgaatctcgattgagtcaactgggaactctggggatgtatcaaccctgactcgctcttcgcttattcttagtcctttttgtttggctgtgaaatctgcatttactaaattaacaatagaggccgatataggctcgatgatgcccttgatgatcatggctcgaagaagtcttgtgtcgaagtcatctgggtctcgagctgttttgtaaataactcttaccgatttgattccacttcctccagccacaagttgcatagctaatttcccaagcttctcagctaatgttacatatggagccaactcggatagaacctaaaagcacataacataaaagacaaaacaaaacaaaacactttgctttaagtaaaattatgaaaatatacttattccaagtgactaaatcatgatattattacctcaggagggaccattggtgcattgacagcagttgcagatagttcaccattcaaggctccaactacagcttctgctatttctatggctacaccttcctaaaatgtgtataaatccattattagatatggagtaggattagagcatagagacccaaatttttctcatcaataaagattatactaatacatatatattgaactatagcaacatctatatttttggtatctaaagaaataataactcaatttctttttatatgacgatatacattttacttaagcaccacatgttaatctaatggtaacagttggtatcaaaagtaaattctaaataatttatgataccgaaaacagaagttaacaaaataaattgcatgtgtgcataaaaaaacacagaaacaactaatgtttcaatcttgttttcggtacagtaaaaaaattgaattataacttttctaattgctaaaaataaaaaaatctcaaaaaaaaaaaaagtctactataaaactaatatataaatatatattttttcttaat

SEQ ID NO: 24455 - DNA, 4505 bp, Cannabis sativa
agagaaatctcactataacaagggttttatttattaatatatatacatatatatatatattttatagcatctttagtttatgcaatattttgttgtgattcgaggtttaaaattattattttaaaaagctgaatttgatttctacttccgctgtgattctgatatgaagcctaaaaacaatcaggaagcatctttagaaacgcggttaaaaattctcccggttgacaatctattgtcaacctaggcggtgggtgcacaccaggtcaacctgggcactgggtgcctaggtgcctcaattgggaaatgttctaattctaatttctgtgcctctagcatttttgtgatagctcttattcatgtctaagtacaaattttgagcatttttcaataagaacgacctaaaaattgaaaccctatctcggaatgtcaagctgggtattgggtgaaacctaggtgcctgagttgatttttgggatggcaaatcaatatcttttaacgcccagactttggacttggagtctccttgactttttggtttagaatatacctaataatggtgatttggaaataacttggcaggatctaaataccgattctagaaatcctagagtggatatgggcataaggctagggacccctcccagagttgactgttatgacttggggcacttaactccatgaatgttatacttcttcccacgtgtcaaatatttattttcatgtcatcaaagctaatttttgtgtaaacattttcccctaagtcaaatttacacttgtgtgtggttgattttctagtgtacactaagcttgtttcatacaaaactactaggtggacatcaattttgacttcaagaaattgttttatgattgtcttgtttgaattccttttatttaggagactttagaaatgtgacaacacaaaaatgtcaatacaaactttgatcttcagctattgtcttaagcatgggctctcttgtcacactgcgtgtttgagtagataaaaatgtagcctttgttccctcctaggttgcagccttggaggtcgttagcattccctcagctatgtttaaatcataagtggtcttgttcatctcctcgacttcgtagcagaggaggccttcttcaactcctcgactttatagcggaggaggccttcatcatctccttgacttcacagcagatgaggtcttcatatctcctcgacttcacaacagaggaggcctttatcaactcctcaactttacaacaatggaggcgttcatcatcttcttgtccttatagtgaaggaggtctacatcatcccttcggctttgcagcagaaggggtcttcctggcaaatgccaataaattgttgtagtggttgcagtttgctctttgttcgattgagaatgtgaccaactctcgaattaatatatctaagatgaggggtgttctccccatcttgggtgcccccttgaagcgatcgtaagtgtggtctccatttttttttccttagtcataaccatagaggtgttcgtcatccctttggctgtatccacattggaagaggccttcttcatctcttcgtctaaaacacacgaggtcttcatcatcccctcagctgctagcatagcagaggaggtcttcttcatatccctagctatttcaacaacgggggagatcttcttggtagatatcaacgatgtgttgtaacattcatgtgctatgcattggttgccaaggagacggtcgatacaagctgctatctggaactttacagaaaggtggtagataaatgagatggcttggaggtcgtagagtattgaccttcctatacttatatattgtaaggagacttggtgttgattactatgaaggtagtcatagtggttttcaacctcggggcagttttgactgtcagtggtaatctaattttaccacaaggagctatgtcaactttgttgaaaccatatatgagctatttctatggttccaaatctttaaaggaaaactcattctctccagagtttgttcaatcaggatatttgatgatgttccattgttaatcatcaccattgccaccattatattgaaaatttaaacctcgctgaggagcaagctgttctttgatcgatcaacgatatggccaatgcctattattgttgggaacttgacaggcaggtgaaatacttaaaagttagctcataggttgcctcatatttgctgtttttgcccgcatctttcagtttcttagtgactggggaagaagctctgtagtttgtttgttgaagctatctactagcagtgagatatacaactatcgaggtacagcgagttatttcttatacgcttggtgttgaagcataagttcattttatcatcataagcgagatgaatcaatattgaagagtagtgcagaaaaacctacaacatcttgaataagggtgaaatagtaggtttttaaagagccatactttatgattccaactcatagaatcttgttagaggtttgaaagaaaaaactccaaaggagaaaaaagaaaaaaataaagattatactaaacccgtagtaagtacaatgtcccatacttaggaggagcttatcatctgaaagaagaccacaactagggtagcttcccactcctagagggtttcttacaatcaattaaagctatcaaagtggcgacaaaatggtatatttattcaatcaaagtgaaagaatattatattttgatataatatttttttgactaaataaatgttatatgcatgttagaagtgtgtcacacattttaatctactagggaattgttacattattttataatataataagtatagattaaaatgtgataaatatattattatgtgaataatatatatggtaaataaatgtgtaacctatggttttaacctacactttgtaacctacatgttgtaacttggagatgagttacaatttatcgtcacttgtagctcttttgttgatcacacatagttagtgtaataaaagagttgttacacaaaattcaaaataatgacgatatagttgttacaaaatagattaatactcaattatatgggagaaaggtgtggtgtatctgaattctaagtgtgatcacttaaacactataaaaagagatctttggtgcttatttggaaagaactaagttttctatcaaaaaagcacattactaaaaaaccctaagacttgataattttcaaagctattttctagaggattcccttagtggttagagataagaaaaaataagctttttgacaaaggtgtcataccttattcaagtcatggtgatccccactgttctacactcaaggttgtgagtgagtgatcttatttttcttcttcatattatatatatgttatataatatcgcgaaatctattcatcacttgtacctttcatatatatacatatatatagtgtatgtgttgtaacattaatgtaatctactttgtagttcttgtattattttacaattgagttgtaatatatcttaattatcttccatcgatatataaaacctctaacactatatacttatatttataaagtctattttaaaaaaaagattataatttatctaaatactcaaaactagtgctgtaaatacgaaacttttttacatgacacgaaactggcacgagcctggaaggcacacgcacgactaggcacgaaaaaatactggcttgggcacgacacgacacgaaaaatatgtccttaagcctaacacgacacgagaaacacgaaagacaagacacgtcagcataaatatactagcccaaaaggcacgacatgcgacaagcctggaaagcacgacacgatatattaaaaaaccttataatttattattaataataataagatatgaatttatcaactataaataaattaaaataataataaaatttaaatgtaatgctgaatattataattttatacttaaaactattaaaacatgaaaatttaagattatattaatttatttacagtgtgtgatatagaaatttgagtatttataagtaaatatacaaattttgataatgctaataatttttgtatatgattatccgtaaaatattattcaaaagttatataaatataactaaattgataaaatgtacatatacttcaataattgtaaaaaaaatatgaaaaagtaaaacaaaaatttaactccaaatatgaaaaagggctaacttatttaagaaatacgggccatcatgaattcgagcatgacataaaatacttggcctacgggccgtgcctgacctactctataaaaattttggcacgacacaatacgacccttattttttatagcatggcacgatacgacaggacacgttttttgaaaaatacagaaaaatataaattgagccagtatgatacacaaaaatttacagcactactcaaaacaaaaaagcctaccgcccctgcgatatgacaaatgttcggtctaaaaatatatatatgactattgaatggttacatttttattgta

SEQ ID NO: 24456 - DNA, 5334 bp, Cannabis sativa
tatatttatacatgtataccattagtttttaaagataataatttcttcatttaatttattaaaaatcaaaaagaaaatatgacgtgccttgcacgtagttaccgcctagtatatacataaatattagtatttcatgtaattattgtaaaatatatatatatttttaaaaattctcctaaaaaaaataaaaataaaaaaagttaagagcctaaagttagctctcctaccccaactacactccattaattttttcacttactatcttccaaaccaatttcctaccttcattatcccattttggatccccatcttcattcccatttattctctcttttggttatggatcttgcataaagattggtacttaaagttaagagctttattgttgtttttctagaaatttgttcaattgggtcttttccaagatgaaggtaaacgtaatctcacgaagtggtagagaagtaatcaagggtggccttgagctcaatgactctgtaagttcttttttttttctgcaaatttttggaaaataaaaattgggtttgtgaggaaatggaagaactacgataaagtttgaatcttttccattttttacttgttgggttttgattgaaatgataaaaaaagaaggattcggtgtgaaagattcaatttttttgttacttgaaatttgactatagactttgattttgtgtttttttttttcaggccactgtggatgatctacaggaggcgattcataagagaagtaagtaattgttaatattcaatttttcaattgttttggtcaaaattaattttcacttataataacaatattctagactttaagtacagttatatgattccttagtgtgatttgagaagattagtgaagtgttaattaagtttcagttcattttcaccatgaattttgttattctgttaattggtacataattaagtatttgtaataagctttttctttcactttcaattgaagaaactgctatagtgttatgaatgtgtgtgtagatttggaatttagaagaataaaaatggtctgattttgttttcaaaactttgatttggcttggtttatatttggttatgatccctaagatctttgattccaaatgaattgttatgtttcaacacctttaaaacaagtcttgaattggtactctgagcataataatttgactttcattaccttaaatcaacagcaaaaaagttctacccttcaagacagagacttacactccccgtccaacagggatcgaaagagaggcccgttgtcctcagctcgaaaaagagtctcaaagaatacaccaatggaaattccaatgacttgactgtagtgttcaaagatctcggtccacaagtttcataccggactctctttttcttcgagtacttgggccctttgatcatttaccctctattttactacttcccggtgtataggtactttggattcaaagacgagcgtgtcatctaccccgtgcagacgtttgccctttactactggtgtttccattacttcaaacgcattatggaaacgttctttgttcatcggtttagccatgctacctcaccactctcaaatgtttttagaaattgtctttactattggtcatttggatcttacatagcttactatgtgaatcaccctctttacacacctgttagtgacctacaaatgaagattggtttcgggtttggaatactatgtcaaatctcaaacttctattgccatatcttgcttagtaatcttcgcggtgctgatgggagtggagggtatcaaattccacgcgggtttttgttcaacattgtcacttgtgcaaattacacaaccgagatttatcagtggttaggtttcaacatcgctacacagacaattgccggttatatcttccttgttgttgctgcttatataatgaccaattgggcccttgcaaagcaccgtcgcttgaagaaggtgagtgaatccttcgatcgaaaattgttatcattcttttgttattgcattgtctaatttggaatctgtcaataagttaatcttaacttgtcatttgcagctattcgatggaaaagacggaaggcctaagtatcctcgcagatggataatactaccaccatttctgtagaacagtttagcgagctagctagcgatcgatcgagcaatgtctactatttactttttgccctccaaacagtatgaattgttagagctccattttcaccagagctgattttttgttgttgttgttgttgttgcatttcagacccaaattttctagtgtttttagtttaagtttacagatgtaatggatttcaatgaataattattctagttggctaagttgttctcttgcattgaatcttctcttaaataagaatatgactttaatatgtaacatatttatgtcatatatgtgcatggagttacagtttgaaagctaaatcgcttcggtttggagggtcgccataactaagactgaacgctttgcaccatgtaccacaccagcagtgatcgcgctttttgcagatgaacgaacacacaacacgattcttgacagcccgtgagatggatttcgcagctgctaatgtcggtgttgcttaatcatcaaaccaagtttgtgttttcttgaatggaaaaatcaatcttattaaccatcaaaatcagctaccaaacaaggtagcaaatctactggaactttctccaggtgaaaagtacaatcaaagtaaaatagggaagtttttgcaaaagtatgagcaatcttattcactgatcgtttaataaagaaaacagagatatttcttaactcagacaataaattattacaactattagtaacacaaccaaataaagacaccataaaacataaaacaaaccaaatttgtgtttaattaaacatataatgaaaaaaaacacaaacttttaaaataccataaaacaaaacctcagtttgtgtcacaattatgttagtgatttgattgagtatttacaaagtttgcacatccatataaaaaaccatagacttacaacaacagtttttattaacttcaattttatagagacatttgttgacatttaaatgggaaatcttatttattcaacttattgttaattctttactagatttcttttgtagaatagtgagtttatcattaatttattgatatattagtagtttattatgttatatattatattagtgtttaaatatatatattctttttacaaaaaataaaaattataaaatagtggtgatcgtacgaggagtcgtctttcataaacaaaagaaacgagaacaaaagttaggagttagacagttaaagaggttgttttgtttttatgtacttctgtattattttctctttctatgaatgaaatacataaaaatgttattaaatacttttatgatattagaacactctataatatagatttattttttaatgtgacatatttaaaaatgttatttgcatgtcttacataattagtgagaatcttaaaaatgagtgaaaaattcattacatttgctttcttattaactcgtatattttaaaagtattttataacggatgaattttataattaacagattaatttgttactctgtaataacaaatatagtatgaaagaatacaataatattcctgcaaaattagttaatgcatttcttgtaagtatttatcgatattcaaaatacaaacttttatttatcataatttgtttattatttttatggtatcagagcactctataatatagatttattttttaatgtggcttaattgaaatgttatttgcatgtcttacacaattagtgaaaagcttagaaatgagtgaaaaattcattatatttactttcttattaactcgtatctttcaaaagtattttgtaacggatgaattttataattgacatattaatttattactctgcaataacaaatatagtatgaatacaataatattcatgcaaaattagttagtacatctcttgtaagtatttatcaaaattcaaaatacaaatttttatttattataatttcttttattattttttttacgtatacgtttttctgtgaaagcttattatatgattctttttatttattagtataccacatttggaaaagtaaaaaagaattatgaatagataaatcctatcattgctacaataagaggacaatatattttttcaatgtaaaaacacaaataatataaaaatggaatactattaacatcaatttatttggtgtctaagtaatgattgacttaaggttatcccttagaagatatacttatactctttgttaaggatttcttatctttacaattaattatagttgcatgggcaatattttatcatttttttcaaaatgaatggtgagcatcaataggtcaataacatatagttcattggaagaaaagagtgatgaacaaagtttaacataagattttcagcacacacaattgatcattaaaatttatttgcatagagacattttaacatgattctattaaaatttctttggtttaactaagaaaattgctaaaaagtaacactgatacttaataccatctttggtgttatacagttatcgatgtaattaaatatcggatctcgaaaataacttttaagaaatatcgctaaccaatcgtcgagcaacacttataaaaggtgttggacacaactggtgtccaataacaatactcttcaactaattcatcttttaaaagttatgaaattcatttgaaaaaaaaattaggaatacatatgctctggattcgaaatatggaagtttctaggataaccaaaaggaaatagcagaagcataaatacagtcaaaatgttttcacaactcactacatagaaatcatttttagatacaaaatcaaagcacttcatagtgtcaataataatcacacacattatcaagcctgtgttttttaatcaatcatcgtcctcaagaacactccgacgcctctgaatctggaaaagaaaaggggattcaaaggaaaactccaaatgcttttcgtgaattaatttgctaacatggcgaaaaatggacttactgtgactttggtttgtttgcttgtttggctgttgatttgttccaatagtgttatcagtctttcttcggaaacctgttaatagagcattgagcataactttcttctgatcaaatttactcttaaagaaacgtagatcggattgaaaaatgaagaccttaccttttcagcaatttggcccatttgagcagctctcagcaaaacatcttcgacgccccttgctttctcgggtttcaccagagcgattcgagcaactgcatagacaa

SEQ ID NO: 24457 - DNA, 1218 bp, Cannabis sativa
cttctgcacgctagttttatattttcatatatatatcactgacatttgcaaaaacgcgatttttcaacatggatactttgaagggaaaagaggactaagacagggtgatccaatgtcacctttactgtttgttataggtatggagtacctatcaagaatattgcagaagattggatctaaactagatttcaaatttcatgacagatgtgcagagttgaaactgaatcatctgatgtttgctgatgatgttattctgttttgccatggagatttcaagaatatatattatgtcttacaaggcctaaagctattttcttgctcttttggacttcaaccgaatcctcacaagtctgcattttattattgtggtatggatgagcatgaggttcaatgtattattgacagttcaggttttagcaaaaaaagaggtacctttcaaatatttaggtatccctatttgtgctaaaaagatttcggggaaagaatgtgttgtactagcagataagatgactgccaggatcaaaacatggagttcaaggaatttatcactagcaggaagggttgttcttgttcactctgttctcatgtcaattcactcatattggagccaaattatggtgttacctaagaagactataagggagattgaagctatttttcgtgcctacttgtggaaaggccaccatgtgtctgtgggggctgctcctatagcttgggattttgtttgtcaaccaaaaaaagttgttggaataggtctaaaaaaggttgttgaatggaatattgtagcgatgaccaaatatgtgtgggcatttgtgaataagaaagataatctgtgaattagatggatccattgtgtttatatgaaaggtatggattggtggagttatcaagctcctcctcaggctagttggcattggaagaaactagtggctgtcaaaaaaccaagttaaaggaggtcatgaattttcagcaagttgcagcagccccttataatatttctaatggctacaaagctctctgtccctcacaaaacagagtaaattggagccatgaggtatggaatagactaaatattcctagacacaactattgtttgtggtttgctatataggataggctaaaaactagagaaagattgcataggttgaatatttttggggaggattcttgtcttttttgcagtaatcagattaaatcttctaaacacttagtcttcct

SEQ ID NO: 24458 - DNA, 1376 bp, Cannabis sativa
tatttaagataaaaaggaaattatatatatctatatcgaagtcagatatggtgtggatagtattatctccgcccccgccccatccccgcttcgggtattgaaattgttctccaccaccgccccattaaccactaagacggggaatccccaccccattagaggcgggtcctcgcggttacccatctcctgcggtataaattttcatctctaatcatgacatgttccttattacttttgcttatcactactgagattttgagttggatttaaatgaacagattcaaaaccatgtatttgccttgagtttaattctttcatttagataacgttgtattgtagctgaaagatgttgatatggttcatgtttggagtagtgaatatgacaatatatatcgtccacattcccataaagaacgatagcaagataagaattaagatataagtctagatcctcttaatgttcaggaaagttaacctttgattggatttggatgagtcatcattacgtactactactgaaagctagcttgcgagacattgtttatgaaaaaatcaacatttgtttttatctcgtacgtatatatcaaacccgagcaacgagctgtatataacacttattagaagtataataaagttatattataattgtaaatgcatgaatgtgaggaacaaaaaaaatcgcattaccaattttctgcctacagccactaaatcatcatcttcccatggcgtttgtaataaatttgtaggcatattgctttttaagaaattactgtaactattttggccaccgaagagaattaatgcatgtaagaaaaatctaattaatctgccattaattagaattagattgattttgtatttatatatatctaatcacaacatcagtactcacaatcaaactgtattgttatgtgttgagacattgtagtccatgaatttattatctttcatggattttggcttgatcaacagcaaatatagcttattttcaaacttgatgattgttacgttcaaagttggttgacactgaaaagacaaaacaattgtgatgagaagtaagaacttgatgagggctatttattttcttcatttttttacacatatttattttttatttttagaaaaaataaataaataaatgtatacgttgtgcaaaaatttggaataaaaagttaaggtgcaatggccccctctgctcccttacctccgtcattgatcacgagtactgatatatgaagatatgaagatgtgaaatgttgttcagagtgtgattaataagaagctggtttttggtgtatgaagaatgttggaaatattgtgaatattttaacaaaatatataagtgtcttagtgtgtgtgagttggaaagagtc

SEQ ID NO: 24459 - DNA, 4111 bp, Cannabis sativa
gtttttgtttggaggtatgttgttataggtgtattcatgttggatggttgtccatcatatttatctgttttcaaatggggatgcttagttctttactgaactgagtggataacaagttttccttggttttcaaggcacagctgattggttgagctagtgcatcggttgtggcatcgtctttggagacttgcgttttagtacaacctttgagctgacttaaaaagcgttgaaattagctcaaataggccattttctttttgcattgagttgtatattcacctaaaacatgacctacgattagttgactgatatatgtctaggtactcacccctctctttgtgtgctagcctaaggctagcaatttgagcttcatgtttagcctcattattagaacctttaaaactaaccttaattgccttgtgcaaccattgcccccaagtgcccaaagggccatgcaagcatcaggtaggtggtcaatccaccttctcgatgagtttttttgctcttgccctcacttcttctctggctctcacctttctcggcaactcttgggagaattcttaccaagaattaaatgttcatggggctagcttgaaacgccaatgttgggctagttcagcaagagttgccggaaatagtcggcattgcacatctccagatacttgttggagatttgtttggatcttaaggtatttcaagtatactaggggatctttattccccatgtgcatcttccaagttggcatcttgaatttgggcaaggaattgatgtatgctgagaaaggtgacccccttgacttatccagctcaaggtcagatggttttgggcctgccaagtccttgagcatgtttcgtatttgatccaactgtgcttgcatagaaggatctgttgttgtaggggcattgttgattggcccttcttgattaacctgcagccctagattggcaaaagcctagtcggccataccctgggagagggtatattcaaggtcagcaagccttgagtctagcagctgttcatggccagccaaccatgtgttgggcagggcctggttgcccattgttctttgatttgctagtggagcctgtgcgctggcattgtgtagatgacacaaattgctgtagttgcgtggatccaagtatctgaagtgattggtctaacttctcaagttgttgttgccttggttgtttccacccgttcctgggccttggcggtaaaagattttccttagggtcactcgctccaagattctccgaaatgagagatcaccctgttggtcggccaaaagtgcaccactaaggtgctgtctagacaaaggtttgccaattgggggtgttgttttaccagagacccctggccggccccccagaccaatggttgttttgtctggctgttcttatcaacaaatttttgttgtaatacttgtcttccttcagacaggggaaggcctgtcctagttccaaaggaacttggttagatagtttatctgtagaccctccttgatctgtcgattagtgtcccttagggaggatctcagatgagatcctgacctcttccgatagttttttcattaaaccaccttatcagatcactagcttctctattacagaagtctaattctacctgatgatatccgaggatgtactcttagtcatcaatccatctcaaaaattcgcgtctctattgtgagaatgcatcgcaaccaacagcatgtggttcttcagtttggccaacttgacagacgacctctttaactttggataattcaagatcttctcttaagtctacatgaggctcgatggttagctcgccaattcttggccttgtctctcaagcataataccatgggccaaatcttgttgtggcactcagggaatgatccatgttagccattccttcggtatgaggtcctcatggagtgtccgccctgggcggcacaggttggccattaagaccaatcaggttggtagtgttaacctgaccagtcgtggtggctaggattgtgatgcctgccgagatggcagggttagccacatccgtcaggttcatagagattccagtttttactataatacgaacatcacgatctgtagtcatagtgtcatgagaaagacccgatgagaaaaagtttgtagccagaattctccttgagttcaactctcaatgaaagcactaaattgttgacttctgatttagccaaccgacagcggagttgtatttattacttatgatttccatgtgttgcactataataaggaaaaattaaattggacacaagattttatagaggtttagggccctgagttagcgggtaatgacctactcctcttttggttatattaatactagagataatgctacacatatcataagttttatgtaatttgaagtaactctcttaagattacaatatgtgaatcaaagtgatagagagagtctaaggcgtgtagaaaagagggagaagagagaatgttttagacttacagttgagagcttagggagactagaggcttaggacgtagagaattagggttaagataaggctctttatatagtagagcttacatgaatattaaccaataatatcccttaaatataggaagataaagcattatttacataattaaataataaatcataaataggataattatccctcaaaaatagggaagttgctgatattttcccctatttttgtgggttgtcaaggtccaaacctccacttagcttgctatccactgatgaaggcttcgcaccaaaggcttgttaggaaaaggctagctgaccatgtgcttgaaagcgtttggccagccatgtgcctgccacggtccacaggtttcacatcaagtgtctgtcagcctacaggatgaacctcaagtgcctgccagcctacaggatgaacctcaattgcctgccagcctataggctacacatcaagtgaatgccaacctttgtaggtgatgaccgacctttgtaggtgatggccaacctttgtaggtgatggccagtctttgtaggtgatgctcagcctttgtaggtgatggccagtctttgtaggtgatggccagcctttgtaaacctttccttgcaaaggtcagagttccttggttgaatgggccctttctcagtctaacaaacacccttttggccggccagcttgtgcttataaccctggctggccatataagctcatcctagctggcctatacactccctttggccagtgagacattgttctgcagcttcttcacgactcagttaactccttccgcttgttgcttgactattttgccatgccttgtaaagagacattctcttgctattggcaaggttgtattccatgtatactcaatcatggcttacgtgaacatgccacgttaggtggaattaatttaggataacactctcaaaagctcttacaatgatctctgagtattttactcttaaatctagatttcactcatatgttttctctaaatagaattcgtgtacctttataatgagatgattccactatttatagggattaattacatcaaattagtttctcaaaactagtaggcaataaaatgagggaaatatttattttctataattactgttatttacattttttgcaagacatgacacatggaatttatcagagaaggctaaattaatcctcctttgattgaagtcttttgttgtcactctatcgctgaaaggcttccccaaacatataaacatccaaaacagagggacacacaaaagccttcccatgtcaatgttcacttcccaaaggcagaaaacaaaacacctctatgataagtcaatattttgacttataaatatagtcaatttatgtataaataatcttaaatttattctttaaattattaattagtgtgattataattttttacgctattttaatgactaatcgtgcatttacatttatttggagggttgttagcacattttggtagaaaaataatataatccgacgagctcagttttacaaggcggattttaattacaaattttgatgatattggaagcagaattggacttgtacctaaacatgaaagtagtagatctcgatctcaaattttcaaaacatcttgaatcgtc

SEQ ID NO: 24460 - DNA, 5992 bp, Cannabis sativa
  modified_base (1019)..(1024): a, c, t, g, unknown or other
cacttaatatatattattcacatgataatatatattaccacattttaatctacatattatattattaaattatataacaggtcctacatccacgactgatgtgaggaaaactaagaggattgaagtagttcttgaagtcgaacctaaggaattctcggaggatgaagatgacattcatgctctaagaactgcgaaactggacgaggaagacttattccgacctccattatcacctagatcgcctctacaccagatcaaactacaggaggaaattcaagctgattttgatttcttcctttcagcaaatcggaggcgtgccacctcaattgctcaaggtaattctaatactccccttgttttgcgatctggcagtgtggttaaaaatctggaaaattcttttaagaattctgagcaggatactaaagcaaaagtaaagatcacaatggaggacataaaagatgaggtggaatttcagagacattccatagtttgctatgtgttaggagccatcttcctttatcagtgatagagggctttattcgaagggtttggaagggagaagttgatatagtgggaatgctcacttatggagtatttctagtgagatttggtagagagtttgtgatagctattcaatggcgatggacctcaaagtctgtgttgtagtaggatgggattagaaggagcttaacgtaagtggctatggttaagaaccaccaaatccctaaaatggggttcttttggttgctctattcttctatggagctaaagtattgagaaaatgtgtacaatgaagaagaaaggttccatttttctatatagtttggtggctggttggcaagatggggactgggagtgggtactcaggtttggggtggagatgaagatgggttggggatggaaatgaagacgacgaagaagaataaagaagaaaagaaaaaaaaagagaaaaaaagagaaaaagaaatcattttcaaataatttatttatttgcttattttttaaaattaaaataatannnnnnaccaataatatttcaacacgtggcaattttaaataagtaaacggaacagttaaaattaggactaacggacaaaaaaaaggatgaccttgaggactattgccgctatttctggaggttgtggactaatctgcatcaaagtgacttttttggggatttttgctgcaaattttcctaacctacaatcatcaattaatatacatagtatgtccaatcaaaccgacaggttaggaattgtgtaaccaacgggatagtccattctggccaaaaaaacaaggttggtccattaattaccctatatattaacttttgtttttttaagtttacaaaattttaacatttatactttttcttcttagggtgttctttcaaattaatctatattattttgcttatagtgtatttgtattaagtgcggatttcatattttgatcaaatccaattcgcatagtaattcaaatctaatcaaattcaatagataaactaaattatttttttaggaaaaaatttcatccaccaaacacctagagcaacgagcactcaacaaaagtgaaggtgagggtttattttattcaaagatagcattcgctatcaatatgttctgaataaaacaacaaattaaaaaaaaaaacaaattcaagtgaagaaaaaacatatatgtataaaaatgtttaattttattttaaattatattttttttttataaataagaatggaatatacatttgttttactaagtttcaaaattggtatcatatgtattagattttaaaattactataattaaaatattaattatatatataattttttaaactatataaatatacgaagattaaattatatcagttagttttacttgttaattaatatttaatgtaatttaaattttctaattaaatttaatctaattagtgcaagtgcaaattaaattagattcaatattttacgaatacttctaattctgaaatttatatgttggggacaacaaataataattattgtatgaattctaattagtaaaagtgaaaaatttgctacaacgttggtactttgacgcaagagaatggtggaaatgggtaatttagtaattgaaccaaaatggcagtaaactattgggtgggggcaggtacggtagtggtgggtgcacagccacaaatgactctctctctctctctcgtcgcagcgatgaagctggaacaaaatcaattataaacaatgttaatctaaactaaacaaagacagccataaagctttagacttaagcttattcttgttccttgttttgcttgtccccaaaataaagagagatttttattttttatttgacaagagtatacacctcttcattttctgtattaaactatatgttgtttctggagaatgtcagattgagcctggtggtcactcacaagacatagcaacacacactctctctctctctcactaactgcttcaacaggaatattatatgatacttgtttgtctttattctccttgttctgttctcattttttctcaacactctttttctgtttgttttctctgtgtaatatatctcagttgaaaaccacattgcctactccttctctacaattagatagagactatccattgaagaaccaaggtggtgacacacctcttttgtgcttgtcttcttctctttcctagaatatggacttgtgttctcccctcaattcctgttattagtgttctttatctctatgatttcttcttcttcttcttctgagtactaatacagattcccaaaaagttataaaaagcgaattttggtctaattagtgggttttggattgtccctttttccttttcctttcttgggtcatggagattttctgtgacctcgaagttgatgttaatggagaagaaactttcatggtggagaaggtaaatctgagtttctccttcctagtgtgactgttagttttttccatcaaggtgggctgattttaattatcatatttcttgaaaaattggaatgtttggatgttggtgccaattctcaggctccaatttgtgatgctagtaaatgaacaatgaacattgatatttttttggtaacttttttatggtgtcatacttttttacatgctctaataatttctctgtaacttttttcatgtcttatgatttttcccttctctgaacatcattaatttcacacctgtatagcattgatgtgggtcatggtgagtgataaccatagcttttgcttagatgttgtctgtcgccgttttcacaaactgcacaccgagtggcaaagcattctcttttgtttcttttctctcatttaatgcttggtgtgttatggggttcaaacgttttatatctttacttgttttattcactccttttgagagggactaaagggttgctttcattgccatttaataattttatttacttatttttttcctttttaatgagctgattagcaaacatcttttcggatttgcccttactccaatttattacatataacgacttctcaccattcttttgcaggttctgttgtagattcctacttttaatcccatctttttgttttgttcccttgttaagaagttcattcttttggttcctcaatttgttctaccgtggagttgattattgttttgtcttttatcccttgaatagttgaatttgctatattctcttctactttgctaggtgaaaaaaacttgtcctttagttccttttgctgtatgtttgaattggttttttcttttcctttatgaaatggcttgatgttagaaccttcttgtcttgaagaattctaatctgttttctcttgaccatttgtagaatataatagcttcatattcaggaaggttgaataaattatttggcaagtccaaaggtacaacaagtagtctaaaaatagtactccatgactttccgggtggggcagagtgttttgagctgatgttgaagttctgctacagcaccggtatgactcagataacccctacaaatattacccctctgcgttgtgcggctgagttcatggagatgaagagttctgtgtctggaaccggtaatttgatggaacaaacagagaaatcctttgaagatatgagatactggtcttggtctgagcttcttatggttgtgaagcaatgtcaaagcttacttccagcctcagagtcttcaggagtacttgagagatgcttggattctcttgttgggagactgtctttgacaagcgaagcgagtacttgtccatctacttcttctccagacagctccggggttcggttttcatgtgactctaaaagcaccgagagtttaaagacagtcttttcaagaacctcttggtggtttgaagatctcatatttatgagtcctgttttggttgaaatgctggccaagactatggtttctcgaaaatttgaccatgccctacttagtagattccttttttactaccacaaatcaaagctttacactgtctcatccagtgagaagtgcaaaattgtggataccgtggttgacatgctttacattcttgatcaaagctgtgtatcctgcaaaagtttgtttgagattcaccgggtttccctgaatttgaagatagctaaaagtagcagaaacaagttggaggatatgattggttcacagttggatcaagcaacattagataatttgcttgtttcatcccctcatggagcaaattacttgtatgatgtgaatcttgttctgagattattcaaggcatttctgcgtggagggttgtgtcaagcatctgctatgaggttgagtaaggttgctagcttgatggatttgtatattgctgaagtggccccggatccttatttaaaaccttcaaaattcttggctttgatcatggccctgccagaatctgctcgagactcctataatgaggtttatcgtgctgtggacatgtatctagaggtattgcattgatctcgaaactcgtttacatttctccatttttccataacctttgaattaaacttgaactagttattctagttctatgttccttttctaaactttatgttggatctgtttattataggttcattcaggattgtctgaagaagaaaagacgaaaatatgctgtgcattgaaatatgagaagctctcagccgaaatctgcatacatctttctcagaataagaaatttccatcgaaaactgtggctcaagctttaatatcacagcaattaaagcttaaaagtttactccatgccaccagcaacaccaatatttcatgtcctggctcaccttgtagagccatagaagtaaaaaatgctacgaaaaaggacaaagaatctgaagaacaagttatcctctatgcaggcaaactcgatcttccaaccgataacaaaaatctaagagaacatttgcaaggaatgcaatggagggtgatggagttagaaaaagtatgtaggaaaatgcaaattcaaatggcaaagattatgaagtcaagatcaccaagccaaagtcatacaagatcattgcctagactttgttcataattttatagtttttcattttacattgttttttgtattttaaagaaaattagcttcgtatttgtatagcacaagagaatgagattttgttcgctgtttctttttacatattctgccctttagttacttttttcctctctttactttttggctcaactaaaggcatatgatgagttgtttcttacttacttttaacagagatcgaatctttgttgtacagttatgaaagaaaactttagtagaggttttattgttggtggtgagggagtggtccctcactgctaaaaaatacttaggtagtattttcgataaaagatacatttcttctaaagtctttttcaaccttcactattgtttgtagtagtagtagtagtgggccatcttctttctgcaactgcaagctggcaatctgtgtgtgtgtgaaatgaataaaactaaaagtgttgtgg

SEQ ID NO: 24461 - DNA, 3746 bp, Cannabis sativa
  modified_base (3566)..(3570): a, c, t, g, unknown or other
  modified_base (3608)..(3612): a, c, t, g, unknown or other
gaagctggagcaatggagtcatctacgactttactggcagccccatcagcgacttcctcagtttccgcattctccgcctcctcagggaaaaggtttcccccgtatccttgggcttgagtaggcaacatagcacaaaaagcctcggctattcaacagcttctgccccaaaaactgagaaatcgaagtccggtaatttggaaaagtcgtgtaaatatagtcagaaatagcctgttcgtattgtttcttcccgttctcccttcctgtctcaagatcgcgagttaattccttaactcgcgactctgagaggttggccttatcctccgcctgctttgccttctgttcctcctgctcttttgccttttggaggttctcgacatctttctccctagaagtcacttctaacttcaatttcttcacgttgtcctagagaagggtgttctgtttcctcaaaagcttgacttccttggagcctacaacaaacgctttcgagaacatggcgatgaactgtgaagccaattttgcggaacgtggcattagttccttagaaggagttccttcaacctttgacatgaactcttcgcccacaaacttgtcttggagagctaggacgtcgcgggctctgacaacggggtaaatcacgaatttcttccccttgtcttgggcgggtctgacctacttcttagaggaatcagctgcaggagtggagcttgcttaaggaaagtcatttctacaaagaaacaataagataagtataatctttatgttatgaaatattacatgcatactcgataacttacctgatgttggtcttgaagtttgtttggatagaagcttgtctattctctccttttgtttctcagagggttccttgtacactggttccagatgaaggctggcgtcctcggggattagcttatttctcgtagtttggcaatcgtgcacaacaatcgccaatcgcgatcttgaacgggtaagctaccgagaacctcagcgatctctttacgagtgagatccagaagacgtcgaaccggtctatctacaatcaacaaaaaacaaacattagtgacttcacaaggtgacaaaaatataaactaagcattgggatacacgacgtactaggtagatgattgaaatctgccctaactcctggtactttgaatacgtaaaaccacttagatttccaatcccccatattagaaaccatgccttctaccccgttactctcagaggtagcccatttactgaagcagtaaaagccattgttgtgacccactctttttatattataaaatagctaaaatcctccattgagggttcccttcgaacatattccatatacatcgcatagaatcctagaactatgcgataactattcggggttaattggaagggagaggcattgtagagtctgaggatagcttttatgaaaggatgaaagggtaaagagaccccacaacgaagaatggggacagagataaccacgtcctctgcagggatgattgtgggattggtgaaagggagatgaggtctttgcgatgctgaaggacgcatggttccgagtcgcaaaaaattcaaccatacaaatgtatgcaagtcagatttggtaactcgcgagaccaggtcctcgcatgaaaaaggctcattcaactgtgcatcgtcaactgaatctgtttcacttccctcgacattctcttcctctcgtgactcgcgatcaagaaccttccaatcctccccatctcctttacttcgatatcaggggcatgcctcgagtgggtaagatgttcttgagcagacaccatagattgattcactatcatgaatcttgattgtccctggttcagcgagttcctaaaccatcttatctatctcgtcaaaagatagggaacccagacacgtagctctcgcaacgggaacctcctcttcagaaagcaaggttggtatgaagctatcactcctgttctgctcgtcagcagaagccccacctcctgagtcgagcatttagctgtgtgataggtcactcatctgaaagatagaagatctttttagtgtggtgcaagtgggagaataatacaagtgacctcacctgcataaagaaaatttagaaatatatagaggtttagccagacatcttaagaaatggctgggtgtgtctcaatagcctaatggtcatgccgctacatgaatattaaggtattgagacacacccaccattttgagaatttaactaaccctctcaaggtgtaagtcgcacatgtgcaactaacagtatgtctcaaaaaatggctgggagtttcccagtgacctaaggggcatgcatttttaagcatgaccatagagttactaggacacacccatcatttcaagaaatctggtcagttccaacatgcgactaagaatgcaagaaaagtgaaaattggccatatgtcgcaaatggctgggtgtgtcacagtgacccaaggaacatgcaggcccaggcatgaacattaagttacggtaacacacccaccatttgaaggacctaaccaatattcacaacaaaaacacatatgaatcagaaccctaagttctaaacagatgttgaaatggccaaatcacagatttactaaaaatacatatgtggagtattcaagatgttcatctcaatactcgtgagtattcaaggcattcaaccaaaaagatgcgaatactcgaagtattcttcctaaaacctgtggttacttaagtttcaggcccatattttccaaaaaactacccagtttttaacatgaaaataaggctctacatacatttcctattatatcatgcatattatatctcttaaaaacacagaatgttgatcaattttcagaaataaggaaaaataagttgtgaatagatttttgtactaaccttggaaacgtcaatcactccttggttgatttcgtgagtttcagaaagttagaaggattgttttctaaaagaaaggaaaagaaaaatctggaaggggttctgaagttttgacagttcagagaaaggagaagagagaagtgaaaatgagagggaaaatatgagaatcatttcatataaggggggttaaatggcattatccctcattaattgggattaagacacgtggccaaagaatgcgtaaggtctcctaatctaacggttatccataaccacgtctgcacggcatctgaagagtttcgtgacgtggcaccccaaatgggttaaacataataattacagctgtcattttgaaaccctagattggacaatcaaaggtcaccatctcgtaaaatcccttcgcctgcctctcgcttatagtttcccttatgacctaatctatcagtcgcgaaactagggacatgtgttatagtcagatttcctcacctagaaactcgagaccagactcctatgaaaatgacacgtgtactcactctcctcaaggacagctgagttgtcagtgagagacctcttgagtatgaacctcgcttaaaataaacttagcgagatgatgtggcgaggacacagtctgttgggttttgtgccctaaataaaagccatttcaatataattagatttannnnntaataaagatcagaaatcatttttatgttgcatggttnnnnngatttatttcatgattataaattccattaggtctagaaaatatgtctttgtacatgattatagtgttgtcaacatagtggaatataatcatgattatatgttcagaaagtttaattccctgatttgttagttaa

SEQ ID NO: 24462 - DNA, 1246 bp, Cannabis sativa
  modified_base (760)..(766): a, c, t, g, unknown or other
tattaaataatatttcaaatataagtatttaattttttcaaacaaaaaatttgtaatctttaaaaataaaatacattcaaaattttaaaaagaccaaaatcttaaattgaataatatatgtttatattttcttttagtatatattaggatttttttataattttttaagttgtatttttatataaaaattattacaataaataataagctgtaatattttaaatttttttttatgtattttattatttaaatttttaaaataaattttctttttacatgaggggcgctgtccccgctccattgccgtcccagtatgggagttcacgccccgtctccgatgaagaataagcgaagatggggcggagatgaaaattaaaatctttaacaagaatgggaacaggagagtactccttacaatttttcccccaaatttaaatctatgcatttaagttttattaatttttatttgaatatatttaaataattgtatgtttatggtatggagcaatttgtacaaaatatagggggaagtttaaaaataccacttttattaatcaattaatcaaatttactttcaattttatatttaattgaaacatacctctttttatgtgtattgtacccaaaataccctgacataagagagtcacatggagaatatcttgaagtgacaggggcaaaattagtacaatgtttaaaaaaagaagtaaaaatgatagattttaaaaaagagggtaaaataaaagaggacaatataaannnnnnntagagtgtaatttcctcaaatataggacctgtttgcagggccagccctaaaatattgtaggtcataaaaaaaaatatttttgggctctcacttagaaaaaaatgtgatattttttaaaattagtaaagaatgtataattttaaaagaattttttttatgggctcctgacgtaggaggattctaagcatatgcctaactctcctatgcttaagaccaaacttgcttgtttggcacagtttatgaaaaacttaaattgtgttttgagaaaactgttattaaaatatttggtaaacaattaaaactcagcttactaaataatttatagaaaaattatactaaaagctgaattagtacaacttaacgtttagaataaactgtttaataaataactatatctttatatattaaaagtgtctatctaacggtaattcttggtttaacgattgttggtttaacgattcttttttttatttagcctta

SEQ ID NO: 24463 - DNA, 5791 bp, Cannabis sativa
aatcaagcgtaaaatagccctaaaactagaagcaaaggtcgaaaacgaccttaagaagcatcccaaaacttagactaaaattagcctaacaaattccttcaaactagatctttactcaccctcaagtaagactaaaaactaagacaaagatgtaatgacacgacagataaccgagcgtccaaataattaaactaccgctgctacctgtgcaacttcaatcaactggttaaacaagaatttcaattcaataaatctaaaaattaacttggatgcacaagttagaaaagccgtgtatggatgcaaattacacttcaatttgaaacatatcacaatcattctactcttactaatgcatgacctacctctctccacttatgtcaacaacccctgctcggaatcaaaagatctttctcggttgaaatgtcatggcttaggtgaaaggtaggtaagctgtcatttaggttacattataccataagcacactttaacccaaataaacagccacataaatccacatatttaccaagagaaacttatttataagcttatggcataataaggtacatttgtgaattaaagtagataatggaaacacattaggcctaattaagttgttagagtttcgaaatagactcaggctcaattcgggtatactaagaataaaattttacgggtaagctcaaaaggctcaatcggtccaaataaaattacctaaatcattttccaagcaacaatcactaaggattttgcttcaagaaagtaagtcaagcaagttctattccatcacaagcaagcattccacgaacccaagtagaacaaaaaagtgatactatccaaaaatcaataatttacatcgataaaaagtttttcacaaggcatccaaatcagtccaaagagtttatgaattaagcacacagttcaagatttcaatccattccacaaataacaacatcagttcaatcaatcaattatcattggctcacttatcagcactaaaaaactagaaaaactaaaccactaaggatagacattgaaaattgaaattttttaaatccctccccccaaactaaaagttcatagtgtccccaatgttacataacactcaaggtgagaagcacttacctgggacacccatcaaaatgggtttctgctaattccagttgcggcgaaccatagtccctaccgcgacttctggacaaaacaaattgtgcacctttctgccaagtcttgtcgtggcgagcactattccctgccgcgaccactactgcttcaaaagttctctaatttctcgcttccgactcccgccgcaactaggataaagtcctgccgtgactattgaagtaggcccaacttcttctaaatatatatactttttttatatatatttttcacaattttcacagctcaaatttacaacaaatgtctgacaattctaaaaaaaatgcaaacaaacaaattaaaatgctatccaaaagacgggactcaccttcacactttccacacattaatctttttatacgtcgtcgaatagtgcaaaaccattctttgagtttcccattcttctttttgacaactacttcttcttgacaatcttttacaacttccattctacaacaagtaggaatttcagttgtggcaaagacatttaaggtcattttctcattttgaactcgcaaccttaactcccccttttgaacattaattaaagctctccccgtggctgtgaatggtcttcccaaaatgataggaatgttttcatcttcctccatgttaagaattaagaaattagtaggaagaatgaatttaccaaccttcactaagatgtgttcaattgtactccgagggtgggcaatggataggtctcccatttgtaaagatactatcgtaggacgagcttctcctagtttcagcctttgaaaaattgataaaggcattagatttatactttccccaagtcacatagggcccttgtctcaactgaaccccctatagagcaacgaatattgaaactacccaggtctttaagcttgggcggtagtttcttctataatattgcactccactcctcagtaagtgccactgtctcatactcctccgactttcttttctttgctaaaatctctttcatgaatttaagataagtcgacatctgctccaaggcttatgcaaatggaatattgatgtggagcttcttgaatacttccaagagcttaaaaaactgcttgtcaatgttgttcttgcggagcctctgcagataaggaattttgacatggtgctcaatgtggataggtggtgaagcttcttttgatgtaagaccttcaatagtcttcttttagttacggtgcctgttgatcctgaccccttctaccactggttgtttctcactaggcccttcacacttcttcccacttctcaatgtaattgcttgacaccgctccttaccgcttacctcactagtgctaggtgaatttctcgagcttgctttgccacttgagtagccaattgtcccatctgagtttccaagtttttaatcgaggctttagtctccatcatgaattgcagcaataaatcaacatgtatatttgagcctccactaggactttgttgttgcgactgttgttggttttgttgaggctgagttctctagtggtagaaaccttactgctactgatttgaagactaccgttgatagttctgacgatgaccccctcattagttgaacccatagttattgttctgaggatagctcccaatggctttagcttgttccattggcaaactgttcacatccacggggcatgtgtcatatgtgtgagggcccccacattgttcacaagtaacttgagcctattttaccagagcaaccatcagctttgttagggcctctacttcgactgtcaacttggtgatggggtctatctcgtgcataccagcaaccttctttgtttggcttctttcagttgcccattgttggttgttcatagccattttttcaagcaaattgtaagccacgtttgcactttttctcataatttccccacaagctacgacatctataattgttctagtatgaccaattagcccattgtaaaaattgcgaaccaacatccacttttcgatcccatgatgtcaaaattttctaatgagatctttgaacttctcccaagcctcatagagagattcattgtccagttgagaaaaattattaatgtctctttgcagcttggtcttctactgcacccccattattttcgttgttacctccattgttacgccattaacgttgttagccttgacttcttctgctttagctcttgctgcacttctttctcgccttttgtttcttttgtttattctacaagtaatttcaatttcaagatcaacttgtagtattacactttgtcattgacgtcgcaagcaccccgaatgcctgaaataaaataagactatctaaaagaaacaaattagtaataagcagaaagaattgaccaaagtagaatttaatctaatttttgtaatatcaagttttaaacaattccccagcaacaacgccaaaaacttactataaaaaatatgaacaactacgcaagtgcacgtaatcaagtagtattcacacaagtgaggtcgatcctacagggaattgaactgaataccagtaaatcagacatatatttctttctggtaaccgataattttgatgaaaataaaaataaagaataataagaaaataaaattacgcaataaaagcattaaatcaaggatgataaattagggaaaagaatcatgttgatttaattacctaatggttaattctaattcctattctctttcttaaggtgaatgacatattataaaaattaaacgtaactctttttaaatcttttaggccctaactcacatattatctaatcatctctaaattagactaacatataattagcattaaacaataatctcaatgtcactaaggctatgcaaatactttcgttttacatcaaaacctcgtttatccaattttagcattcccaaaactcacttttaagatttttaattggtatcatacaacatgcaaaaggtgatcaatcttaaacatgtaatttgttatcccaatttttgcactatgacgtagcatcacacgccggtgaaacatggaatcaactccccatatcttctcgaaaaagatgttctgaaaataacaccacaaatgcctgcacggacgaagtcctcctagccgagcggtggacagtctgaatagcatgccaacacttagcaacttcagcatttgcattgcaaagcataaaagcaatccctataaatctgggatcatatcacagagatatggcaagctgtccaaatccctcaatcagtgtactctatatatgtaatgtgtaatcttactaattatagagattgtgaacaaaaggggaaccttccctcaaacatctatccctataaatagtgatatattctcagtgggcaaagagtcgaaaaagtgatctaagagagtatactcagagctttcattgtaagagctctaagagaagaatcactatattctttgttcttaagtcaatgcaaatcaaggggagtagtctattaccgaattgctcggggccgaacctctttaaaaactctgtgttttttatttatcttttcatattatatctaaataatttcacttatcacttacaattaagactcattgtcgttggctaaaagcgaagtcaacataattaaacacaaacatggataaattcacaatcaagaaaggagaaataggaattatcattaacttaagaaataatatcaatcaacattcaacatctccccaaataagagtttagttcataatatccatagtcaaatccataattaaaattgaaaccgtaaataacatagaaaaatgaagagaaaagaaagaactggttggagaaatcaatccagatcgccacaagctgctcttgaagttttctcttttgtttctagggctcccaatctctgtcctcctcaaaaatcatgagatccccttttaaatgagccaagttttctctttaaaagtcgtgaaattatgaaactactcgtggagacaccagtaaggcttcaccgcatccacgaaatcctctagtcgtagcagctgggtcatctcaaattggcattcgttctgccaatccccgtcgcgacttggaatattgcccgtcgcgacaggcttcacaagaaaatagcttaatatattttttcctcaactttttaatcttttgtcctctattcttatgaatacttcctttaaacatctgagcatcttaaacaagagaatcaagcgtaaaacatggtcgaaaactaccttaaaaagtgacccaaaacttagactaaaattagcctaacaaccctctaggaacaacaactagatttcatccccaatactatgcaaaacaaagactagaccaagaattggcaagccccttgtagacttgagagaagatctcaagttagcaagacttagagaggttgtttgccaagccaacctaattggagaaccacacgctattgattgcgatgtattcatttagcagagatgcaaagtcttgagatgtatggatgaccaagagtacatcctttgatctcactatgtggtgttggattgccgtagtagagaggcgaacaacctgataaggcggttcaatcaaagaactaatggaagaggccaggatctcatcaaagatccattctaaggaagactagttgatagatcacggagggtctatcagtaaactgaccaaccaggttcttcag

SEQ ID NO: 24464 - DNA, 2642 bp, Cannabis sativa
ttgcaatccatcttggtcatatcaaaatgccttcatgccaacatatcttgatttcttctaacagtactaataatgctttctttcactattgggggcatgcttcttgctaccttgattgtcttggtagggtttatataacaaatgttgacctcttccacatcctccattggttcaatcattctttcagtccccacatgggggtcgaactcattttcaacgacctccgggatggttttaggttctacttgagtctcccttttgggagcaatagctgcctcttcccaaaaaatacaatctcaatggagacattgtaacaacatcttgtgctctttctggtcacctctgactactccaatgcatcaattgttgttgggaaacttcatacataaattccttatcaaagtcactactccaaaatctactaagagttgacgtcctagtattgcgttgtatgtgtcaagtaatccaccaccacaaaagtacaatgcctgaaggcacaaacattattttatccattaagagtgacagggagttggatttttcccattggaattagagtgtctccattaaagccctgcaactagatgggccaaggtgaaaagtctacctcggtgagcccaatcacctgaatagcgaatttgaatagaatattcacgaagcttccattatccaccaggagtctagaaactatcttgttagttatttaggattcaatgaccaagggggtcattatgaggaaaatgcacataccgagtgtcctctatgaaagtgataggaagattcattgcccaaggacgttgagttggtgatttcactacgacacatgtttgcccttctccatctaactctctcaaataccttttttaggagtttttggtgcttctcccaaggtgtggtcctttagagattgttgccacatttccatcaattggtggcggatctaggcctgggggattttgttttcctggtcctaaagccaatatggtaactacaggcggagctagtggagtagggaggtttagaagttttattccaaggacctgagggtgacctacttcttgcagagagtttatggtaccctactgtcctagaataatcatctttgagtgagcaaccccctaaccaggatagatgatgggaatccagacctattgtctcaaatgtcctgctctgaccaacatctcaatttcatcctttaggtggttatagtcattggtggagtgtcttacttctccatgatactcacacctcttacttggatctcttttgaattttcccccttgagtcgtccatgggggttttctataagggaccgtgttgcaagttgcttcataaatattctttcgagtatccaccagactggagtacttggtaaatgttggttcatattcgttcttggcttttttggaattttcactttgtcgcgaagcctttcctcctctcttatttcgagactgacttacattctactatggaattttcgctttagactatctgagagcgatacttcatccagtctatgtcgctccatacctagagaaatgggtttgtatgggtgcttgtacggatgtagatggtccgtagacaatcgaagtatactgtgttccaggaacaagagctatagaggtaaatctaagagcgaaagcaataggaactggtgtcggagggacaccaaatgctttctgatacgtgccttccaaactgataaacccttgtgccttagccatgaattcagacaatgtctctgcactccttctctacatttctccccgtaattaggagccaattgcaagtccagattgtagggccacaaatttcatgtcatcaatcactttattcttggctgccgcttccatcattcattgaatgaaactctttaggttttctccttcatgttgtgtgatgttggtgatggagcccatctcaaagtcataatcgtgggcagcaataaattatttctcgaaggcagattgtaactccttcatggaatgaattgattcaagagtcagtctcttccaccaatgttcagaaaattcagtaagggttagggagaggcacaaacacttggcatcctcattgaatctcgccacttgcatcatcttgttgtacatggataagtgaatttttggatcactgcgcccataatacaactcaatttagggcatcttgaagttctcaaggagtggagcctccgtgatccctcttacgcatggttctgggtcctcatccttagaatcagtgagggccccacttagttttctaaccaattttgtagtgtgacaatatgttcttccaacctctttgtgtcactatgtgggagatctcttccacagactttgttgttcaagtggtttctaaggtcattaccacgtggtctcgtcttctcgctttttttcctgctcgtacttggcatctaaatgccttttgagatccactatggaccaactttcctcagataattatcccctatcccaccatcctagtttactgaatcactggggtagtttttccttcccttgggccttggtactttaataccaatcccttatggtgctacagagcctttctgggctaaagggcatccgagcctagaggcgtgaatcgccttctgtgcctagaaaggcatgttagcctgatttgca

SEQ ID NO: 24465 - DNA, 3723 bp, Cannabis sativa
ttaattaattttagatcaacttatattagaatatttttcatagatattaaattaaaattaataattaagttaattttattctagctacttaaattatttgtttcttgtaattttttgatcaagaaggaacaatcatcattaatcataaacaaataccatccatacaaaccaaagctaggtagcaaacccgctttacataaaaattctgtctatgcatctcttttcatgaggttttaggcttctttttttagctatttgtaattttcttaatttcctgtgtaatctttgttgtggtactcgagtaattattgaagagccacttgtttctattgctccaaatgttgtaaatcatggcagccattatcgagatatgaatccgatgtttttttatctctaatgttctacagcacccactgctaccaacactggaaaccagtcggccatctcctaattcccagccaaacactcacctgctccaccacctgttgtgaaaaacagtagtcaaaaaaaagatgggaattactcttagttgctgcatcacacactcggcagttagtgctgtcaagagtggtctaaaattgcacaaacttgtcttgagttagaagctgagagttgacagcttgccaagaaatgaatctttccttcggcatgtttagggagctccaaatacatttgctgaactcaaactgagtttgaggtaagcaactgttaaacaacagtgaagttttaaacctgttcccaccagaccctgccttctcaattgctccccgagtgaacttgtcccttagatgacataatttcttccaataccaacgagtatcattcttaagttcatagttcaacaaagacttgttcttgagataaatattattgatccatttcacccaaaggatgtcccttttagatgagatggcccaaatatatttagcaggaatggcttgattccatttgactccataagctttagggaggcaaactttttcccaagaagccacatggagtttgcttctattcccattccagccccataagaaatctctacaaagtttttcaacctcatttgtaacactatgaggtaatataaaaatactcatccaatagtttctaagcccaagtaaaatagagtgaataagttaagccctacccggaaacgagagatgcctagtagcccaagtatggagtctttccttaattttcttgattatcacgccacaatcttcaactttccattttgttggtcttagagggaccccaagatacttaagagtataagttccttcttgaagagccaattcagtcatcattgcctgtttgtcttcctctttcacccttcaaagtagagattggatttgttggtgttcattacaaggcctgatgttgcactaaattcatccaaaacctcctttatctcccgaatagagcttaagtttcctttacagaattaaatcaagtcatccgcaaagcatagatttattatcttaagattcttgcataaaggatgttacctgatcttggattgattggctcctcgaagaaatctcctggtcaagtactccattatcatgacaaataagagaggagacaaaggatcaccctgtcgtaaacccttcttgcctttgaagctcccttgaactgtatcgttcatcaagatcgaataagaggtagctttcaaacatgtcataatcaatgagaaaaaaagtcattcagaagcgcttccaaggacttccaactaactgtgtcatacactttactaatgtctacattgagagtgcatcttggagatatgtttttccttttataattcttcaaaagatcttgaagaatcatgacattatgagcaatcgatctcccttgcacaaacgcttcttgattctgattaatcaacaccaaaagcacttgagagagcctggaatacaacaatttagagatgcatttatacacagttgagcagcaagctataggtttgaaatccacagcctttgtagggttttctatcttaggaatgacgttatcatagttgcatgaaattctcgaggcattgaacctgttaagaaaaatttctccacgactttggtgaatacagttccatgttaggccacattcttgaaaaaactagctccatacccatctcgcccatgggatttagaatctggaatactgaagaaagacttctttatttccttgcttgtgaagggttttatcaaactcagttgatgctccacattgagtctgctccctagattcatatagtcagatctcaggttttgagtagggtttgagctagttcccatgtagccttggaagtgcactagaaagtgccataccacttctttaaagttatatatgatctctccttgatcatttgtataagtaactatgatattctccatccttatttttattagaaaagcatggaagtaagcattgttctcatctcctttgcacaaccaagttaccttgctcctctgtctcaagaaactgtgatacatcttctcttgagcattaaagttcatggcagcctctttctcagcttggtggtaagacagatcatgagtgtgctcttgagattgcattttggtttccaaataatggtccttggcttcttgatcttcttcccaacacccttattctctctctactaaacctcttaatggtgtgtttcaatagcatgagctttaagtataaagctatcattccctctctttttattggtctattccagtcttcaaggaccacatctttaaattctagatgctcaacctagaaattatagtacctaaaaggtttgaaccctattttctcattggtgtccattgacacaacacacaaacagtgatcaaaaacagtttcccaactatattgagctttagcaaaaggaaaactatctgtccaatcttcattcacaaaagtgtgatcaatctttgagtagattctttgcaacgccctaatctatagggacgccacgtgtgtgattttataaactagtttaatactaatagattcattaattattaaaaaccgtgataatattaaaaacttgactaaaacaaaacactaaaaaaggcattataacggcataaaaaatgtgtttcggggatccctgttataaattcttttacaaagaactatatacgatgatgcctcaaaaacataaaatcaaaatacacaattgatacagcccaaaaaaactcctggcaacccggcacgcaggtcggtgagatcaataagtacattgctagagaagactgccacctcatggttgatttagcttttatttgcctttacctggaccacgtatcacctgtgagtacaaaggactcaacaagaaaattaataataataatcatatagtttattattctaatattatcattcatgcacaataagaatcaaaccatcacacattgttcataagatgaaatccaaatcactactggcatcttccatgaataaacacagtatacagatatttggtaatacaaaaccattatacgaataatggaattcatattcattcaatcatataaataatatatttgtacctcatcaagcaactatcttcataacatcacgttgcctaatcaagcaagttgatgctttaatctgataatcttgtagtgcatcgcctaatcaaacaagcccgtgccatagcatggcacccatatgtcgcataactgcataacctaatcaggtgagcctgtgccaaaaacttgcacccatata

SEQ ID NO: 24466 - DNA, 5170 bp, Cannabis sativa
cccatgcggcattaaatgcgaggtgactgttcaaatggggtctggtgcctcccagaggtgctttgctatagctctgtcctccgggagtacaaggacccttcatatcttctctgggaggtattttcttgttgatactcttgatcgaaaaagacagtcaaattatctcagaaccatattccttaaatccacgtgtcgcagtcgcattggtctacgtattttaggcaaaattaagggcaacataggcaatcaaagatgtataaagtaattcacaggatgaattattcaaagtatgtttaagttttcttaaaacggattataactgtttacgcaaagtagaattgattaactgctcgtgaaaggaaagcatagcagatgacaactactcgcatacatagtagattattaactacttaagtaatattaagagaaaaacgagaccaattgaaatgctcacttaaagtatcttaagtttgatcaaaatataattgtttaagttgtgaataaaaatgcaaacaagcaaatatattaagttcaagaataaagatgcgaggcaataaataaaaaaaataaaagcaaagttggccatccaacaatgcaaatttgtctttacaaaaaagtaccacaaggggcaaaccattgtctcggccaaatgtcccacatttcctaaataaaaaaaaataataaatataaatagttaaaaaccaagactacagtaggagacttggacgagtcttcttcttcctcctcagcctcgacctcttcttccgctgtcttagcctgcttgcagtaggaaaggacttcctccatgccctctcccaagaaacttaaattcatttctggattcaccatccaagctcggtagatagaacgcttggaaaccgcattgcatcgctccttggtatatgcctcggcaccctaaagcttcatggtggctgcattaagttcttcttggagtttcaagcacatctcgaacttgtccttggcctccttctaggctgcctcaagtataaccttgtgggcccgcttcacctcctcggcctctttgtttagaagagtcatcaccgactgagcctcattccactatttggcaacgacctcgcattgcccaatggttctctaaagcgcactctctaattgtttcaccctgtcgagaccccgacgttgggcgacgaaggaaaggaaggtttgctgaaaataaataataatgaaaatgcataagtattttttagggttcttgaaataaaaggcaaaatgagaaggagaaggaaactaactgagagagcaaaagtgatactcctttcaagcatctcggtcggagtgccattattgaccaagtcccaatcgctgggcacaaaagaccggacatgacgccagcaagccgcaacatagtacaaagagtgttccgaaccatcccaaccttgatgggcaaggcctcaagtgcttgacttgaagaagctgtggcctgactagtttttagaataggctcctcggtatgtgtgagggcaggaggatgagtctggacctgattctcagaagtctcgagatctatggtctgcaaggcatgcttcttattggcagttgtcatcccgggccttttaagaggctccacgttgatgtccgaggaagtttctgaggtagttattctcttcttcccctttttgcttgaagtgtggagaaggtcctctaaatccatatctgcaagacaaagaaatgtatcaacacttatttaaaaatagataaaggggaaaatgggaaatgaatccccacttaagagaatttaccataatcataagatggcaaagatggaggactataatattcactaaactccctagatcctgtgatcataaatatgtcgtaggggtttagtgggtctaagttccaatctggatggctcgctctatccaacatggtcccatattgctcggcaatcccatgataagaactagtggaactaagttgcacatgaaaaggtgcgtactaactattgaacctatgggtgatgcaatctacgaggaaggggttccaaatataaaaattatatcggctatcgttgaaggtcactaacgaagttcgactcgccctaagaatagtgggagaccatccacattgattacctcgggatgcttcttcttcagcttcctgagggactgcattttggagataatgcgcctgagccacgtaatcttgggtttcctcgtcacttgagactagaacctactgccacaacgtatacttgggatacttacaatcacaagtatactcactttcagcaaggaggccaacagatctcaaattggcttcattcaagagaaattctgttgatcaaagaccaaaaggaagacacaacagaagcctgcgtcgctcagccatttcaggagttggagttggtcttttcgagatcactgtcaaaaggataaaatattataagtcagcgaggccaaaattaaaaacatggagtaatttaaaacccattttggaacaaatagctacttacgtattatgcaaaaaatagttgtgttgattggggaaaggccacttgtctagaagaagtcttccttaaaaggggtcttgtttggtaacccaacaatgatcctacaattgcttgtatgagtgccaagatagtaaaagcctcctgcacaacgtttcctcgcagggatttccttgaccgagtaaagatagactatttctaggggagtggggcactcccatcctaaaatcttatgcacaacccttatacttgaaaggtttttgtaggaaatgggaaccaactggaatggatctattctgagatggttgatgaactctttaaagtaatctcgcaaggggagaattgctccagccctaatgtgctcgaggctccaagcgcttatcccagccgagccactggtacttgcttcgccactagtttcaccactggttccctcgcgtgcctcgtgagtaagtcattttggtgaatagcagctaaattcaccaagagcgatagatctaacctgacactttcgtctctgatcaatgtcacaagtccttaaaataccacttacatagtcccctatggctcttatcctcgactcaatgagttcggcctcgaaggtgatgtttggatctttgaaagtctttaagtttacgaggattggaagacattatttcaaagtccaggtcacctggtgaaaaagcaattatgactctgggtaaaaataagggcttagccaaagaaatagatgatatatttgggggttcaggccaggcagcatctcgtaagaaatgacgtttaccctctgttatttcttgtaggaaacgcctataacgactagcaatatcatcctggtgggtttttattaaatagtctctaatttttgcatcgtttatttctaatttggactggggttttgaaattctaagtttgtacgggatggcaagttcgttaggataatctatttctaaggattatggagaataaacttctgaatcagattgggacattttaacaaaaaagagcaatcccaattcctagatgaaatttatcaaaccagaggcttaaaaatatgataaacctaaaaacttgtactctgcctaaaccataaaattacccagaaaaatttaaaccaaaattgctaaaaccaaatagaatggcaaaaatgcaaactataaaaatagtgatcaaaacctaggaatgtgaaaaaaaaaaaaaagaatagagaagaatgggtcacttactgtttgaaattgagttgttgtacgatgaagagttcgtcaaccaaagacggagtgaatggcgtgatgctttttttgaactctgtaggtctaacaaaaaatccgagtatacacacaagaagaatgtcagtgacagtgagggcatgcaaagcttcgaaaaaatcaggatgaattttttcgtagaaaagctcaagaatttttgaaatggtgaaagtgatggaaaggtggttcttttttcagttttataccattggctttgatctctgttagattaagaaacaaaagatccaacatatagaaatcgagggagaattggaaaagatggctcattaatattaatgatgtgcctaaaaaacataaactgccaaattaaagagcatgcatttttttcaaaatggattatcacaaatataccctcggtaatcatttaaaaagcacttttcatttaaaaggaccttttaaggggtaattgttatacctgaaattcggctgtactttaaaaactgacacgtgtcaatctcgtgggatatgaaccaacagatttaatgataattatattataactcattaaatatagaataaataaagcatgtccgtaactcgctggctgattagtattaagcgagacaaggatatacaaactatcaattcatgttttgatgagaaactatcttgcctcagaaggcgtaacatcgagggagctataagcaacacatagcgaggcatctatctcgctgcattgacgaagcgaattggttattggaacacttagggtataatatacattataattactaagtgtaataacttgaaggacatgattgtccagtctgcaaggccttatagtcaaagagtagttcttaaatttgctcagtacactagtgctcatgccattgctggaatatgagtaaactaagttactcatttatgtactaggcaagatgcctcagcgagatacatttggcaacgtgttcctatccatgtcagcgttgaccgccttaaagacggtttaaatcacagctgtgtgattctctaatgatatctatacatatttaaatgtaatgtaattatagcccacaatttcgggaatattgttacgtgattcgaatttaaatataattaattgcatacctatattactataaataggggcagatcatacagaaaaaagggacgaaagagctgagagagagagagagaagaagtttactgattataaaaccttatttttgtatccaaaaatatctgaataagatagactcgtggactatacagagttaactgcaaaaccacgtaaaacctagtgttattattgtttctattattcttctaagatctctcatagtttctctgccttacaaaaaataggctcataatcgttaacgaaaatctgcattaacaggttgctaagtgttttaaggataaaatacattgaagggttgaacggtaaatttgt

SEQ ID NO: 24467 - DNA, 1881 bp, Cannabis sativa
  modified_base (1223)..(1250): a, c, t, g, unknown or other
  modified_base (1854)..(1856): a, c, t, g, unknown or other
ctctttctctcttcatcttcttcttcttctttcttctcatctattctatattattttatattatttcataacagttatattattattactcttaagattattattattattatatttatattaattttattatatattattattattaaaagataagataagtttatgtatatgtatatcttaaaaacaaaagaaaaacaaaccttcaaaaaaattcaccttctcctcgtttctctcgagcaaccaagaacaatccactaactagttttatttcaatttcttcagttcaaggttcagctcctcaacactatatatggacaactaggtgaagctaagcttggaaggaagcttgaggtaagttttagctctcttttttctttggaaaagtttaggttttgaaagtgaattctgcatctgtagttgttggagtttaagtaagtgcttggttgtgtttctgggttagattaggagtattttgaatgttcatttgataggtttgcttgttgtggggtgaagagaatcaagtttgagttttaagctcaaagtttgagctctcatggcagattttgattgagaacatggttttaatttctgttacattgagattgttatatgaatgatatatatgtgtcatgtaaagttttgaatgatttgattaggtttggagctagttaggagggtttaaagttaaggaaaatcatgtttttggctgtttaggatcggaattccggatggtacaaaccggaattctgtttggtcagtttttgaaaaagctgaatttcgtattttagccataactttttactcggtgtctgttttggacattctatataccgtttcgaagcttgcaacgagctctaccgtatggtgtatgttttagagctaaaatataagttttattttagcatatttgtgctatggggtttggtaggaaaaccataggttgtcctttgcctttgttaaatagtgttttgggaaaaatacttattggtttaccgttgtcgtgacatagggcgagatcatcggggatagttctccacttgggttgaccgagatgtatgaacctagattaaaggtaagaaaagtatattgtacttcatagtatgttgtattgtaatacaattagtattgttatgaattaattaatattgagattgagatatgattaatattgatatataatgaaaagatttattggttaagcaatgataatgtgatgatannnnnnnnnnnnnnnnnnnnnnnnnnnnattaggtgatgcgatattcctagcaacgtgtagatacgggcatcagtgatttgaaaattgccaatttatggcatagaatgaaaccgttgtagggtttcctcctggcgacgtgtagatatgggcatcagtgatatgaaaatttaaaggctatggcatagaatgaaactattgtaggatttcctcctggcgacgtgtagatacgggcatcagtgatatgaaaatttccaagttatggcatagaatgaaaccgttgtagggtttcctcctggcaacgtgttgatacggacgttagtgataaaaaaattgtcaggttatgacatagattaaaacctatgtagggtttcttccttataatgtatcagacatacgtacgggcgtcagtgacatatgagtaccgagcgtaggtacgggctcatctgattaagtgatgtaattatgttatatgtgggtgtcaggttatggcacgggcttgcctgattaggcaatgcaatacagaattatcagactaaagcatcaacttgccgacagtatgatgtaatgaagatggtgttgggttttgtgccctaaataaaacccatttccatataatcagatttacttattnnnaaagatcagaaataatattttatgt

SEQ ID NO: 24468 - DNA, 1655 bp, Cannabis sativa
gagtgtggaattatcgaagctctaggcactaggcagtgtccatattatggagacttggaatccaagtcagctacattcttctcaaacacaaggcagatcgaaacgaagaagccgggtttgggcatgaatttcataaaagcctttggaaacaacgcaaaacaattacaaaatatgagaaaattaatatgtacactgtcttcggatcttaattgtatagagcactataacgagcatgtacagcaagcaacctcgggtgctctcaccttgataagaaaattatcattggctctgttctgattttgaaatcaagcagtggatcccgagttggctcgatcattgtcctcaccgctaccagaggaagtcggggcaggagcaggggctggagtaggagcaggagcaactaaactgaattctgcattctcatgagcatcaccagagagagagtgaggactagagtcatcttctgaattttctgcagaaaaattgcctatgactagatgggtagatccatatacagccataggtattagattctgaaaagagatcggcataatctcaaacttgtgatctggggtgtgctgctgattgaaccgtccgggaagcttggaagtagtattgtagcaaccactacaaaggtcaaatcctattttctccacacaatctttgcatctatatctctccccaattattggatacatctgtaaatgtaagctcaaatattacttctaggcagaatattcaaatctattagagcttttcgtagtgtatgtctcacaattccaactaaaaataaatatatattttttacaacaaatgagtaaaataaatatgccttaatgaagggagggggaagattaccccacaataatcacagccaacaccaatatgagcatttacatgagggtcacgccaccattgtccatttctagcttttttactaccttctttcgaatctaaaagaatgcaccacaagcaaatcaatcaccatgtctttaatatgcagtgaatgggatttgcctcataattcatcaagttagaagtaggtcaaaaatgtacttgtgatcatgattttctgaaaaagcaaagctgacctaggcttaaattaaacattgatagttaaattaaaatatgggtgttgtatgtatctaaacatcaatactaaatgacagtcaaaaggcaaggaagagactaaagcaactcagacatacttggaatcatgcttggatccttgaagttaattttttttagctgtgcagaatctctcctaaatgcatattctttgggaaagcattgttccagaaactgattaagctccaaacaaacattcagcaaccccttcggatgcaaactttgacacacttgacatctattcatcttgtcagaagtttctactacaagacaactttcacaatatactgtgccaatacaaaggttagttacataaattttatggaaaagataatgtatgagataggcagctcattgtatagaatcattaccatgaccacaattaagaaccatggggcgaaaaagcagctgtttgcaaccagcacatagcacatcctccattgtaatttgcttaaaattccccttatgctgttctttagggatattcatttcattggcagtctcagtgccagccgtcttacaatttt

SEQ ID NO: 24469 - DNA, 1439 bp, Cannabis sativa
accaagatttctccaaaaccattgccttcactaatgaaaatcatcaagatatcaaagtagtggttaagtatgaatggattctggtggtatgtattgtaatgaatacaaatgtttggccacaaaactgaaatgtgtaggaagaaagaaggaagcaaaatcgtccaaaaaaagcaagcatgggcggagaagagaaaagaggaaggggctatccaaaaaaagaaagaggtaatagaggatgatgagggatttcaaaaagtcgagaagaaagggaaattgccaatagagaatgtggttatggcaattgtcactacgaacaatttttcaggcgttggaagatagtggtcaatgttcaatgagtagggaggaatactaaaagaagggaaggtagagcctcctattttgaatggatagaataatgagttagaacgttcggggaatcaacaagcttgctaaacagttggaggctaaacatttaatctctagaatgaaagtgggcttggttgatttacttcaaataatgcttggcatctaggtgggtgaattacagtcagctagaattcggcaatatttcaagtgaatatcaagttttgttcaagttagattgttcatttagaggtgagagttgggaagggcaggttcacggtctcatttgtctatgggttgaatacagaatcaaatagagagatattatgggaggaattattgtctttagcatctgacattaatggtccttgggtaataatggaggagtttaatgagattcttagtgtggaggagagaattggtgagaaggtaaaatcccatcaaatgaagaagtttcataattgtatcgagcaatgtgcattggaagatatccagtattcaggtacttttttttttacttggaaaaataagtaaagtaaagaggatagaatttatttgaagattgatcgtgtaatgggaaatcagatttggttgcaaaagtttacttcagctgaagttgtctttcttctagaagggaattttgaccatagtcctagaattttaacagtttatcctaaggtgaaaattgggaagtctccctttaagtactttcaagctctagatttcaaaagtatgattcagaagagttggtgtgatccaattcaaggaacgttaatgtataggtcggtgcacaaacttaagagattgaagttagttcttaaagaggttaatcgaaaatattactctaacattcagcaacgtgatcaagtggcatttcaggagatgatagattgccataaagaattatagttaaggccgttgtctggtgatctaattgagaaagaaggcattgcttgatttaagtatcaaaatactcataaagttgtgctcttgtttctacaccaaaaagccaaggttctctggcttaaggagggagacgagaactgtaatgccctaatgctaaggcacgctacagt

SEQ ID NO: 24470 - DNA, 2905 bp, Cannabis sativa
agaagccattatcatggctggcactatttatatcgtaaaagaagtcaaaatcttcaactgttagctccccttgagcgtactccatatacatcgcataaaaccctaagattatgcgataattgttcgaagttagttggaaaggagagacgtcatagtgagataggatatccttcacgaagggatggaaaggtagcatcaccccgcatcggagaatgaggattgaaaccactacattttgagtggggataatcactgggttcgtaaaagggagatgacgtcgctgtgttggcgaaggttttgaggtggttgtgtgaaccaagttcaaccttgcgaatgtttacaaatcgaacttcttgactcgcaagaccagatcctcgcatgagaaaggtttgtttaattgagtattgtcaaccgaatctgtctcgcttccttcgccatcctcttcatcctcggtatcgtgatctggcacctcaaaatcctcacgcatctcttcaacctcagtgtctagggcatgccttgattggacaagatatccttggcctgacactgtaaactcgctatcgtgcacttctacagtaactggttcagctaattcttgaaccatcctatctatctcatctatagatagctagccctcgcgagctttgggtgtaagaatttcattcgcagacatcgaggttgggatgaaactgtcgcttctccgtgattcgttcgtgaaggctccttctccagaatcatatctctggctatctgacaggtcactcatctaaaagataaaagatctttttagtgtggtgtaagtgcaattttaacaagtgccctcacccaagtaaaattccaacgaaaaaaaattcaaggaactcgccaaatatcacaagaaatggctgggtgttttgcagtgacataagggtcatgttgctacatggatattaagtcacggcaaaacacccaccatttcgagaatatagtcagttccaacaatgaataaactgcgagtcaaattaaaactaaccacgtgtcttcagaaatggatgggcgcatcctagtatcccaagggacacacccaccatttcaaagaacctaattagttccaataacgaataaaatgcaagaaaaatgacaactaatcgcacatctcaagaaatggctgggtgtttcacagtatcccaaagacatgcaataagttaatgtgacacacccaccatttcgagaactcaggtagttttagtaacaaaaaatacatatgaccaaaaagctaaaaagccctaagaattaaaaattctgataaaaaaggggtcaaaggcttggttgttggttaagtaaaattatttttgagtattcgaatattcgagaaaactcgcgagtattcgaagtactcataaaaaaacctgcgagtattcgaagtactcatcgagaaactcgcgagcattcgaaatattcttcctgaaacccgtgattattcaagttttaggtatttatttcccaggaaaatctagtattttacctatcttacagaaagcagatagtgaatcctatcatttcatgcattttctacccctaaagacccagaacgcatatggattctaaaaatagttacagagaaagtaaatcactagtcttgaaatgcagttctccttgggttattctgtaagtggtgtagcctttgaaatccgttcccagttgagagagatttaaaagtttcaaggaagttttgagattttgtaattctgagtagaaggggaaaatgaaaaagagagggaaatggataaatgattggtttgtattgggaagtttaaatactaatacccctcatttattgggatggagacatgtggcaaaagaatgcctaaagtctctcaatctaatagttaccaataatcacgcctgcacataccctgaacggttttgatgacgtggcacctcaaaggaataaaataataactacatccatcttttcgaaatccttgacaagataaccaaaagtcaccatcccgtgacagccactcgcctgcctctctttcatagtttccctcatgacatcgctgtcaatcgcgaaactatgggcatgtgttatagtgtgaaaattccatctagaaactcgagaccaggctcttataaagatgactcgtggactcactctcctcgaggattgctgacctgtcagaaggagaccactagaggataaacctcgcctgaaccaaactcattgagatgatgtgaccttgatagagtcaagtcgcattattatgcttcgcatgatgcaggaccaagaaggtcgtgttcaagattcgtatataccaagatatatgcaatgtccataacgacttctcctgcgagttagtatagatcgattctttacttagcgagctggtccaaatgacctaacgcgctcgatgacccgataaggatttacaagtcttgagttatcgacgctaacaaggtatccgtatatgcgactcgaataggacgcatatatctttacacagaaactcattagtcctacgcgcaccctaggcccgcgagcttgtacaaacaactcgcaccataaaggtcgcgtacgttattgtatttagtgaattagatcgaaactgttcttcatttattccatttacgtttttcttaatttaatgctaatattcattgtaaaacagtttgataatcaattaagttctatataatccaaaggacacttgctttgtatataaaggagtgatccaacataaatgaaagggacagaaaattcttgcaacagtagactaagcaggcaataaactgactgaaccactataattctcttgtgttcattatatgtattacttttttcaatttgtctgtgtgccttctatttgaatactcgctattctaagttaagtactagcatattttcattaaataattatatttt

SEQ ID NO: 24471 - DNA, 2483 bp, Cannabis sativa
  modified_base (1349)..(1351): a, c, t, g, unknown or other
  modified_base (1665)..(1667): a, c, t, g, unknown or other
  modified_base (1764)..(1772): a, c, t, g, unknown or other
gaaagcaaacctgaagaacaagaaacatggtactctgtcccgaacaacggtgcagctcaatctgccaaatattctcataggagagcacaagcttgtactcaacacaaccataattgaaataaaactcgagcattcgtaatcccaaaccaaattcaactctaacattgttctggttccaaagataagagaacttattctttgaaaccagacatccaaagagcaatgtgatatcatccatgctctttggtttagtattcttcacgagctctcgagcttgaatgtacgaatcttcgtaccacaattgtctatcctcagccatggaaagtatgttttgagctgatttagagttgttgaattgaactttggcgtgtgatctcgcctttttcatgtatttggcaatctcaacatcgcatacagttccttctccggtgtgttcctccacaaaactcttcactttttcgggtaactcgattgaagtgaatccatacaattgaattattgtctttcccatatcgcaaaaaaaatattgtattttttcactgtaaaatttacgatgtagatatcagcaatcggttagataatatgacatgttatttagaattaatgtgaaaaataataataataaaaataaataaataaactgacctgaaaattgaagtgattgcttagttgttgttgtgttgtgtgttcttagttgttatggcttgtgtgaggagaagttaaagcaactatggcaagtatttatagttgtaaaagcttgcttacgtggcaaaatgtgattggatagaatgattatgagttttgttatgagtattccaaatcagcttgtgttctaaggttatatatttcatcagtcaatggaatctttttaatccatggatccacaatcattctttttcatccaattagaaattgacacattagcagaagaatatatatatttatatttttttttcttgttagaaaggaatgaatagaaagaataaaaggaaattttgattgtaaattaattccttgtgacatatccttgttgaagaagtgtaagtattggttcaattatcaccaaaaatctaacttattttataaggcactatcttttataaaaaaaaaattatatttttacatttaagaattttttttacattctaaggttttttatagaaacaacacgaaaacaataaaaaaactatataaaagtaatatgaaaataacatcaaaacaacaacaaaaaataacatataaataacaataaattaataaaagtgcaacataaaaagactgtgtattctgtaaataaaattaaaaaaatcataaaaatttttaaaattccgtaaaatcgtatttttatnnntttttttttattttttttgtgtatttgtgaaataatccctatttaaattgaacaaaagtcttatattttagaacctatgtagtttagaaagaatttttagcaaacaaattttttggaaaatacaatttagtagtgctaatagttcgtgaaaacaaaaatactaaataacttaatttcatttctaaacttctaattaggattgctgatcaaatgaacttttgatatcaaatattagcaaagaactattgacatagaatttctaaacaagtttgattttattttagggtaaataccattttggactctgtgttttnnnaaagttaccgattggaccctctgttttgttaaatgaccaaaaaaaaaaaccctgtattttctaaaatggtaaaaataggaccctgaactgatttttnnnnnnnnnaaaatttaataataatctgatctaaaagtattatgacaaaactgtgtacattttctgtatctgttcgtattttcaagttggttatattaaaaataaagttgtcaaaaattaagttcagggtcctatttgtaccattttagaaaattcagggtccattttgttatttaacaaaacatgtccaattgataacttttgtaaaacacagggtccaaaatagtatttaccttttattttatgtttatatgtacaatatttacccgtttgtgaaaatttctaaaaacatatattttaaataggcaagttgcatgtttgtctaaagctcccaatatattaaaaaattaagaataattaaaatatttgattttaggactaggagtgtttgttgggaacaacttgcttaattagaaatataactaggaagctagaaagtgcatctctacgttttaaaattagtggaaaaaaagataaaaagtttaattttggcttaatagtatgttttgcaatgtaaatatgatacgacgtgatacgaaaaaaaatatatgtgtttaagcataatatgacacaacatgaaaaaatatgagcttacgtacaacacgatacgaaaatataggcttaagcacaacacgacaccacaagtctaaaagcacgacatgtaagcatgaataaattagctcgaaaatatgacacattgcaaagctcaataatttgata

SEQ ID NO: 24472 - DNA, 11173 bp, Cannabis sativa
aaggaaagtaaatgtcatttatgatcaaacaaaacggcatcaagtgaaaacatcttttcataagttttattccttttgacagaaatcgacgttttatatagtttacattattaatacgaaacaagatacaattcaaagttcaaacatatgaaacaaaaaactacatgccgtttctgcctcatatgttcttttcatctgaaagaatgaggaaattgtcagcgttacataatacatacaattacaggggcataatagaaaactacatgtcgtttctttagaatttgatcatgttttatagttgatttggcccaacatgttgtcattcatctgtgtaaggagacactcaagggaaaacgacatgtagtcaaatgtacatgtacgtggataccaagcatgcttcaagaagtatacgtggatattaagcaacctattacaagaggaacaaagtcaaacagttcattcttgtaactctatttaagaggagtcaagtatattgaaacatcactacacctacaacgttcaatttgagcttagataacctcaatggaactttcatcaaaaccaaacccctccaaacatttcaataccaacttctgtttggcattggcaacccaagttttagaaaatgaagccattaagggttcaaactttgtggcctcacccttatcattacatgttgtgttaagcctggtagccgcagggtcaacgggacgtactctaaaacagctgttgtggtttttgggatcacaaagtgttgatgaactcagtttattgtcttcacatgtcacaagtctgatatcaccaaatgaaggcagtacaagtccaagaagtggtcccctattgtcgtttgtcaatggggcttggttggatcaaaggtacaatttgaagccatcatttgaagctattgtgaaagagactcacaaagcccagataaaaaacgttgacttctgtaccaaggtaaatctcttagttttcaactttttatagtcgttaactttctcatttaggttgactttctcagttatagtttgacttttagatccatggagatgaacttgtgtaattatgttgaaaagtttgatttgttatactcaacatacacaacacatacacatatattgttactaaaaagtatcaatttaattcggttttgcttgtggtttctccctgaaggctgatgaatcggtggatgaagtgaattcttgggctgaaaaagcgactggaggactcataactaaacttctcccttatgggtctgtagatcctttgactgtacttgtttttgcaaatgcactctacttcaaaggatcatgggacacacaatttgatgtttcaaatactcgaactaaaaactttcgccttcttaatgatcaaactgttcgagtcccctttatgaccaccactagtaacccttttgagagacatctatacagatgctttgaaggctttaaggttctcaaaattccataccgaagtggtcaagactctcgtaaattttccatgtactttttccttccgaacgagagggatggtatcttcaatctaatccaaatggttaaatcaaatcctaattttttgaatcaacaatatgagctgacaaaagacgaactcactgagttttggattccaaaatttaaattctctttcgggtttgaaccgaaacagaccatgaaggatatggggcttgaactacctttccaagctggtgagcttacagaagtgatcgattgtcctattcttggtaaggacatctatgtttcagaaatattccacaagtcttgtattgaagtcaacgaggaagggacagaagccacggctagcactgctgttatatttgaaatgcaatgccaaagagtgtatcctagctttgtggctgatcatcccttcttgttcatgattagagaagagactcatggaattgtgttcttctttggagctgtgcttaatccacttctggactcctgatcctcatcttctactgatatttgtctttggttttatggttttatctggagtttaaaatgtatggtgtgctttaatatgcaacttttgatgaaaataagtctcaattataaagtacaattcaatttgtactatttcttttggatgagtgacctgcaaaccctcatttgctctttaattggaaacaactttctcaaatgaaaactaaatgagtcctgtcttactattgcaatagctgttgatgttattgaggtcaactagtgttgcttatctgtgttatttgtcttcacacatatgacctcacataatgatggcatttgggaatctttaagagcttgtcagtcacatcttgtcttttgttaatggagctttggttagatcaaaggttcaatctgaagctgtattttgaaccaattgtgaaaggttctttacaaagccaagatcagaaacttggccttgtctgttagttttgtagttaagagttagctttttcggttaattcttcgttaggaattggattgcagcctaattttttgtaactaagggtaactaatatggcagccagaaaatgattaatattttctagtaatattagttggaaattgagaaaaccaaagagattataatagtcacaattgatgtaatgctccagtatgtagtcgttctcagtgacagtggattcaactagaggctgtgtatccctgccttagaaaatccaaatcaattatggtcctgtgtgtgtttgtagttcagaattgtctcaatacaatattcattttcaagacttatctcatgtttactttctttcttgaaataaacagggtgactctgttcttgtcaattcattaagcaacttgtaactttattcttaattaataaatacatacttaagatggaatgtttctgttgttgttcaaaaagatctgtaatttcatatgatcttacatatcctttgttacttttaaaaaattgaagctctagagggagtgaactctgttattttcaacaatcataatatacaaaaattgatacatcatacatcaaaggcttaaactagacattggacataatattttagagatatctttacacaagtttgaatggattttcatctgttatttttcctcccagttgaaaaaaaattgtactttactttgatatgccactttttggtgtatgataataaacttcaatcatactgtattaaaattatatatttatataatgcatacagttttccaactttgtaatttgtaaacattgtggtaagtagccacagaatccaagttatgatgaataaaaaattgacttttcaagtgtaattgaattatgaactgtccacatgtacatgacagacatctctctctctgaaactttatctaacacaactgtgcttaaattatatatttcctaaacattgtaaatggtaaacaagtatatatatattttatatatgtatagtttcttaagaatcatacttctatagttttaccatcaagagaactctgctgagttctcaaaaagtagagtaaaaactcattccaaacatcaatggggccaggcaagcaccagtgtacacagtctgctaaagtcatattcctgtgtggtgagtgtccatagaagttaggatgtccatcaggtctcatcaacatagcctcagttgtatccattagcttaaactccaaacctcttttcttcccaagctcttcaaaaactctaaattcctcaacctgaggtgaatgcatatcccatatgtactgatcaacctttagttcttctctggcaaaaggcctagtcctcacacagttccctccctcgttccacgctccattttcgaagtgagaaggcgaaaaagtcctcaaaaaagtaacccccttgtagttttcaaggcctaagagagttctaaagacagttctgaaggccttcctgtatgcataataaggtgtaaaggttgtgaggttgtcatacttacaagttgagcagccgatgaggctgccattctcgtgtaacatggttggccgaaagaaccattggccggccgagacaatcacatagtcaaacttctcaacatcatttaaccaaccctcattaggctcatctaagtacaggttcatctgactattgggtgagtagccattggagtctgactctatggatttgaccagaaatggtgcccaaagtgttcccatagtaaagttgtaatcagggtagaaatagcgcttgaaataagatgtgtctgtgtaatatctatctgataaatcttctggatatgccacctgcagaaaaaaccaaaaaatgttcagatatttttattgttataaagaaaaatgtgtactattattaccacatattctttctttctttcttttgaatgcttactttggttaaaaggcataacaaagaatgcatttgattctttccaactgaatcaccaagaaaagctagtgatttccctctaacaagctctaaaaactgaacagcatcaaacaaaggaagctcacactcatctggtttccacctccaattcaaaaactccttattgggtctcccaaacttgagacaattctgctgatcaatgatcaaattacaagtttcattggtgtagtaaggctcatcaaaatatggaacccaagttccattaaagacattacaagtcttgcttgaatcatcttcttccaagctactgatatcatcactctcagggggagacaataatgaaaaaggagaagtatttcttagacaaaatgggattgtagttaagagaatgaagtatagaagtagaagaagaaatttcttgagtgaattgggtggtgggagttttccattatgaaagtcaggaatggtatgaagcttcatggtggatattgttgtaccaaaaatgcataagataaaatgaattcattttagtatatatgggaaggaggaggggtgttcagtcaacatacatgccttgtcagcagtactgagttaatggctattgtcctttggacaatttattagagttaattattattcataataatttaatataattcaaaacagcttttcttcttttggattgacttaacaaccagatcaccaccatgtccccaacttcatttatttttcggtgaaacatcattattcataattaaatatactaatcttcataaaccatagattttaattatgattaattggactaaggaaattgaagtaaaacactctaatatgaatacttcttgcatgcacgtaataagttgttcaggatatttaaaaaaaattatataattatttattatccaccctagtatataattttctcttaatcacatgtttattttaattgtcaaagcacataatatttaaaaatgtttattgcaaataaattaaccaattaaaaagtcttattgaattgaaattatgctgtcggtgtccttgtataaacaggggaaaaatactcctttcgttttagaacaattttttttctcaatccactaattgtgtgcttttctcttttcttaaaaagtgtacagagaatctgtgctgttttgttcatcaattgattcaaattctaagtgcttaaaatgataatatataattatatcttgttgcagccccaactgcttaatagattcctaattaataccttttcttatcactaccaacaaaaaaatgtgtatatttttgtataagtgcagtactttttacatatatatatatatacatagaaaaaaaatgtgtaatgatgattaatctaatcattccacaatgaaaactattgtggcattggaaacacactaatataatatatttacatattacaggctggtttatcacattgctaataatattttatataaaactaagtataattgagtgtggaataacatatattcccttaagtgagttatgttcctttattcttctttactttcatccacttcaatttttattttattttatttattgaagcaatcattagggtgtgtgaagattggctaagagtcacttcaaggttgttacacaaacatttaatggggccaaaaggcaaagaaattccattatcttttttatagatatatacagtgtcaagttacaaattggcgtggcttaagagtaaagtcctccatcatttccaacttgaattagccacaccccttcttctcacactcacaactgctcacatattaaatatttacgaccactcacaaagccagaattttgtgacagcaagaaaaaattatacaaaagaaaaattgaaattgtaggagggtatgtatgaccaatttgaaaagaaaaaatgaaaaaaatagttaaaatgaaaagaaagagttatataccaatttgatgtaacttcaaaatgtaacatcattagtgtgtaatttggtgcacaacatttagtatccttggggttgaataatgtgaagattccacatcaatttagtataattgtgtatccttaaagatgcttgcaattcaatccaattaataattgtatttagaaaattatcattccatataattcaattataatctaaaatctaattcaattcaactaagaacgattttttaattggattttaattctacacttaacttttaatattaatttaaaaacattataaaaacacattaaaaaaatatgtataagtcttaggtttttttttaaggatttcttcaatcaagtataatagaaatgtgggtctcagtgcaattggggtaggccgtgggggatggtcccgtgtattgcggtagctctagcgacgacctcattctttccacacgtgacggaggcatcaactcatgttgttgtgtctacgattagggtacaactttatcgctattttttcagtttgcttctgctttgttcaagcaatcaataagaaagataactgttagacagaatttagtattattgtttaagacaatttttatgtatagcattctttttcttctatttctcttgattattataaaagggttcaaaatgctatgactcatttcctcgctcgttcagctttaactcttgagaaatctcaagtttgatggcctgatttagcatcttgcctctaatcctagactattattgtattaatcttttgatcatggctttgtgcctttaaatgaaattttcatctcttaaagaaaaagtataataaactctattgggaaattaataaataaaaagtaaaaatgaaatttaaatattattttattatatataaataaatatagtatttttaatatatattatatatgtttaccgagttttttagaaaccgatttaaaaaaagattaagttgaaaaaataaaattaaaatagacaagaaaaagttttttacgtgattggggtgttaataaatttaagtccacgggtcaaaattattagctctgaagttatgaagtatttttcatacaagcaagggcagagctaggactaaatattagggggccaaaataacaagcaacaacaaaagtagagtttcatgtttatgaattttggtgaccaatgtctccatttcaagatagtgttgactccagcctgaagggtcactaacttttgtaggaagtcgtagagattgtcagatttctttctttttatttcattccataacagagatctgaatctcactccatcctgaagggtcactaacttttgatcatcgttagattttgtttgtaatgatgcttccttcattatttgaacataggacttggggcttctttttgttgccgcttgatgttggccaaagaactgacctccatatcaaaatctctcgcagccacaaattgctttttgaacatggactgcaagccatgccatttttggacggatcctactagaagcctcttccaccattcttttgcggattttgctagagtgagagggaaacataggtattttctatcatcactgacatgcgctactttcataagtcggtggtagtaggataagtgaaccatggggtacgtcctgccctcatacaaatccatatgaggcatccaaaacctttttggaaacacatcgtctaaaatcctctgaacacaaagctccaaatcttctgagtcagatccgaatccactttgtttcttgagcagcttttcagtcttagggccacaattttgtcttccagtttcttagtgtgatccctagggagatctcatccttgcatccgatcattgattttgtttctcaaatcacctctgcgaggcctgatcctttctcctcgcgccttttctcttcgtgcactcaagctgtccttgaggtcagctacggagtaaacatcttcaagatccagatccacgtacaatattgtctccttggttcatggaggcactgccacgttttttctttccatgggcgttaagtcctggtgcctaagcatgggtcttgacgctctaagagaccctccttggtggattggttgggtgaccttggcctggggtttggtcagcccttcattttcataggtttggttgctcgcacatagatcttggtgggagatttttcttctgagggccgacaacaacgactttccttttatttcttgattgtgagggtcaggctccaagatggttgagccttcttgtagccactggagcgtcttcattaacacgaatccctttcaaggaacttggtttgtaggaggaatatctaggttaagtcctcttgccgctatcaaggcttgcatctgtaagagggtctcctggatttgacaggtagcttcttcttattcctccatttcaatttcctggtctaagagttatgccttaaccacacgacttcagggtcttactcatagtcttggtcataatctcctctttcatcttcatcatcatattcttggccctcctctttgagagggttttcatcatggtgttcttttggatgatgatcgtttcgaggaggtcaaccttccaaaattgacgcttcaccgtctctcgcgacggttgtctgagcatccactggaggagcttggtttaggtcattagtcacaggggcttctacgttgttgcgagcagttgggtcgcttagtttcccactcgttgctcttgtggttgccatgtttgtagatgacaaaaattgtgaaaactttcttcaactctcaatgaaagcaccaaaatatttaccgaatttttcaaaatccgatttaaaagaggattaagttgaagaaaataaaatcaaaatagacaagaaaaggttttttttacatagttgaggtgttaataaactctattttacgagtcaatattattagctctgaagttatggagtatttttcatacaagcctttcttatttaactttctaactctttgcatgaagggagaatatcatatttatggactctttgtgtaattggttgggctgatctcgacccattaggatttgtagattgaaaaaagcccactgacgagataaattacattaaaatattaattttgagcctaattgaagaggcccacagttggggacaagcgtcatccgtacacgtaagtacgattgatggtggtagttgggcttgagctgtcagtttgattttagaatgtcagagtagtgggcgttggctaaaaaacgtgatctacattttgttgtgcacctttccaaagcctgacacaagggacaagccatttaatttcttaggattcttgtcaaaagcgtgccacgtaagattgtttttagatactaatacatttccagatacctcttcaactactcttcccaaatgattcatgagggcatcgatcttcgtttctttggacactcgttgatagagcaagtgtttgcccttgggactatacatctgacttagttatcgggaagcaattgtggaattcagactctgttcgactttactcacgaaccgagtggtcaatccaccccagcttattgaataggcgtatcgtgccaaatgagccaatttaaatatacacgtaacacctatccaaaaatacggataacaatgtatagtttgtttgagtttgttttaaattgaatttcggaagtattattcaaaaacaaattaaatccaattaaaatcaaactatttacatcaaatccaattcaattataattcaatatccaactttttggattgatttacatcctacccgcccctaatataacccatgtaaactaacagaaagtacactaaatttactttaagcacaaaatacgaagcacatagtcatactcatatatatatatttatatatacgtataagacactatgaatagagctagcttgataaaatttctttggacttttgcttgtggcctatttatacaaaaggggaccaaagaatagttgagaagaaagtgccaatagctttcaataaagttctcttgtcggcaatgttagggttctattctaagtggtgggacttttttttgcttttttttctggtgtgtaaaagtggtgggacttaaatttgatgctaagacaaggaaatttccacactgatttatccttaataaagctttaggatcaaacaaaccagatgaggttaatccaatgctacaactaatacttattatctaattggtcaattcttgatttcaagaagagaaaagggtatagaacacattacctcatatatgtaagtgaataagtttcttaatttggtacatctaatttttcttttccctaccactatgacctcatttacgtttaaaataaacatagttatcctttttctatgtatcattaatcattttaaaaagctattaagataacgagaagaattttagtctttttatatatgtgttcatcaagattggatctccaactactacacggaataaaaagtgaccataatataatctttcaattatatgtgacatatatataatcataccattgtgagtgtcatgagtactcatatagaagtatcttaactcaatagttcaatcattgtggtataagcttctttgtcaaagtattcttccttcagagataaatctctttcatttttgtaagctgcaaactcagtctttgtaaggaaaatgggtctaccctcaatgatcatataccagacaaatgattatattcaatgtttacatatatgtggcttctgttggaaaaaaaatgaaattataatataataattgaaacttgtaaagaaagaacactactcaagcaaaagaattcgtgtacataccaaatttatgacaaatcaacttagttatgatttgagatccctttcaagcatagcattcaagaaaaatg

SEQ ID NO: 24473 - DNA, 1516 bp, Cannabis sativa
  modified_base (1346)..(1346): a, c, t, g, unknown or other
aaaatgcatattataataggattgctattagacactattggtgtctaacacctctagacatatcgtcttgagatttgttagcgatattctctaaaagttattacattaaactatatgaaatttaatacttaattagaccaataacagtattgacacataaacaaatactagacactattagtaccctctaacatttctcatattataattgacatacattttaaaaatatatcaaaatatgacatatcaaggctcaagagagcatacagagccttgaacctgtaagaatctatattctttgtgggcatttataatttgatatgataaagattagtttggactttggatctcctttgagatcaacaattttttcttaaagatgctacatgcatttttttttgtcccctccaaaacattttgtgagaaatatatatttataaattgtgggccgtatttagggtaggacggctgggatcattgcccaaaacttcttagccaagagattgggagactttttttttttttttttattagtctataaggctcccaaacctttttttcttctaaaaaacagttttagaaaaatatttaaattttattttatttcttaggtcatctccaatgggacactaaaacactaaatatagtgtagtttcacactatatttactccaatgagacactaaacctatcttcataaatggttttgtctacagtgtcctaccaaatttagtgggacacggtagaccacactattttttaaaaaataatttttactaattaaataatactttaaagaaaaaaaagtaaataattatatatatttagtattaaaatattcttattatattaataaaataataaaataataaaaatataaaatgtagtgtaatgtttggtgttgtggttgaaattgaaaaaaaaaatagtgttgaaatagtagttttttggtgttgatttaacaccaaatttaaatttccctattggagatgccctcaaataaagtttattttgaaaaaattatcctaggccccataaaatttagaaaagacttcatacatagggataattacataaaatattattttctgtaaaaaaaaatatatatatatatttttacgtttaaaggttttttttaacatttttacgattttttataaaaacaacacgaaaacaacaaaaaaattacaaaaataataggaaaataacatccaaataatattaaaacaacaataaaaaataacatccaaataatattaaaacaacaataaaaaataacatacaaataacaaaattcaacaataaattaaaaagagtacaatataaaaagaccgtattttttgtaantaaaatcataaaaatcgtaaaaatgtttaaattctgtacaactatatttttgtaatttttttgttatttttgtgtatttataaaataatctcatattatataatgtagggatatgattttgtctcgtgatgtactttcacagaatgtattccgtggtacattagatgggt

SEQ ID NO: 24474 - DNA, 5080 bp, Cannabis sativa
  modified_base (300)..(301): a, c, t, g, unknown or other
  modified_base (4179)..(4180): a, c, t, g, unknown or other
tgaagctgctctcactgatactttggctactactcccaccaccatcacacccactatgaatgatattatgcagaaatcttatagttctgacgatgttctttaggctcttcatagcacgagcacttgataaaagccttgatcctgatggcacgtctatgatgttctttcactacaaaaaaatgtcgcttttaccggcacagttcgctactgtgctaagtaactcttatcagcgcatttcgcaaattgcgctggtaaaaaggtcaaaattttaccagcgcatatttgcagtggctaaaatcnnacttttaccagcgcatttacgcgctgggaaaagttatttttgccagcgcttttcattttatgctggtaaaagttctaataccaactttgatttgccaaccccttttgccaacacatcagaagttaattctattttaccagtgcaatactaaacttttgccagcacaaaaatgtgcgggcaaaagtaatatttcttgtaatttattaatcattggtctatggtgggctctttagtgactaagggagttcttgatattcttaacaaggtcggggacccttctggcatcaataatacctagttgacttttattctaaaagtcaagaatcctacaacggtggctcaatttaggcctattaatttttgtaggctaacttagtttctaaatttaggatcattttacatctcagttcttatttttttaagttatatgagactcgatactcaattacactaatagcgacgatatgacatcgaaaagggtgctagataccaattcttttaacaattctctttaaaattataaaacaagtcgttgggattagatttagtaggtcagttttggaaccaataataagtcttgacttttaagccttaagaaagaaatggatgatggcttttttcttaccaactcttctcttatttcatttctcaccttctggtttacgcacatcagatctccttgatctttacatattaataattataactaattaatttgtagatatggtgcaaaatgctaaaaggatattagtgttattatgaagttatactcttaaaatataattagctattaatatttattataaaaaaaaattgttaatcatttacaaagaatgtttataagtattaacaattattagatttaatatatgtaggatccaatacttcattttattatatttatgttatgactcctagtattgatagatactatttgatgcttttaccattgtctcaaatttgtgaccaaaaaaatataatatctcaaattcatgatttaagtttttgtttgattaatactataatacaatcttttcaattgatccttaatttttattttttggttaaacttaaacaaggttttatatttttatccaaaactttattttctctaagcacttagaaaagaaaaaaaaatggaaatagttttctaaatttatttaacttatagtttctagtaaggtgctatttttaatagaaattcacaaaaaattgtatctttacaagtgaaccaaagacctttatttatagtatttaatttcacacatttcgaaattaaaactcataatcccatggatgttatagacttaagtataacttatgcacacaccataactcctatagtattaaaaattttaattaaaatgtgtaacactttttttacacacttaatattgatgataattgtaaaagttataaaatataagtaactcacctcttatatatgtttcaaattatgtgaatattacatgtatataacccataatcaaattatatatacatatattaatttttttattaatatataatatatcacattttaatattttaatttatcttatattataacaaatataatataacattcattatatataatgtgacgcgttgggggagtagtaaacagttttagcatttttcttatggaaacattattatatttttctatataaaagttatattaattttttttaaaaaattatatatctcatatacaatatttttttaaaatgaaacttcatatacaaatatataaaactatcaaattttaaccatgactttattttaaaaatagatgatgatcgatctctttcataatatataacactacctactcaaatattcaccatagaagatatacgtagatagatatgatgaatgagatcatgctctttcgtcaacatccttcaatttaaaataaaattatttaataaaaaaagaaaaataataaatatacattgacattaacattgacattcaccaaaccttaaatcttaaatttgaaaatgttgcccatttattagtcttttttgttccttgaattgatgatgatgagtttcatgcttaatattataataaaatatgagaaaaaggtactaataattaatggatcttcatcaatatttaataggcaggaaacttcgggtttctttttgtttgactatatatcctaaatcaacaaaaaagtcacatatatatgtttaagtcatgttactgttcaaataaacaacaatctctactttatttatggtctattttccatttttctatctaacaaaattatttgagtacagacctataaagtgctggcttttaacaaacatttatgaacactgatttttcttttgacaaatgaaatttccacgacattaattatcacaagcagatttcgatttcccaactaacttgtaattataagttaaatagtatgtaaatatatattatataataaaaaatgagaagaaaatgactattagcattgtacaccagtcttatactaattattagtgtgttaattataataattttattgcaagatttttaataaaaaattcgaattaatattgatgtattttggtaaaattggtatactaaatttaagtattagatgtgttcgcggcgcgcgcgggtaatgcgggttgtaattttttttctaagcaaatcatatatatgatttttgtaatctccgcaaccgcattgtaagatcttaaaactgtaaaaatcacattacaaaaatatagtgtgatgcggtgcggtttgaacggtttacactatatcatcattatcgaacattataattaaaatttaaaaatcaagctataaagttttaacaataaaaaaaatattattaaagttttaacatcataacatatatactaatctttcagtcagtcattatattgaattgtctctaaaaaaaaataatgtaatatatacatatattacatatatttattcttatgtgaaaaagaataaaaattataatgtaaaaattaataattttgtaatatataatacggtgtagtttgaatctcaattatttaattcaaaatcacaaaccgcactgcaccgcgtgatttaaaaaaatacacaaactgcaaccacaccgtaaaaaatttaaagacatattttttattcagtatgatgcggtgggggcgatttgtgttgtgtgagcagttttatgaaaacccctactaagaatatcaaaattaattagataggccactttttttatcaaatccaaaaatagccctctcataacgcacccctcctctctcacttcgtctattctctcggtctctctctctctcttcttctcacacacacgaagaccttagcaacccacggttgccaaccaccgcgcctccaactgaagaccaccaatccaccaatgaaacccaagacccaggatctctgaaccacgaccaccgagccatgaatgtaagttttccatttcattttattgtaatattctatgtaatttatggttaaatgtatgactttattcatagatttattgatttagaaataaattgtatgattaatgtctgttatctgtgagtttgaaaattatgttttgtgtttagatagataaattgacgtgtgttttgagattttagaggtattttattgagagaaaaaataatcaattcttcctagacatattctagtcaatcaatcaatggttaatgtttgagcatccgtttgtgtagcattgtatcaagctcctgggcaagaatagagctacctgcatcagtgtgtgaaagtcattttttgagtaagttggtattttgtaataggagtttttacaccacatgcttaaatttctaacttttttacttttttaatgtgggcagaattttttcaaaaatactgtnnaagttttatactatgtactgtgttaagtttcactgttattccgtgattattttttagttgttccactgttgttttaattgttctgttttcttgttttccagtagttttataaaaagatagtatttttgtaaaaaattctgtataatagtaaaattgtaaacttttattcaaaatctagtatttttttgtaaaatcccttatataataatattggaagcccaattttaattaaaataaatcataatataccttgagttggatgtgttatgaacataattacattttttttgtattttttgtgctagaaattggttcatttaagatatactttagtcatatgtataaaagattggagaatttttatttttatagtttttaaagtataagtttataaaaatatgattttttttctcaaaaaaaattattttgtggaattttttttaaaaaaataggttaaaataatataaaaaaatagcataaggtatctagttattctggtttttctatatttttttttttcaaattttctataaaataatctttatttttgcaaaaaaaatataaaatctataaaatttataattttatctaaaagaaaaaattaaaattgagttcataatattattatgtattattttaaaaaataaaaatctaaattattatttaataaaataaaaaatcaattcaacaaacttttacaagaagtaaaaaatattatttccaaaatatattagattttttttttaaagtttttcttttgttaaaaatgacataattttttcttaagaggaaaaataacataagttgaaattgaaactcaaatcaatagcgcaacatgtgaaagttaagtaccaaacaaaataatattcttattgggctaatgttgtaacattttttttt

SEQ ID NO: 24475 - DNA, 2133 bp, Cannabis sativa
ccttaagtttgtcccctttcttggggatggatagaagttcgtaaaaataaagaatttcagccggactgggtggggcccagctcttggcagcataaaaaatgtacaagcctgaaagtaggcgataagtttgaggaatgagttagtaaggcgcaaggccaacaaaaactaaaaaatcaatgaaatagtcctggtgtggtagcatggccccggacatgagctgggtttgactctaggccccaaaactgtcgcaattacggttgggcgtttgtttgtctctaggaagatggtgatagactccagatgcagaaggtttgatcccggcaactgtaactatcttctccagttggtgggcccaagttaaagttgagtgtaactcgtctgcctcctaaccagtggatcgacaggtgtaattctcctggaccacgggtcctttcaccacctcctccagagtggttaaggtctcggaacctttgcctgaagacttcgctccggttgcagggacagacatgcctggggattggtaaaatgttgaaatttcttgatcaaagctaaagaagccgtgctcatgaaggtcgcggagaacctcactcatctgaaaaagagaaatccagcagttagcccccaaaccaaaccctaatgtaaaatgagggaatgggggtcccctaaccgctggaaggaagccccttctggatgtctgctagaaatgagaaattcaaggattctcctaagcaaacattgggtgcaaatatcccaaaggcaatgaaagcagagaaaatcaagaaaaaaggagaaacctaagtatgaaaatcatttcatactctcgacagtccctaagtgaagaagttgttcgcaaaataaaaaagaaaggaaacaacgaaacacaaacaagaaactacgacgcatatggtcatcaccatgaccgtttcactgtagaaatcaaatacgactaaaggcactgccctaaactttgcccaaacatgcaaatgaataataaaagcgaaatgtacccagaaaacttacacaatggtaatgagctagaattcgatgtcgtctgacgatagaacttggattggcaacgacagagaaacagcagtaagaaatttatggtttctggaattttctcaaaggggttatttgggttgaaatggcagagtagcgagagtaacccaatgaagggaaaatgtaggcttctatagaccagaaagggtgcaaggaagctgagatcagacaccatcgtacggtgggaattggaatcgattcgcattctatgatccaacggatgggatgagtgggggtaacgaggagaaagggcggttagaaacgtttgagcacctctctgacaccaggattaaatgcgttggtctatcaacagacgggaagcaaatcgttgcctgcaaaaagaaataaatattgatgattacagtcataaatgcagcccacgcgcttagggcacgtgctgctatataaataagctaaccggaggcctggtacaagtctcattaaccattcactaagtgggacttgaggggtaaatgttgcctcagatttttcccaaaatacgtggcagcggccgagggtgacacgtggacctaaatcaattaagtcttgagcaggtaagtacatctcatggagtgagcctcctggagacacgtctttactctctaggaggctagaactgtaacaaggcatctccaggaaagaaagagattgtttgaacagtcactttgcatttaatgccgcatggggggaaacatatcagaacctccataaaaggatttgacagatggcgtaagccctttttacggcgatggcacaacaatcggcgagtttagtgacgactacattatgaggactcacatcaatcaatgaaagataaaggattatatccacctaacccctaagatacctacagtatgggtcatgtatttcctattttgtatctgttaggaatttgtgcccctaagaggctaacataaaaagacaagtgatccctttctagggatcccctcgaaaaatactataaataccccatagagagaatggaaaaggggtcgatcaattaattaaggaatcaaagagagtaaagaagagagagagagattcaccaaaaacattctctgtaaaaacactctc

SEQ ID NO: 24476 - DNA, 2394 bp, Cannabis sativa
tcgtaataattaatacagtacattgcttaatccaaacgtagtgttatttattatttaatacaatacgactcttatacggcgtaccaaacgagcccttaaagaagttgaaatggattataaacaaattttgttagaaagaatgtagaatgaaagtgacaaaattggatgtgaaacagtcattagctatgatcatatagtcacataattttcttgtagcttttttctttcatttattctttctctagtgtactagagtaaacctaggatgggacctagacttagaattctataaacgatagttgtattgacataaatttttttttggaattacgataaataaatttgattgttcttgatgttcatggttgtaagttttcttgttctttactatgttacattgagttttaatggtttttatgttgaatttctcaataattaatcagtcttaattgaagtgcctaaatgtatcttgtatgataggcggaggaccctagttgcaataggaactcatgacatggacaccttgcaagccccattcacgtatgaggtatgtgttatcttcttcttcttcttcttctggttttatgtgattaatgtgtttttaaagaaagatgcagcttgtatcaatataaacaatcagtacacacaatcattaggatttaggaaaaactccaaatgaaaatagtaaacaaaatatgcgatttaattttatggtttttcatattctttttagtctccaaatatattttggatatatcttcccaccagttcaagggcatttagcagtgatatctgcaacaacttatatggaacattgttgtttgtgtttttattcttaactaatccttgaaaaattcaggttgtttttcatggtacattaaaatatgaattataatttcttgttgagcacccacccaagtgtgtgtgtgtgggcgcgcactgtttctcatttccccaatattagagaatgaaaaagttatctcgtttgatttttaggctttgtattttctctgttttgaggtgtacaagtaggttaggagctaacagttttgttctttgttcaggccttgccaccttcaagcataaattttgtaccactaaagcaggtgattatatctgaacactagattctaccatctctttcctctttcttctcctttccaccaaacattttctgagtcttgaatctcttgatctgcttctttctccctacttaagtagcactgaaaaccttaaactgggatttctggaaattcctagaagtaacttgtctttgacttttgcattacagacaagaagcttcagagctgatgaactgatggagttttacaaagtgagtctcagtttaagttatctttaacgatgggcatgtatttatgctgttatgtaggttaataatgttgcacgttttttttttggtagatattttattgcatatatatatgttttatgtgatgttcattcttgtatagctagtaactccttatatttggttcatgtttcttcattatatttctcagtcagatttaaaattgaagaagttcttgcacataattgaggactcaccagtgtaccctgttatatacgatcataataggtacaatgctgtttatgagatttctattattggtttcattatggtctgtttgtctgtgaacctcctttttccactttgtttttctttccccctataaaatttatgagaaatatttcagagaatttgttatttacagttacagatttatgagggttgtatgaaattgagatcacctcttcatattggttcacttcatggatgatgtttatctttctcaaccttctaattctaatattgttataggtgatgtaattttatttgtttggcagaactgttttgtctttacctccaattattaacggtgctcactcagcaatcacgctaaaaacaaggaatgtcttcattgagtgtactgccacagacttgacaaaggccaaaattgttttgaacaccgtagtatggaaaatatttctgagaatttgtttgttatgtaatatttcttaactgattcatgttcataatacatttttattgtcttttcaggttactgcattttcagcttattgcgagaaaaagtttgagattgaaccagttgaagtgacttattctgatggaaaaaagtttatatatcctgatttatccatctacaatatggaggttcctttgtcatatattaacagtgcaattggagtctcattggaggcagaagaggtatgcggtttcttatttactttatttgctaaggtgtatataactgtaatatctttgtccatgctgagtttcagaaggcagtggcaggttgctgataaactttgtattatttaaagaagcaaataatttatttcaacattctccaa

SEQ ID NO: 24477 - DNA, 1549 bp, Cannabis sativa
ttaataaaagagaactgcctatcaatgcatagtaacttaaatttgtacagaataatgagatttttttttggttagggggggttgtaaaccccagttcattaaaaacggcaaagccgactgagtacaacaataactaggaagacttaaacaaattgaaataactgaaaataaaattagactggaaagaaaaaaaaacaacaaacatacacctccacatgagggacataactaagatcttaaccaacattaatcgggggaccattcacggacatttgaaaagatattcgcatccatggttcccaaatcaagaacgccaagtgcactgactgaagcagcccattttgctgagttgtgtgccatgaaattgcaattcctatcaatctttctcaacttgaaatcatccaataaccggaccgtgctcttgaaacgatctgccactcccttgatgtcaatattctggtttgtattgcaaatgttagagcaatttgcgaccaccactttgttatcacagtagaaaacgactttccccttcaaattcacccttgcaaactctgctgcactagccaaaatggtagcttctgctaacgtagggttcgtagtagagaacctctccgagtagattgccacaattctgtccatatgatctctaaacacagccgctccaaaagattggtttggctgaattgaaacatcggtacaacagttccaccaacctacttcagtaatccgcttgttcactctcttattagcattcgatttccatctggacaggtgatcattgtataaccgattcactgaattgatgacctccattatagggcggagtctcgttccgtgaaccacttcatttcgagcttcccagattactttgaatatacagagagcacctgtcataaaatcatcaaacgacaagtgttgtggtctatgttttttgtcatggaaccaactcatccaatctgtccagttaagacagtttaaatgatcagctctcattccccacagactgccagattgcctttgcaaaatagcattcccagaacagatgtaaagttgtctcctctccctcttcacaaataggacattcacgtgattggagagatatagctattctaatcttttctctggttgggagagcatctctcatcagttgccaccaaagcatcttcaacctcccatggataggagaattccatagaatcttccaatcccaattggattggtcctgcaaagttgagttcgtcaccaacttatacgctgattttaccgagaaagtgcccttaggatcacctaaccacctctaggagtccggttggttttgagcaggtagctagcccaatgttcaggatgtttcttgagtccctttcattgaaccattgtcttaccctttcttcattccatgacatattctcattgataaaatagcttactaaatttgctccttgggttgcatccaacaggggatgcggcatgtgttctccatttggcacccaagcattaaaccaaattgacgtagatctgtcgtcaatttaatcagatttacttattaata

SEQ ID NO: 24478 - DNA, 5189 bp, Cannabis sativa
  modified_base (2075)..(2091): a, c, t, g, unknown or other
aggaaactaatagctagaaaaacatgggaatatgtgcttcttaaaaaaaaatgagcacttaaatatggaaagtttataataatatacattttttttatctaatttacaataataacgttactgttattactgaagtgcatgcaacgtcagccaaatctgatgtttctgacactttctttttattttcctgcattgttaaaaataacttttgtgtaagaaatcaattagctacctttatataaagaactttatttatatatcatataatttgagatatattttggttactctcttaaaaatttatttgtatatattttagtaactagttagtatttctaagttatattatgatagattataatttaaaatacatttaggtaactttaaaaaaatattttcaaaaatgagttgtcatgtaatataacaagcatcattgttatatactgattattctataattcaataaaatgaatgttaacaaagatttgaaaacaaaattataacagtaacatatgtttcccacattttgaaattttcacattgaatagtagatcgcaatgatatttttagctcatccgagtgacgccatcagaaattatttttaaaatttgagagaagagagaaaataagaaagagagaaagaagaaggagagaaagagagtaacttaaagaggagggagagagagagagagaactttaaataaaggtattgaaacatacccaaacaaataaaaatgcatgttattgaaacttaaccaaattatttttgaaaattagataaaaaataagtcattttagataattttcctgtaaatattaataatatttgtaaattgtaatgaattaaattaaaaaaaattacacaatacacctatatatattgttatatccatattttgaacaatcaatatggttatgatacgtatggagaagctgaaaaataaactagctcagattgtaaaaaagtaaatacgttcaataaactagcctcggaaaatacaattggtagaaatacttgaatttatttttttaaagataagggcgagccatgaataacaactaccattttgtaagaccagcgaggtgaacaatcaacgcagaaggtccatctcgagatacacatagtatacaacagaacgacagtaagttggaaagagtaggtaatgagttctttaagagcttgcaacttattaacccacatactcgtgagtatgttgaaagactaagggatatacataaaatataagtccactcggaataatcacatgatgacaacatctcacgtagatatactcagtcatcctcaatattacagaaggacgtgagaagaacttcccaagatcatacttagacacaaaaagttatcttcaaactaaagcatcaaaagatgatcatttgtgttccgaggtgaagaagcgtagtcagtataaccgcgtatagataaagataagagtcattatagcggttatttatttttatcccatgtgttataaatatgaaatatggagattgtccacgtttcatgaacgattacgaagataagatcctaagggaataactgtcatcctaaaatacttataaatagagggagatcacccaaagatagaatgggacaaattaactccacaagatacaaacagaaaacaactaacttcttccttcaacaaggactattctaatatatatatatatataataataagtgtacatataaatacttatatgagaagtcacttcaagcagttttttttataatcttacttattaaaagtaacttactatataattgtgtctcatatttaatgcatattttatatatgtgtaggtatcattactcatatacatatatagtggaaaaatacaagtttaatattgatgttttcattaaattctagaatccatatacgtagattatgatacactataaaaaacggttatttttagtgataactttttagtcaaaatataatttttttgtgactaacaaaatattacttgtaactaaaatatagtgtttagttataagttctcattaattaagttttagtcacaacaagtattgtgactaaaaatannnnnnnnnnnnnnnnnttgtaatttttgtgactaatacatttagctacaaataaaaatgataatttataattagtcacaagttttgttgtgactaaaaataaaattttttgtagtgatatttttaaagtattcttattattttgatttgatggaaaaaaaagtattcttattattaacatatgtttaatagagctttttttactatatgcatcagatcgatctatcaactcagacaattactttgcacataaatatgacaaaaaaatttatttgaattaggttggagctctgattcaaactatttgaatatttatcggattttggtctgcccggcctgcatcattttttttctggatcagatttgattacatccaatttcaatatattataaaaaaatattgaatcccaaatgcctaatctaagaagtgagatatctcgactcgatctcttctgaagtatcacaaatggtttcactacagaatagtttaaactgatgggtgtatgcgattttctggttttattgatattatggctgatatttgagaagaaaataataattcatcaatacaagctctttgtctctttaatgtactcattctctgttatttgatacataatcttcttttcaaaacacattctctaacttgatatatatattacagatactgatcatatcatgttagtatatattaatcccatatatttccatcctaagtagtcgatcataaggaacaggaacttaaggcctttcgtactttcattttgcatattatacatggtatatatactgaaattattatttcgaacttagatgcgaccacttatatatgtatgtcactcaaagcaaaattattatttttattattagttatttttttaaaaaaaatgatttaggaaaaaaaacactatatatatataaaaaggggttcgatcagactcgatctgaatatatagtagagcaaagcgaatcattaaagcggttcagatcatagctaaatcagattcgaccagatccattacgtacacactcctatttgcacaacaaagcctttgctacatttagataaacaaaacaaaataaatattattgagacttgatatgcatgccatgcaatggttagtaaattatcagcacgtatatgtcagtaatgtaaagagtttacataatggatgctatatatatacaatttcatgtgtgctaagggttataatatatgcttcaatattataaaaatcacatgcatctaatacaatcatttgtaaatctaattaaaaatttaaatgtaattatatagtacgtaacacatgtttattataaatgtaacatctcaacagcagatcgtacatttaatcctaaacattaattatcatatatattttttgatataagaaagaaaaaagctggaataatattataactggctatgatgaaacctgaaaacgaattaataattaagtactatatttgtgtataaagggtgtatgaagattctgatgaacggatactttgttgaacttcaagcaccaattcttccatgctcaattgacattccagccctatctgtaattaagtaagaatatacatcaagaatataaatatatatatatatacacattataaattatcatcatgtttagggaaacataatcatattgtacttttttttttgatagaatcatattgttgattatccatatatatgaggcaccgtatatcatacatttatatatatggctggctggctagtgcatcaaaatgtgagaatatagctaagccaccaatatttcttatatcttcgtacatatcttttaaatttaacttgcaattaattaatagtttagtgatcattttcttgtcgtaaatatatttaaatgaacgtaaagtcttgctactataccttcgcttctttgatgatcacatataaaattattactatatagaggtatatcagtatatcttgaagctagattttttctttttcattataacttaatatatataatttaatttacaataaaatagaaattctcatatatatatatatatagaatattaaattagtgtactatatattacttacataaacaaactaagtaatactcacatatataatattaattatcaatggtgggcatcggttatatcttcgaagtcatgatatatattattgaaactgatcaacttaaaccctgagttacgcatatatataaaaatatatatatatatatatagatatatatactggctgttcgaattaccctataattttacctgacttcgaagataataatataatattaccttactgatatcttcaataattttaagacagttgcatcgaattgattaatttaattaatttctcctatagctggagcatagtataattatgtactactatacagttttgttcagtggtgaattgagacaatcaaactaatttctacgtataattaatatattgatatatatatatacctttatgacaaaggagtataaaacagtgtcttccatgctactgacattgagatgaagaacctcaaaggaaagcctctccaatacactaattatattggtgatttgacctggaattcgccgtgaaattatcttcatgagcacgttggatcctgagatctttgcttcaacatctgccgtcagagagttgcaacatgctccaagctccttattattagtattattattatttatttctattcccaaaggactctcaagattagtagtagtattagtactaggactacttgtgttgtgtaatagtagtaatggtctagggctttgaccagggctagggctcatactctttcttcgtttctttgactccaaagattgaagaacttgatgcatctccttgatgaattcaatcacgccccctattattgatgcttggtctccctgtatatttatacaaataaataaatcaatatatagttcatattcatagaaattagtcataacacacacacatatatatatatatataatataattgatacccttttgatatagaaacatggggttaaggaacgtaaaactttgagatgttcattcatctgttttcttctatttctctctacagcgatgtgagacatat

SEQ ID NO: 24479 - DNA, 2988 bp, Cannabis sativa
  modified_base (2940)..(2950): a, c, t, g, unknown or other
cttgagggttctagaaatcgccatcgctttaggggagaagaaaagtttagacttatccttattcctagttacacctttagtacctatgctttattgtcttgtaaatcaatccctactccttttttttttatatatatatatatattgggagaggggtattctaatttggcacttttttttttaggaaaagtgtgaaactactaggttatgcctatgattaacccctactctttttttataattaactaataactaagaaacaaaccgtatttcacgtgcggttgaattttattaaaaatgtaatattttttaataagagaaattgaaaaattcttacaaaaaataaatatctagcaaagaaaaaataattgataaagctttataattttttttatgattgtaaaattgttgtcattaccgcatttcagttctagtcactattatattcaaagttgatgtcattattgtatcttccttatagtagtcactctcattctcaataaatttaatatacataaaacaaattaatcaaacaattaattaaatactcactttaatacaaacgttataatagagaaaagattagaaattgaagatttttacaaaaaaaaaaaaaaaaaaaagaaatttaacaaatagataattgataaatctatataaaactcatcttaaaattttataattattgtcatcacacacttgtagctaccactacattcaaattggatgtcatcactgttatacctaagtaaatttataacttttttagaattaaatactcatactattaaatattagaataatctttttgtgagtatttattttcaacattagaataatcttggatctataaattaaattataaaataattaattcatgatataatatatatacatatgtgtgactactcaatggttacatttttattgtaaccatggttatatttttttttaccctgtaatagcaggttaccaataggtaaaaatttattttttagaattacattaatcataattaacaattttcctaaaataattaattttaatttaaaaatttaataagaccctttttagccattaatatttataaataattttatttttatatttaagtttatattataatatttttaacatttaaaccatttaactataatatttacaataaaattctatttttttttacaaaattccttctaaaataaatttttgaattcttaaataatttttaaaaattacatttaattattattttacaacaaccgcttgactcatcttcctcttttataaatttttttaaaaaaattagagttttaatttgtcccaacctaacattatgtgaatttttcacttcgatacaatctcctacatctatgccacaaacccatttttctattcaaccagctaaagttagatttcttcttggtttttaataatttgcttgctattttatgtttatttgtgaaaaataagcaataattttaattaattggtaatctactttgataatttttttcttataatctttagattgatgaagataatttcaacaaagagcgaaaatagttgttattatatttttttacttaattttttattttttaaaagaaaaaaaaaactaaataatttgaacgcacctaaaagtgttaaaaaaataagattgagcgtaaaattagaggtcattcatactactttttattaattaaggttatatgtgtaataactttaaattataaggaattttgttgcaattacttcaattatttaagtgaaaaaaaaaacaattactaaaagatctttatttattaacaaattgtatattaggaattattattaatgtaattttaaataaaattaattttaattaagtttttataaggaaataaagtatcaagttacaagttatttattatttatttttttttaatttttaaattaatcagaaccattcaataatgatctaatggttaaaaataaatgtaactatggtggttacaaatttgatgtaaccattgaaacctcctccatatatatatatatatatgatattttttatataatacacatatataattaaatagctttaagaaaaataaaaataataaattacacatataactaaataaattatatttaatatatatttataatgacttaactttccataaataaatatattaattttgaactaaaaaaataacaacttactaatgtgaaattaataaatacttctcataacgttttaagaagacttctacatgattgatcgaataacttcccaataaattagtaaccagaaggaagagtagagagtaaagaatgtcaaaacatatattgaaacttaaaaaatatttataaattaggattgatgacaaataatctatagcaagattgctactatccttcaaaaattaaaacacaataaaaaaataaaggaaatgaagattaagagaagaatatgtgtgtgatgtatattaaatttattaatattattaataatattaaatttataagtgaaaaccttgtatatatatatagatagtttagattttttatttttaaaagaaaatacatatttacatgttataataatatttagttatatatattttaagagattttagagaataactatttgagagaataatggagaataaaagaaaagaaaagatagatgtatttaaagtgattttagagcgttataccagccttagaaaatagattttcatgtaggataaacgaaagacacattaattatttaataattgattaaaaaaagtaaacagaggaaaaatataaataaaaatagtaatcccctttttaaaaataaaaatcatatcgagacttattgtgacagtcagtagtcccgtaatttgtaaggaaaaataccaggtaagtcgtgaaatcctacatcgcctagggaaggtcaagtgtgatgannnnnnnnnnntgtaggtatgggactacacaattaaagatgacttaaat

SEQ ID NO: 24480 - DNA, 2311 bp, Cannabis sativa
aaatatttaattgcaaacaattgtttttggcctttaaactaagtttgtttcatcttcttttgtagattcaagttttcctcttcttcttcatattctttctcctcgtcgtttttcaaaaacaatcccaattttgtcaacggtgtctcatataatatattagaagatgaataggtgtgcatttcagaatttctgccatcatatctgcatgattgtttgtacacgcatagcttttcaaattttgataagaaatccttaaagttttgatcaagtacttcttgcttaacctgtgttaatgaattatcatagtacaaattagttagaatttatcatcaaaacaaaatcttttacaattatttaagataccaaacgaaaaaatatgcaagcaaatattaacattttcaatcataggtaagtgagcttctctttctctaattaatcgttgtaaattcgctattttttctctttcttctttttcctgtctttctttttgtctttgtaacaccacgcgtagtatataagaatttaaaagaattacatatataagaatttatataaatatatatagtgttaatattattttaacttttgtgttttataaaaattatccatccaactctctgttttgttaaatgataaattggaccatgtgttctaaagtgatacaaaacagtacactaggctcaattttcgacagttttatatatatatataactaacttaaaagacaatttctagcacgaacaatcttgtcataacatctctaaatgtaaaaaatgtaatcaatcttgtcattattaaattttataatagaatatttagttacaaacaatataaactaagcttgtttcaacttctttaattttgtagattcaagttttcctcttcttcttcaaattctttctcctcgtcatttttcaaaaataatcccaactttttcaatggcgtcccaaataatatattagaagaagaataagtgtgcatttcagaatttcttttattatatctgcatgattgtttgtagccgcatagtttttcaagttccaagaaatacttatggttttgatcagaatgatcaacttcttgcttaacctgtattaattaattatcataatacaaattagttagaatttatcgtcaaaacaaaatattttacaatcatttaagataccaaacgaaaaaatatgcaagtaaatattaaccttttcaatcatagctaagtgagcttctctttctctaattaatcgttgcaaattcgcttttttttctttttcttctttttcctgtctttctttttgtctttgtaacttctctccttctcttttttccctttcctctatttctttttcaattcttgcactttcaaatacttcgcgcggtctcttttttgattcccccttaatttcaaactttgtagctgcaaaactcgagttggcacaagctgactttgcagccaaagtagttttcttgagataacattctaattaaaacaaaaaaaaaattattagctatattaattatctaattaggtctataaattaatattaacatattaaataatttaattcgactaactaattaccttgtcgggataatgaagatggagttagactctgagtttccagttgataattgattcttttattctattacaatattgaaaaaataaatattaacatcaatgaaaaaagttttaatcccataataaaattttaattattaagcaaatattaatatatatatatatatgttcggagaaatttaaaaaaaaaaatacaaaatttgaaccttttctatatatcgatgatgatgatgatgattcaatagagcatgagttggtgctcgagttttagattcgtacgataatattgagagcggtctctcagtatcattttcaatttcaaattgcttccctacctatatacattataataattaaacaaattatacaaaattgatcgaaaaataaattatacattacaaaatgattaatatgaataaatttcataaattaaccttattgtgattgtgagccttttgcaaatattcataagacttagaattattgctcgaattcactctcatattcctcctcatcatcctctccaataatttacctaaaaaattatgtatgtgaattaattaattaattacaattttaattatatatcatccatattgttaattaatattttaattatttatttattaatcaaaacatggtatatttattaaaatattatttaagtcttaattatggattgatgaacacaataaatgaaatttaatttttctcaccttgtcaatattttgc

SEQ ID NO: 24481 - DNA, 1981 bp, Cannabis sativa
ttgaaaaatacttttactttttcaatttttaaaacaaaaaactgattaaaaaagttataccaaacgccacctaaattaacagttgccaaaagtcttaatcaatacaatatcattactattattaaaacctaagtagaatttacataaagaaaatcattttttttcaatcacactcatagtttatacaattatcaaaatcttatcttaggtaaaagaactcagagaatgtgaatcacattcttacattaaaagaagagaagtgttaaatgacattagtggtgcacactctttttagtgtcatattactattagtaaaattaatcgctaactaattgtaaggtgccacctctaaatggtattagacaccacataaaaaatacaccaaacaagaaattcctttcaaattctctacatcccaacacttccccataagaaatctcctaatataaatctcataaatcattcacacataaatttaatagaattatggcttgatagtttaataactacaagtgtaatataaatatatagttgtaatataaatctcacaactcacttaataaatagattttacataaagaaaaatcacccttgattttgttatcttatatacatcaagattttgactagaaataaaactttcaaaaaattgatttctacatgaaaaccttaatgatcaagtaatgacaattgtgatacataaaaagtagtattagtaattttgatgtatgtataattatagtaacggggtaagacttgcaccaaatatatatagataagtcatgtgtgtatgtgtgggtgagtcctgtcctaatcaaaatgaagccaccaaagtcaataatattaagaagaggacatacgaaactgcatatgtcttattattccatctccattttctttacaactattaattaaatacattgactaaccaaaaactacttatgtgtctaaataaaatgtttaaagcgacttaagtaggggccactttggacttctcaaaactcttccacttgttaataacaatctctttatttatatatttttgtatgtaatttatttcaatctaaagctttctaaaatgttattgttgaaagtaaatctccacactcactgtaaaaaaaatcagaacagttacaaagagattaacaagacagtaaataaaatttatgtggcattaggcctctatttacctagacaggtcattaagtaagttataaagtttgttagaattttataactaactctctgattcactgctctcttctacaacatatataaaccagcagtagcaacaaaacaaaaggcggaatatcggaatcagatcagtacaacaacataggatcagactcatagcagaacaatacaaaaaccaaattggttcctaaagagaaaatggccacagattgagtttggaggagtaaaccttggaacccttagactagggttcagatatccaactcaggggagaattgttcatgcaacaaagaagaaaaaaagctactgtcagtatcaatctcagagagaaaagagaggaataaaaaatcctacagtggtataagagccaaacaaggcacaatctgcagcaaagattaatcaagaaagcataaagaaagcatcaagaaacacattcatacctgcaagaattcaaatacacaaaaccagattgcaaagaacaacaacaagattattctaaactcattatctatataatttatttaaaataattttatacatatacaattatgagttccatgaaggttgatatagataagtttgatagttcaagtgattatcgtatttggagaaacaagattagggctctattggctcaacacaaactgttgaaggttctaaaagatcctgtggaatggtcagctgatacaaccaaagactagcaagaagagttgctggaaacaaaaaccggattaatcattttcaacttatctgattctataatcagattggttgacaaggaagatac

SEQ ID NO: 24482 - DNA, 1396 bp, Cannabis sativa
  modified_base (63)..(68): a, c, t, g, unknown or other
tacaagggttagagatctgacggacgcagtcatttaattgcgctgcaaccaatgtaaggtttnnnnnnccttttatgtgtttattttatatctttttagaagttcatatttaggatgttaaaaatatacttgttagtaaatctaggtctttgtaaaatatattccaacattattctaatagccccactactacaaatttaccttttagtgacactcttaagtgactcacaaaaaggtgtgtgtcactaaaaggtttaggataagatttagtgacccacacaaaaagactctaaaatttcagtgttagtgtctgaccatccgcgtcactaaaagtatgatggatctcttaaatgtttgggatgtttcttacagccaaaaaattctctaaatcaccaaattaaatttatgaacgcctcatattggtaacaaccaaaggatttatgatgatcattcatgctcaaatgagagtaaaaactcgataaatagtgaccatttgtttatttttacacttgttgaaattattaattgtgtggttcgaatcttgagcggatatccttttttgacccaaaaatgaaactttcattaaaacatatcagctatcaaaataacttccaaaccaacaaggaaaaaccgcccacagaaatacgatcagaaatagaacgagaagaacgagctagataattcgccgcttggttcctagaccgctttacaaacttaattgaaattggaaacaaagaaaaggactgaataagagaaatacagtctgaaataataaggccaagtggagacaaaatctgcttattactttgaatagcttgatttaatatgagacagtccgactccaaaataatagcagtacgtaggaatatcaccatcagaagtaaccgccccttcccacttactttccacccaacttagagcctcctttaaagacatagctttagcagtaagaggatcaagttgtccactcttcttgacagctgaagcttcaataaataaaccttcatgattccgagcaatccatcccaaaccatcgctcttctcacttgcaaaaatagcggcatcacaattaaccttcatctctccaacaagcagtttagaccagtgctcacaaatggttgtactttgacctgaaactgtcgagacaaccaccttatcaagttgagacactttccaaagatcaaggtaaggaattgcagcagtgaccactctttccacatataaattcttttgattccaaaccatatcattacgagcaccccaaatgctccaacgaatcatagcaagcttgtcaatactctacacggagtgaaacttgcagaaattcttgaagtacctgccaaacacagcttaaccacctctgaaattaactcccaagtgttggaattattttacc

SEQ ID NO: 24483 - DNA, 4582 bp, Cannabis sativa
tattttttaatgttttaatcaaaagaatcaataaatgcaatcagtcagttatctgtttttatttgttataacctaatgttactcccacgatctcatttacaatttctagcgttttattttttgattgacttctcttagtaagtcgtatacgaacaacataagaagatatatcttctatatgaaaaaaaatctcttagagtaattattttggagtgtaatatatggatatcgtttggtgcataataatttgtatatggtggctattttatttttggaacatcatggttgatagactgtcgtgtacactttgagcagaactgcaaaacatcttaaagaaaagcgacatagtatgtgacttagtcaaattatcactgcacatgagcgaagattgacacatcctaccaacacatgcgcgctggtgtccgaccaactgtgccaataattggcgtttgatgtggtgtcactttattttactaaaaaattatttaataaaacaagagatatattttatttttatttgattaattttataatgttttaattaaatgaaaaaataaatgcaatcagtcaattgttcgctttatctgtcgtgatccaccgttatcctatttacgattcttactgctatatttactaatcgatcagagtaattattttggggtgtaaaattatttatccgtatactcgttccaatttattttcttcgttttacactcgactttatgttaaataaaaaaaaaaaaaactaaacatacaactttggaggaaatatagtacaaatgatagcacaaaatcagatttcaaatgtatttaaatattgtataaatcaaggacaaagtatgtatttttgtaataatttgtcaataaaatagtctttgcaagtaagtgtacatgatcaactttgtcagagaatttgcattcaaatatagaaaccctaaaactatgaatgtaaaattaagattcaattcaaagggttgacatgtgtgtgatataattgaaaattatttataaaatctcgtgtacaaatttggtgtcacagcccaataattcattaaaatatactatactatactcatttagaatatgaaatttactttattccagaagcttaaattaatctataataattgctttttatatatatatgtactcatacattattcaaataatataatacacataggtttgaccagatttggaatacttaaaaaatgatactaatttgatttgatttagtttacaataattcaaaggtgtttattgaacttttttgttcttttctttataacactgacatggtatctttctttttttccttttttttttctaacattacaaataagtaataaaagtaattatttataatttggtatttactaaattaatttcaaatcttgtaagtaaaattggtccataaagcatttgtttgttaccatgttataatcatcactaaaaagaagtccactaatcttttggtgaacttcaaagggcaaaacccatttattgattgtaaaatttaaaataattttttctatgaaaagattaaaatatttattttcaataaacactataatgagtgtaaaagaaaattatgtaagtatgtattttattaactacttttaacaatttttctagatttatagctcttttctaaaataagtgtcaaatggtcatatatcctatatgactttttttcataactttcaaactttttttctcataggaaaatttagttaagccataatataaatcatgacttattttctaaataaaaatccctacaaaagttattttctatattaataactttccggaaaaactagtattacaacaataaataaacaaaaaaataatttgtgcatatatattataattttcgattgtaaataaatatttaagtttaatttttagctgtaatgatacttaaattataatggaattgtaagtaactgatagttaagtgttaaataaattactacgtagcaatttctgattaatctgaattattaaaaaaaaattgaaaaaaataattagtttaaatatactaataagaagtgacatataaataatcacttaatatttaatagttaggtaattacagaattcaaaaaatataacttagattttgttacggttaaaaaatcaatttgaatatttatttattagtaacaatttaaatttaaatattatttttggttaaaaaaccaaatagaatgtaactatagcatattgatattgagaaatattaattttaaaatgccaaaatagtaaaaaaaaaaaaaaaaaaaaaacctagaatttatcatgttaccagcttttgtgggttaacatattacaatcatcacatacaaaaagtccactcaacgattggacaagtccaaaggccaaaacccatttgtaatttttcaaagaaaaaaaaaacccaatttagtgttaaaattaaaaaaaagaaaaaaaaattaaattggttaaaaaaagaaggtgaaaacaaaaatttgcaggttgtgattcagagaagcacagcatcttatcttactgcatttggggacaaattcatgcaattgccactttcacatgcaatttcatttcaagtacaaacaaacaaaattccatattcatatctatacaaacaaacaaacaaacctcactacctaaaaattcaacccaaaccaaaaaataaaaacttaatttaataaaaacccatttctcaataaagataaatattcaaccatagatcaagtcaaaacttgataatagctccaagacttttaagtgggtcaaggtgacaaaaacaagacaccataaattttgaaacaacaataagaaaagaaaaaggaaatttcccttctttggttatttaatttcagtaaattcaataaaagtttcaatatttttgacctttttttttaatagcattgatatgaaatattacagtatttagtatttatgagatgacactatataattaattggttatttatttatttaataaaattaaaatatttatatttttgagcaaaaaatatttataatttcttatgtgaataatttaattaaattagcacttaaagagagattatttttattgataggagagaaatttgtaaaaaaaatcaataaattttttattttgtttgtaatatgtaagtgagtagtttgttgtattggtttatgaatgctcgtttgtgtagtatttgattttgattaataaaatcttctcctttaattaaaaagaaaaaaaaaagtgtaatacgatattaaattacaccaatattaatattatattttataaaattattaaacaccataaatgcccgttagcatttctaaatattttttttttctgtcacacatattctaataattttatagtgtatagtcaatttaaaagtgtaaatgtggtagatatatacaattatgtgaatgaataatgaaaaaataaatctcttccataattaatgatgaaattttgggaccaaattatgaatagtatgtttgacgttatggcaatggcaaaatttagcaaaagaacaaatttttatgaacaaaaaataaaaggggtcccatttacacacaaaatttatcaattcatacacccacccattttgacttttttcatttattttcaatcttagcaacaaagctttattctttttttattttatttcatttgacaggccaactatagtctatacatataataatgtcttctttatattccagccaaactattgtcacattccactaaattatatcaataattactaacaatatttttattaatatctagataaataacctatcttttcaaaaaataaaattatacacgtagttcaagtcaaaattttaaatatactttttggtaatatacaaaattaatttgaatattattatgttcattgaatgaattagccatcccacttgcaactacacaaaataaaaacctaatttttatttttaattttattttattatttatttttataatggtcaaccgttacaaacacgacatgttggtccacttctttacaattctttgactcagtccctttcacttctttaaatttttcttataaaataaaattttaaaaaaagaaaaaagaaaaagtaaaaggtaggcatccaagacaagaaccaaagataaagcaatccattttcccattacgaaaaaatcaaacctttctttttctttttttttctacttaaaaataccaaatccaccttagtgttttcagattggactaattctttcatttttcataataataataatatcttttttcttaaataataataataataaaggaatcaaatcccattaccataataataatattgtacagtgaaaattaaaaactaacccactaattaattaaacaaaaaaaaaaaaaaattctccttcgagacagagctgagttctgaccgagtcaccagctcgagttgtactctacttttactttactttttttttttactatactgctctaataaaaacaaagattcctcctttcttgaaaatcgaaacgcccaatgactttgtcgtaaaacgacgtcgttactctcttcttcttcttgttcttct

SEQ ID NO: 24484 - DNA, 5160 bp, Cannabis sativa
tcaatgatttctatgtgtttgttattatattttcttgagtttgaattgttattgatgaaagttttccatcaacttatgtttctttgattgtatggttaatttgtgagtttactatatagttggaatgggaggaacaacaacggcttgcataccgcagatgggagcgggaacaaggacgaagggatgcaaccgaagacatgtctgaagaattttctgagggagaaaaaggagatggtatgggggagatggtaacttgtgagattccgagtaaaaagtttcatcgtaacatttcgaacttggaagtatggtcggatgataaaaaagagaagaaactttatattgttcttataaggtatgattttactttcctgtcatgtttgagtttcgatccaaagtaactttaaggcatttgatgtgttttaaagttatgtttggaagttggattttggtagggaaaagaaaaagtaaggaaaatatagaatataaaaagaagaaaaaaattctcatgtttagatttagtatagaaagaataattgtatggaaaaaaatagattcaacaaaaaatttcatactaaacatgattgtttttctatattttcctttctgttttcttttttcactattatccaacttccaaacatagcctaagctgcttgaaaatgtgccacatgagtaattattaagcaattatgagtccttattacaatgaccacttttgtttttcatgtgtagtttgcatggtttggtacgaggagaaaacatggagcttggccgagattcagatactggggggcaggtatcttctgagttctgaccatggtactattgcttacatattcttttcatggttttcttctgtgtttacaccctttatgaaacttataacaggtcaaatacgtggtggagctttcgagagctcttgctaggatgcccggggtttacagggttgatctctttactcgtcaaatttcttctccagatgttgattggagctatggtgagccaacagagatgctaactactggaattgatgatggtgatggaactgaagcgggagagagcagcggggcatatatcgtgcggatcccctttggtccccgggacaagtacttgagcaaagaattactctggccttatattcaagagtttgtagatggagctctagctcacattctcaatatgtcgaaagttttggctgaacaaattggtggaggccaaccaatttggccttatgtgatacacgggcactatgcagatgcaggggatagcgctgctcttctttcgggtgctttaaatgttccaatggttttaactggacactcgcttgggaggaataagcttgaacagcttctcaagcaaggccgccaatcaaaggaggatatcaattcaacatatcgaatcattagaaggattgaaggagaagagctagcacttgatgctgcagaacttgttattactagtactaaacaagagattgaagaacaatggggactttatgatggctttaatgtaaggcttgagaaagtgttgcgtgctcgagctagacgaggggtcaattgctatgggagatttatgccaaggatggtggtaagaatctgaattttagtctaatttttccttatgttttgcattattagtactcaaaacagcttatgtgtaggttattcctcctggcatggatttcagcaatgttgtaacccaagacgacggtcctgaagttgatggagaacttacacaacttaccggtggtatagacgaatcttcaccgaaaacaattccacaaatatgttcagaagtgagtgtgtaatttctgttacttaacaattgttaacattcgaatcttgttatcgccttttacaacaacctcttttttcataggttatgcggtttcttacaaacccgcataaaccaatgatcttggccttatcaaggccagatcccaagaagaatttaactactcttttgaaggccttcggtgaatgtcgtccgttaagagagctggctaatcttgtaagtagttttttcgcagtaactcaagttaagtaggctttcgaaaatgtcattaaataatgtcaagagtaaaattaacatgtttctatacagacactgattatggggaatagagatgatattgatgagatgtctggtggaaatgctagtgttcttaccacagtgttgaaattaatcgacaaatatgatctatatgggcaagtagcctatccaaagcatcataaacaatctgatgtacctgatatatacagacttgcagcaaagacaaaggttagtgttagctttttgattttcattcaataattttttaacttgatgatattaatgtggttggaatttggcagggagttttcataaatccagcattagtggaaccttttggacttactttgattgaggtttgtttttgttaagttaccatctcttttgtttatgggaacctttactttttccacaagtctacaagtttggtttaattatgtttgaaatataactcaggcagccgcgcatgggctaccgatggtggctactaaaaacggtggaccggtggacattcatcgggtaaaataattgtaccttctcttttcttttgattgtttatttttgtagacatttactcgcgtctcgagccattcgagggccttcttttcgaaggaaatttttggatcagagtgggagccttgggcgagggcctaactcgccccacctttgggcgagttagttgtaataatcattcttaaatttaaatgttctccttgctatctatttaaaaaagtactaattgatatattttattgtgaattctaggctctgcataatggtttgctagtggatccccatgatcaacaagaaattgctgatgcattgctgaagttgttatcagagaaaaacttatggcatgactgtagaaagaatggttggaagaacatacaccttttctcgtggccagaacactgtcgtacttacctaactcgggtggcagcctgtcgtatgagacacccacaatggcaaaccgacaccccgggtgatgagatagacgaggaggagtctttcaatgactcgctcattgatgttcaagacatgtcacttaggctgtcggttgatggagaaaagaattcgttgaatggatctttagattcgtcttctgctattgctgaccccgagcttcatgatcaagtgaacaaggtgttaagcaagataaagaaaccgaaatcaagtgatgataatggcaatgccatgacaaagcatcttgagtatgtgccgagcaagtatcccatgttaaggtggaggcgtaaattgatggttatagcacttgattgctatgaaagcaatggagatcctgacaaaaagatgattaatattgtgaaagagatcatgaaggctgtaaggttagacactcaagttgctagagtttcgggttttgctttatcaacagctatgtcggtatcagaaacaatagaattcttgaagatggggaagattcaggtgaatgaatttgatgtattgatttgtagtagcggaagtgaaatatactatcccggtacttacatcgaagaagatggaaagcttttccccgatccagactacgaatcgcatattgactaccgttggggatgtgaaggtttgaagaaaaccgtttggaagttgttgaatactgttgaagggaatgaaaattcagatcaatcttattcttccattgaggaagattcaaaatcaaccaattcacattgcatttcctacctaataaaggatcctagtaaggtatgttatgttaagcttgcttaatgagatgtttaactgttctataagaaatttggtttcattttggatattttcaagatgagctcatgatttgttgcaggtaatgaaagtacatgatttgagacagaaatttaggatgcgaggaattcgctgtcatcctatgtattgcaggaactcaacgagaatgcacgctattcctctacttgcgtctcgagcccaggccctaaggtactaaaattattaatcttttcctttcgttttgaaattagtgtttcattgtagaaaattattagacctcacggtttttacacgaaaatattctctcttatagaagaaacctcaagcatagaagttaaattttgagcgaaagtctacctagccacatattatgtacatcaaatttataatgcttagaaatttttgaaaaattacaatctcaaaaagcattagaaagtacacaacatgtcaacaactacaaatataattatcaatacttcaagtagagctagtgccccttaagattattgataactatcctcgaatcagtttccaccaccacaaaattgtaatgatttattaattacatacatacatttgctaccatgataatgattttttagtttctaatcttagtattcacgtatgtgtattttttaagttctaatagataggaagattggagacacctcaataaatagagtttttaaaggattttttttttgagttatacaacttgatttataatagttcaaattataaatatttaatatttatttttaatctaataaataatattaaataaaatagcaaactataaatgaaagtcttttttttaaacattaatacaaataatgtttttttgggcaatgaggtagtctcaaaaatatctggtgtcgtctcatagttaagttgttttgaaattttagaaaagttacaactacaaaaaacttggatatcaaaatactgtttacaacacatagttatcaatttctcatctaaatgtttcctttcaataaaagtcgccgccttcttgttgtgcaaatcatgctaatatatatttcatttaataactaattaattgtgtattgtatttaatttaactaataaatttgatcagattatgaaatttgaaaatatttggtttatgatatttaggtatctgtttgtgcgttggaaattaaatgtggcaaacatgtttgtattccttggcgaaagcggagacaccgattacgaagagatgatatccggcgctcataaaactataattatgaaaggagtagttattaagggctcagaagagctactaagaacatctggaagttatctgaaagatgatataattccgcccgaaactccactcatcaccttcgttgatggtgaagcatcagc

SEQ ID NO: 24485 - DNA, 1707 bp, Cannabis sativa
taaaataatttccaacaaatcttattgaacaatgttggatcaacaccattgttaagaacatccaaaacagattcagtgaatgatgtgccagtaagttgtaaagaacaagactgatatgccatccaaactaaggcttttatcactactcattgatttcatagcattaaaaatcttctttgcagtgtagggtgttgaaatggccaattgagattctacagaaatcgtggttggaattattgccaatatagcatcaatagagtgttggtaaagaccttggcttctgaatattctttgaaaataagtagtgataaaatcaataaggtcaggaacgctagtttgcgtgttgccatttgagtctttaagtttcttgatgtgattggtgttatgtctagcattagcacgttggtagaaaaattttgtatttgaatctcctaattgtaaccacaatatttttgatcgttgataccaataatcttctttttgtgccaatacatcgtctagaatagattcagagttcttgagagcatcaaaatggtcttggtcaattcttggggaatttcgaagagctgctacatgctcatgagattccttaatttttctcttcaggatttccaaatttggaatggtgccatgactagagttggttcaaacttataccttaaaaaattgggataagtaagtgctaataacaacctcttattataattgtttagtcaagttttacatccgaaatcatatgccgaaatatttttttcataatagtatttgttatagttacaatatcattcctgtaaatttttgaaaattttcaaatagtttacagttgcaaaaacaaagttcctaatatttcaatttaccacgcatgttcaaacacttcaaacctatttttggcactacaaactattcaaaaatttttaaaaatctacagggatgatgttgtgagtatacgaacacagtgatgaaaaaaaatctggcatgtaattttggacacagaaattgactaagagattttaatgtgaggttaacggtagcacttctcttctataatatactttttaatatgattttttttggtcattttgtaatctattttggcatctggtaagtctaaatattttatataatgctatacgatatagttatttaaaattaccagtcaatttttagaaaaaataaaatagtttatagtgccgaaaataagattcaaatatttgtacgcgtaactatttttttatacatattgtaaacaactgtttgaaccttattttcagtactgtaaattattctaaattttaaaaaaaatttacatatagttttaagtaagtataacgtacacgaaaatgaaaaaaaattataaaactctcctaaatactgaaacatataaaatacatactaaaatactacttttcaggggtgtactataaatgtttctaaaatcttactcttttttctttttcttatcttttttttttaatagaaaaaataaaaatatataagttatatttaacatttattttattgatatttaagaattatttgttatattgtaatatcttttagtggaatggtaattttcacattatcatatttggtgtgagatatatttttaaaattattactaaagaaataagactacccataaaaggacaaacttaaatcctttcaaaagagtggtatataaacattttcttcagtcataatacaata

SEQ ID NO: 24486 - DNA, 4444 bp, Cannabis sativa
atactaaaatttactttttcagtttatatgaactaacactgttaagtctttcatgatatcccagctaggcttgtcatagtttacaagttcataaattcgtcaaacttgtcttgacagtcagcttaagtttgcatatccccatcaaaggttaatactttaggcttaatactgccttgaaaaatgtctttaaaaaccaaaaaatgagtcccatagttatcagcaattgtaagttattgagttccaaaacagtcaagaacagaaggggtaaagatttttcatcctttatttcttgttctcttttttgattttcatgaacgaagacttggttcactgaacatgctatacaaaacaagccaaccactgagagaacaccacaattatttttgcagtattgggatgaaaaggccaagaggataatcaagagtgataacaaaaagcttaattctagaatccatgctgttgatgttgtctaataagtggccaagagaaatagatgaagctacacagctaaataattgcaaaaaaaataacaacaatacttttgattacaacttgtgaaaatgaaagaagatatcaaagcatcgaactgagtttctaattattagtatagtatcaactacagatacaatgaaactttacaaaacacggagcatctgttaatgttgaggtacaaccggtcttttttccaacatctcgtaatgaagcacgaaattatcctgcaaccacatctttttaagttaaatcgaatgggctacaataaacattgtcgcgaaatcagtaaaagattccaaattcaaacctttcgggcagtttcaaatgtgttcggatcaaaacaatgataggatcctctctcgtaggtgtttgttttgacaagtggctccatgttggggactctaatgaaccacaaacggtgttccttgtgataaaaccagcctctgttataactgcaaccacatgtgttaaacagtttagccaactatatttttcaattgaaaagtaaatatgatgataatatcagttgaaagtgcttacagttcattagcagcatataattgggcttcatccttaggcatactacaaagtatggtaacaaaaaggagtttagtatcttaacaaaattaaaacattccaaatagagagagaggctctaaaaaagagtagcacctgtaaaagatatagaataaagtttctactgtgaactttgcaaagtatccttgctgcaaccaccaccaaaaaaaatcagtaaaaagtatacaatgacaatgaataaactagagaagatatggttatgaaagaagacacacatgtaaagaaggtggttgtttagcatagtaacattgtggcacgttgaattctggatcacccttagctggctcgtctgaccaaggagaaccaaaagttttgtgaagattttccgttgaattcaaatttaaacctaatgtcgtcaaatcaattccaagggcaagtgacgttagatcaggatcactcatcctaatcacacttaacaaaccaagcaaaccatatcgatctggtgcagactgagctgcttgcatggattttaatccctgatccttaaatgactgattaacagctgacatttgttggagtcgaaactgtgactggttctggtgttgctgatactgctggataagctggtcataagatcccatgccagatcccatgcccgaaacagagcttggggagttcaaaggccttaatccaataccaggaggaccgctactctaaacaagagaagaagaaaaatgcatatataaatacattatattttcacacacaaaaacaagaggctaatagaaatcagtttgaaatttaaaacagtttcttaattttgcacttaatctgtctgatgattgcaaacatttcaagcgttgacaatttaacactatattgagtttccatcatttttataactgtaactttaattccaaaaataatctctttccgtttacttaattatgtaaagatttataacaaaataaaatagtctttcagtccaatgttcatgttgctaaccatctaatcacaaattataatatttgactacctgggaatgataggttgaatgtgaaggaaacatatccgagccgtgtagatgcagaagatcctgattgtttccaggtgtgaaggagacaccactactactaactgatggagcgtgttgctgttgctgctgaggacgatgagatgaatacgttccaccaagattgaatccagaagacctccccatctgtgaattaaaagacaaagcataagaaaacctccttacatgtcaagcacggcaactaagagagcaaacgaaatctctatttgagacgcacaggaaaatgctgagattgcatcatggacattgggttgtcgtgaagttggtctttctggtgcatctccattggataatcagcactaccacctatggaagtaatttatgtaaatgcttaaaatctgtactaccaagtcaataatcattaaaacatggtactaatagctaaacaaatttagttacatcggaacaatttccccttcgacaatagaactaataattttctcctaggacatggcatatcttcattggtgtaatttagtagaatatcccacatatctcaatttaaattgatttatacaaggacccgatattcatttgccccaatagcagtataaggtgttgggcaccaatggtactctttagcatttctcaataaatatccacatttccattttaaaacacacttcaaaaaaagtgcagacagtctacaaaaacaaatgcgtactgcaaaaatcaaaccacaaattagaaccccaagctccgatgtgtatcttacctccaaaaatcttacaaactcaaacttctcccgaaagaaaataaaacaaataaaatttagtacaatggaacatctctaacttgtgtcaacaaaaaattaggtctctgtaaatgccactatttctactctagctttcaaagcatgcagtctgatcacagcaaaccaatggttgtatgcatagcctaatgatactacaactctcttctgagaagtctcaagtttgaatccccctccccatgtcaaaaataaaataaaatcatatcatagaaaacgacaattatgcaaactcgggtagaaagcagaatcacctaagctgatatattgaaaaaactaagaaacaaggcagtgatcacatactcaaacacgaagaagagaaaaataaggcatcctcacgagtggaaaaaaaaactacaaatccaacaggaaacatttaagaattgtttatttttctttgataatatattttttaaaagaaattatttaataagtttaagctgggctatctcctggtgctactttttgttgattttgtttcattaagatcaataaaagttttcattcattaataaaaaagcaggtgagagaggtaaggaagaaacgaaatatctgggaaggcatatgtgaaaaaatgcacaagcgaccttaaaatcacataactaaacatgcctggtactagggcaggacatagacaataatacaaaaaggcaggtaatatatcagtgatgaacatattacaaggctgccgtcgtagacatactacatgttataaggtaataatagccaaagatataaatttaaaaggacagctttcaacacactggatttatacagcatgtaaaataatagaatggtgatgtaattaaactatgactgtggtcaattagagcagagatgtatacatagtaaatacatgaaacagataaacaattgtcatacctttaaatcctggtaaagcagggaaatcttcattttggatgctgaactcttgattttgttgaacaataggactaacaccaagaccttgttttcgtaatgaacctgaaattttcgctcaaattatgatcttcctgattggaagacaaacattgtcgtgtcattaaaaaaagaagtaaataatgaagttacccagctgtccttgcggtcctcctgcagaactaggacgacttgtcaactggggaaagtcatttaagtcaaaaggtgaactgtcatttgaattgacatcattcaacatccccattgagcttagattatttacttggacatgactttgtgaaagtgggcctccagcacttggataagaatttcctagcatagaaatcacctggggagatcctgaacctagaaacagtcagctaccgagtgaaagatagcacttctagcagacagcaaagattactcatataccagaaaataaagagaccaaaagaatcaaacaaatattaatcagatcagcctctggtgggcatacatcaagataagaaaactagattcatgctggcagtacctaccaacaatgtcctaaccaaggaataaattgaggaacaaaacagcttgaatgaaatatagtaaaatagcatacctaaaattattttatttttttttttttt

SEQ ID NO: 24487 - DNA, 2587 bp, Cannabis sativa
gcagtttcactatctttggtggaagtagaggctaagtattttgattcaacacctttcaaacttttcaaggccttttggattgccttttttactactttccttgaggctgagtatttcttaatctcattctcaagactaacttttctacgcattgttgattgaatatctcgtgcgcattcctttgtgtgcaagactgcatctttggctgcactgcacatgtccaagagcctaagagatccatccactaatccatcaacccatttttcttggtggccttgggaaaaggcttgttgtgttaggggtagctgaagcaatttctcaacacaaatgtgcaaatcctcaagaacactgagttggtgggcaatggaagatgatgatgaggttgcatcagaacatcctattctcatcaaatgaccactgcactcttcgataacagggtgtgatttggatggcaagctgtttgagcggacatgaaggttggattttaaggcagccatgttttcttctttttggctaaaagttttgaatgtgataagttgttgcaaaattttccttgttttctctgccatctactttatgtatttatattaaaatcattaggtgaggaagacgtgaagcatcttctaaatcaacacatgatattcagatttggatatagacagtgtaccgatgtctgtgccatgctccctccccacccattacaccaactcatatcttaattagatatatattatcatgtatgatatcttagagaatctgttttaatgaatactttacatgcaaaacacatttttttaatgatagtttatcacaagtgccattaatgtttatcttgtttattaattttgtgttccagtgtatgattatttttataattttaaagtaaacagctcttattgttggagcccttcttatacactcgtttacataaagattttatttagtgaagtattattattagcaagggaaccattgaatccacagcaacactataattatcgttgagatctgagaattatatttatgcaattgtaaagtataccatttgtgtaaagtatgtcttataaattgatttaaagatcattctggttttattttatttcactcttcacattcaaatcacattctccttaaatttaaaatgagttcacggctaattatcataaggcgttcctactatgaattttatagtaaaagtgcattgagaagaaataataagatgattgaaagtgtataggcgaaaaagagtatttgattttgtatcttatgtacaagtgtatatgcttaagtttctacctaagtaagcctattgtgtttatgttgagctagctagtgactaaagtttctctgctcaatatcctcaaccactcgctagcctaagtttctacctaagtaagtctcttgtgttttcttgaatatcactactattgtaacagcggtgttttgaggttgatctttcaccacaaatcgttcagagctcagggtctagagttcaagaatcaccttcaaccaatcaagattcatcttcaatatttcaagaatcaaacttgaactttcaagaaccaaattcaagcaatcaagaacatggtttgaatggccacaacaagattgaggtggacaagttcactggttcaaatggtttcaacctacttttactccgttgttgttgttgtaaatgactcgcacttttaatttatgataacacagtatttttcctaaaaaaaactactcttagataatttacagataacatattctaacaatgatgatgaacgttcttcttatcagtatgaatcttcttcataaacaaaaaccatagattgctcctccactgccatagtactaataccatttggctttggacaatgattgtatttctttctcacagcaacacagtcgagaaagagaaaagacaggtattattgctcaaacctagatgctctatccgttaaactataaattgtctgtttcaaaataaaataattgacaagtcaattttttttttttaagtactcgacctaaaatagaatcaaaggcaataagaatcttgaaatttaattccatgttcatcttattccaaattctaacaaaaaatgtatcttctgaaagtgattcactctgtagtaattatataggtgttcctttttcattgtcaatctgatcattctgcctctgttctaaatttaacactttttttaattgctctttagaaattttattagaacttagaaattggtaacagccataattttttatgataataaaacattgaatttgaattgtgtgaaatgttagaacttaggaattatcaacaaccatttttctaattttttgctaattatgaatagttggatataagtaatgtaaacacaaaaggtatatgtgagaaaagtatctaataagtttgtattcgcaaaaagtatgcgatgtatatcttgtaaacatgtacaattgtatgccctatatctatgatacaaatctatgatattgtaatgagttagtgattgaggatgttgagtagagaaactcttgttttgatcaaacgcctgtaaaggctctcaactccttgttcgaggtcttcaatgca

SEQ ID NO: 24488 - DNA, 1972 bp, Cannabis sativa
tgcctactatgtaattataaatagcttctttgcaagtgtgagggagattttgtagcactcgtgggcaactcttttgttaccaaggaggcaaccaatgacagctgctattagaaatttaacaaatagatggtagatggacaagatgactcagaggtcatatagtgttgggcttctaatcatcatgttctatagagacttggtgttgagcactatgaaagtttccataatgttattctacctcgggccggtgccaacagttagcagtagcttgatcttaccatacggagcaattctaaccccactgaagccacacatgagctagtcgcatggcatcaggtcttttaaggacaaacccattcactctagggtttgtttgaaaagaatgtttgacgatactttttcatcaatcattactctagacaccatcatattggctatctgcacctcaataacgagtgggttattttgagggtagtggacatggtccgaattagattctccaagttggatcacactcgaagcgtagagattttggaggcctctccacaacctctaacatcattgatcttggctcatgtcgcgaagatcttgcatacctctccaaatcttttcttaaattacaggcaatatgcagatctctaactacaagatcaagtcaatctgccactattgtaggttggagaggagcgttgcctcctgttggcacttctggcctcacataccactagagggtagcattcttttgtcaaatcaagaattctatctcatcctgtaactaatgacactcattagtgtctgtaattgttttggtagtaacagaacttgttcgtgtctctcttcactaactctttgaatggaagaggcttgcggtacgacactgtgacagagttgcctcaaatatttcttctcttgggcctaagaaaatagagtaagttgtaaatctaggctcatactccttaatggatctatctccaattctggctttctctctgccaaaagagttagcctatttttcaccattacttagtctctttcccccatacttttctaattccccatttccttctatgtttaagtgtcaagagcagcagagtttggcaatttcttcttcttattttttgagctcttggcttgagaaatagcttcttaaagttttataaaggcatcggctctatccacaaagttgttcatggtgtagactgctttgagacgaaggtatgatcatagaagactcatctccttgagtccagctatgagagccatgatccttgcatcctcactaagtattttggtcttagtggcttcctctaagaactgttgtatgtagtccttgagggattcgtcgtcttgttgctttacatctactagatcactaggttcgatcttgcatttttagaatggagcgaaatgacttacaaaatcatccacaagctctttccatgaatcgataaatctaggagcaagcttgaggtaccactgctgagctaggcgtgtcaacatggcaagaaagttatccaccaaacgccatctcttactccatgcaaattggtctgtacttcaaaatagtggatatgagacaatgggtcttcttacctggtgtattgatgtcaggtgagattcttaaacttaggacaaatctccaaagatctaattcgatttaagagtggtgagtgtcgctcttaatctaattcaaacattgatagctttacagttgtgattccttcactagggtagctagggaatcaaactcgggcctattgataccacgggtggtagtttgcatcccagttgggtcttcagttgcctagttgatggggtcaccgctagaagctcttgcttccaccaatcatcttttgttcaaggtgtcacataggtctttctatttcccaagttgatcgtagatattcggtgacctaggtttggttgctgcctcttgaccacggggttgtgaaggcaatgctagggctttctc

SEQ ID NO: 24489 - DNA, 4453 bp, Cannabis sativa
  modified_base (3027)..(3030): a, c, t, g, unknown or other
  modified_base (4190)..(4193): a, c, t, g, unknown or other
tcaacattgagtattggttcttcaatgtttgaatcactatcaaaccttccaagcatccaaaatataatagtatggaaaaaaatgattatggagagcaactccatcatactatttcatatcacccattatatatcatatatatcaattacatccaaaatttctgacatattttgggttcataatactagtggtggtagattataatttaatgggtcaatccataaccattaaggtgctattatggtttcaattacatgataggcactataccatgcatataaatatacagttatccttatcgacacaatgagagtaacgcttaattatgtaagtccatataaaatattctaatgttctcttatttggattacataattacatcaatatgtgctcactaagcaatagtgtcaacacacataagtctcaagaaacactaatgtccataaaacttattatgcatcatattgtatcaacaggatacaaatataatacataacaagacatctgagattcatataaaacgaggataactactgatctggatccactcaatcatagcaccgagactaagctactggctcgcatcaacaagtgtgcacacataacatcaaagagttgtccaaaatatgcatgtattcaacaaccaatagaaattcttaacatgtctatcatatatgaaaacaatgactaccactgaccatatattataacaatacaaacatgaaatgaattcttagtacacacgttgagttaagtcgtgttagtgtaatcattgacatgtctgtaaatacgtgttatgatactaatagagaaccccacaactttctctatatatatggaattcagactgtgctttctttctttatttttcaatgaatgtgtgatgatattttattaaaatttaaagctttatatacatatttttcaatgaatggttaaccacttatgccagatcatgattttcaccttcaatctatctctaatgcagggaggttttttaggaaggcagcaaaaagatagcttccacaacatgaaacatgcaatgtttgtgttagattgtaatttggtttgttatagtattcgtggttggtttagacttgttttgtttgtttggtttatgtgtttagtatcgtctggtttttcttctatcattcatgttgtttgagatgtttcctttacatcgtttttgtgtaattttctataatcacggttttcctcggccataagtgagggctgtgaataaacttgggaagaggccactcatggacatgtgaccttcgtctcttcttatgatcgactctacaatgaaaggcacagtttaaaaggaagattttactctgttctatggtgttcagtgtgtgtttgtagcataatattataacaatataagatttgaataaaacaaacaatcattataacaacaacaacatgtgtttgttttaagctttgttaccttatcgtctgagtagactcaaaaatggattcatggttcttcttcctcttaatggagtttgttagggcaatatatgtattattacttcatcccatattggacaagaaccaactcaactcaacttccgctttttctttaatgcatttctataatacaaacacattttttaattatatagaatagagtatatataatggtgggtcatgctcaaattgaagcacatccattttttttattttcctaagtttcttttttgtaacaatgttcatacaattaagaataagaatcttatacaaataaaaagatacataggaattatgaactaaaaataataacacaaaagtcttacaagtgagaaaggaattaatttggtggttccatatgtcaaaacaaggatggcctacctgagttgaaaaggatggcatgtgaaaaaaaacacacatctttaaaaaaagaataatataatttttattatatttcttttttgtaaaagtgtgatcataaaggttttggctgttgttgtaccccacagagcaggggcatatgtgataagattttttgaccatcttcactcatatttgctatcattccaatattccattgccattttctctctaagcttttttctgaaacaaactagctagctactgaagtgaagtgaaacatggctgaacttgtgattggtgcttttctctctgcttcctttgatcttttgctgaaaaagattgcttctccttatgttaaagacttcttcttcaatggagaaaatgaaaggcttttcaagttgaaatcaacattcaattctcttgctgcggttcgctttgaagtggagaacaagagaatcaaaaaccctgctgtggagaagtggctggacgatcttctggacgctgttgatgatgctgaggacttctttggtgatattgaatatgatgctatgaaacccaacaaagttgatgagtcaaagaaagaaaaacaaaaggcaattagtaagttactctcttgtttctccaagccttctcattcaattgatcgtggaagaaatggcaatatggaagagattcttaagaggttggagtacttagccaatcagattggaaacttgaatcttgaaaagaatgttgtcgaggtgaaaccatcagaaagttcacgtgtgaagacttctctaccagatgaacctgaactttatggtagaaagactgacgaagatgctttgatgaagttgttgatgtccgatgaagatagtagtgagaagatatgtgtcattcccatagtgggaatgggtgggattgggaaaactacccttgctcaaactcttttcaataatgaacaagtgaagaagaagtttgaatctagagcttgggtgtatgtttcagataaatttgattccacggctatgacaaaaactctccttcaagaattagccccgggtgatgctaatgagatgaatttgaattcacttcaggttaatttgtcaaataagttaatgggaaagaaagacgatgtttgggaagatgattatgctcagtggacagaagtgatgaagccttttaatggtggggcaaaaggcagcaaannnntagtaacaacaagaaatggaaaagttgcagataccattcgaactgttgatatacatcatcttagagaattatcaaaagatgattgttgggcactatttgtgaagcacgcttctagtggcaactcaagaaagtttattgagaacccaaaattagaaactattggcaaacaaatttccaacaaatgtaatggtttacctttagctgctaaagttctaggaggcatcttgagatcaacattggatctatggagatgggaaaaaattgctaggaacaatatttgggagcttacatgtgaaaggagagagagccttcctgctgccttagaagtgagctactactatcttcctccacacttgaaagggtgtttcgctttttgttcaatattcccaaaaggctatcaatttcaaagagaagagttggtcttattatggatggcagaaaatcttgtcatgcactccaaggggaatagaagaatggaagaagttggcggtgagtattttgatgatttagtatctatgtcattttttgtaaaatcttgggataggagaggttcatcttgttttgtgatacatgatcttcttgtggatttggctaaaattgttgctggaaaatatagttcattattagagcacaatgaagacattgttacatttgagaagaagactcgtcacctcggatgtgttatggaacattcttctgataacaaggtatctagctatgattttgaagcaacaaatttgcgaacctttttaacattattaggttcaagatattgtgaaatcagtatttctaaggaagtagtgcagaatctactatctatgttgaaatgtttgagagttctatctttccgtggtctttatataactcagctatctaattcaattggtgaactaaaacatcttcgctatttagatctttcttgcaccatgattgtgacgttgcctgactctgtaactgtattatacaatttacaaacactgaaattagaaaagtgtcaccaacttgcagctcttcccaaagatatgaatcatctcattaatttgagacatcttattatcagtggacatagcctagttgagatgccatgtcaaataagtaaattgagggatctccaaatattgacaacttttgttgtggggaaggatagtggcgctaaaatnnnngagttggcagaacttcaaagtctacacggagagctttccattaagaagttagaaaatgtagtcaatattaatcaagtcaaggtaatggagaaaaagcaacttgacaaactgagtttggcatggagtggtgttaatgatgttgttgttgatccaaaacatggagaggatgtgcttgaaatactttcaccaaacacattgttaaagcaactcagaattagtaattacccaggcacaaaatttccaaattgggttgggaatga

SEQ ID NO: 24490 - DNA, 1317 bp, Cannabis sativa
gttgaaaattcatattcttattagttttcttaatgttgcagttaaattggagtcaattgaggcattatgtgcggaaccaggctgcatgaaagtatttactaatgaacaatgcctcaaggatcatattcaattgtgccaccgacacattagctgcaaagtatgtgggtccaaacatctcaaaaagaacatgaaaaggcacctccgtacacatgaacgaaagagttcatttgaaagcatcaagtgcctttataagggatgtctttgtacattctccactgtaagattcgctctttgacatcgaatgttttttgacttgagaagatattaaattgttatttacctgataaacatacatgtcttacagaaatcaaatctgaatcaacatttgaaggctgtgcatttcaaccagaagccttatgtctgtggcttttctggttgtggcatgagatttgcttacaaacacgtcagagataaccacgagaagagcagttgccacgtttacacacatgtgagttttgtgcttgtatcaatgaaacagtaaacactccttgtctttagaaaatttattgggtatataaatctggtttggatctatcagggcgatttcgaagaagctgatgagcagttccgttcgaggccgagaggtgggcggaagagaaagtacccaagtcttgtagaattgctagtaaggaagaggatcactccaccaaatgacttggatggcttgttcgagtgctcagacaatttgagttgcgggtaggggaggatgaatgaatagtaaatatggtgtggtttttggtggttcatcctaatatatataagaaagtgtatagcgttatagtaatcacttgttaatcatgtaaagtatatcatctcaacagttctaacttctaattagtcaatgaagtagagtagtagtaatagtaagtggaattgttaagactaagagacagtatttgtgagaagtcctgactcgtattattattttctagttatcattatttgtcttggcagttggtaacttgtggctttggataaataatcacctaataaattacctcaagcattttcaaagaataattacattaataattgatataatacattgctcatttttcttaaatacaaaggtattgacgattttgaagtttcaaggaggctgcatactaagtttggctctctttcatctctggttttttgccttaggatttctaggaagattttagtgagaccaatttacaatttctaaaaaagaaaaacagagactaattttggtgatgagtttgatgatttcatgttcactgttttatatttttt

SEQ ID NO: 24491 - DNA, 1840 bp, Cannabis sativa
aacaggtgtacaccaggagagaaagtaagtagtgggagtagtggagatgaccatattaagtgctcgtgcggtcagcactgtggttgcaacccttgcacttgtgctaggagtgttgtctccactggagttggcaaggcctactgcaagtgcggtgaaggttgcacttgtgtcacctgcacctcatgaataatcatatacatgatatatatatatatatatagtcatgcatagacataacatatgtagatataatatatgtataaggctttttatgttatgttgtaataaaaactaaataaagcaaatatgttcatggggtcttttgctttcttcaatctttataatataccttactgttgtttgatttttctcctctattgatatggaaagttactgttctttcattccactcttcattttccgagtcaaaagacttctcataaaagctgacttcctcatttgactttacagctaatgctgaagtgcttctagtgccataacgtccctatgaatttgataaaaagacaaagttgagaatttcagtgtgaaaagcaaatttgacaataactgactaacaatatttgacttactaatggactgactacatcaacaaatatggaacttaagtggtactctttttctcgaggataaaggccaggcaataagctataatcatctttaatagtgttggtcattaacttctccactatttcttttggtggtagttcaccatcactatacgtgtttaacagctctttgaagttgtcacctagtcgttgagcctgaaaaagaaaaccaccaatatgattctgttaaatcagtctttgtttttactatatatatacatatataggtgagtaagagagaagggggtatgcaatgaattgagtaaatcttttctctgcatcaaaggggcttaagggcttccattacttgtaattagctttctgaaatattcaatatcagtttccatattctactccattgctccactactctttcattaatttccaactgtttttgcctattgtttggctacaagtttgagtaatttggcaacagaatcttatcagattatgacccagaaattctcatgcaatggtagttcacatacaccataactggttttgtggaagacattaatcaattatgatagaattagggaattgggcaagcttttccatgagtgtttgatgatataggagcaaagaaaccttctcatataattgttagaagatttattaatattttgaaacttctcccttgctctaaagcatttgatgaacacaacaaaccattgtaatagggaccataaagggctccaatctcaacttctaggaggaacaaaatacatatttgaacaccatttgagatagtaattattacccagaaaagacttcaaacctcataatttgtagaaacaaattaagggaaatggtaatgcaaattatgtctaaagataaaaagaaaagagagtaacgttaccttcttacctttggccatggagtgtctagacttgcattggacaacacatgaatcccaggcaagacaatggtcacatacttttgatcgtttttgagtctattggtcacataaaccatggtctttgaacatatatcagctaaaataaggttaaatccattatagtgatctgcctctttcacaagttcctccccaaactccactgggttcttcttgctctgccataattttaacccatgagactctctaaacaacctcaattaaaacaaaatcttcagccataattaaaaaaaaaacaatcttgacaagacatatatgatgaatacccaaagtagattaatggggtcctatctatata

SEQ ID NO: 24492 - DNA, 2359 bp, Cannabis sativa
aattctcaaaatcatgcaccaaaatctatcttgaactaaagaatatcaaagggaaggaggctaggatgctataccttggattgaagcactcaaactctgcaagaatttcactgaaatgagctgaaaaatccagaatcctcagttggtttcttgatgtttcgaaagagagagaattgtagaaagagagggtaacttctaggtttttccaacttttgcctccaaaaagattaatataactttttattacataaatcaaacttaatattctggttaataatgtccacaaaatgacaaaataaagattctaaagaaaatgtccatttttccccttaacacaaaacaaaggcaaacatgccacctaagggtaatttggtcattttccaaaccctgacaattttttgacacttttcatgtttaaccatgttgccccgctactaataaaattctaaaccatatgaaaacatgactctctaatggcccaacgtcgtattccactactaccgagcacaaatacggaaaataagaaatttcatacataacataattagcacattttgaatccaaataaatatccacaaatgcgtaaatcatgattaataacttaatttcataattaaaccataattatttaataacccatcatactaaagttaaactgtctttacagccttgttcactgatatgtctaagtttgtgatgctacagttgcatatgtaattacagcactttcaccatgcttgcttctccggttgcattagtttttccttggagaacgtataaaccattgatctttcacctttcatcactaccaaagaacctttggtgatccttaagcttctatgcatggacttatatccgtatccttcatctttaagcgcacctagggatataaggttttgtttaagctccggaatgtgccttacgcttgtcaacaccttgattttaccatcatattatttaatggtgtaacaccctactagattaggcatattattgtgatttcataatgatgtgccctcctttgctaatcaaaggtttatgggaaaacatggattttttaaaatattcttcattaaactttaaacttgattaattaaacactttacttaatttggcatcccgtttgtaaggttacaactgttgtacaaaatatttagttacaaaagttgtcgtccagtgactaacaaaataaagcctgctaccccaaaatcgaacacttcatgtctaactgccccgatatgtacaatattcatttgcttgtattcactactgtttagccttaactttgtctttacctacacatataaaaaatattttgagtcgacaaactcagtaagaaaagcataatcaaaacataaacataaactagattataactaggcacccatacacccaattataattctatcctgctcccacatgtactgagtctagaatgtttgtacgacaatactattgaccataatataagcctatactcggtactctagtcgtaccgatgtgatagcgtcaatcagtactttgccaaacatatatccgtcagtatttagtacaactctatgtacaccaatactgccattactaatatattatctaacaggcatttataaacatgcattctaaacatgtaatcacatatgatattattatactaatcttaccttgattccaaatttaggtgtgtcggtcaatctgagtggaaactgttgctcaacattttaaaggcccctaagttacaatatatgtaaaattgataagtgatactctaaataactttttggggacttagactaaaaactaaaagttttcctatcgctaaaaagcatgactaaaacctaattaccgagaaaacgttgaaaagtgagattttgggacaattagtaccccaaaaaaatagcaagccgtttctgtaaaaatggtagcccatttttctgggttttctgcctagaagaacggtagaccgtttccccagaaacgacctgctgtttctatagcagaaatgacccaaaatttcaaaactcaaccaaaacgatccaatctttcccaaattgtccaaaacacctaattaagccatagcaagcataaacaacctgaaaaaaatcatcatcaagaaactacaacaaaaattaccattaaaagtctaagcttgaggtcaataactaaactcaagcttaaatacacccactgttgtggtaatttgtacacgcaagtgtacgtatcgttaacaagtaataaactcacaaggagtgaggtcgatctgacaattgtagttaagtagtttaaaattaaatctttacttctatttggctatataaaatctaagaggaaattaaactagaaaacagtgaaaacagtgaaa

SEQ ID NO: 24493 - DNA, 4760 bp, Cannabis sativa
  modified_base (2418)..(2431): a, c, t, g, unknown or other
taaaaacttagtcagtcaagtttatgacctaactcaaaaatagtattttgtccaaccaataacagaagtatttttagatttcgaaagctcaaacatagtttctccagccaaccagagcctatgtattaagaaaattattgggcctaaacaacttgttaggagaggattgtcctcattttattaactggatcgaatatatatcatcaggtaaataaatcgatattaggggcaccaaacgttataaaactggatttgctctgataccgacttaagaaagttattggatctaactcaacctaataaagccgacttgttaggagaaaactgtgctcatcttattacgtggatcgagtatatatcatcagccaatgtgagactaatactttgtacttctttcaaaaatattccaagaactaaacttaagtgtctcaatttaatttgttgtcatgtttgagctagatctaactatttatatgttctcttgtggtttttgcaagcttagatttggtagaacaggaatttacaaggcctacttgtttggaagcccaacaatcattgtcacaacaccagaaacatgtagaccaatcttgatggatgatgcacaatttaagcaagggtggcctaaatcaacttctctattgatggggaggaaatcattcttaggcctttctgaagaggaacacaagcgtcttcgccgcctgaccgctgccccgatcagtggccagaaggctctttcaatgtaccatgaattcatgaaagatgtgatagtgagttccttggatgaattgtcaaaggcagagaagccagttgagttgttgactgagattaggaagatcacctttcaaataatcatgcatatttttttgagctgtgagagtaatcctggcccattgattgagactatggagaaagaatatgctaatcttaattttggacttagagccatggccatcaatctacctggctttgcttattataaagcactacaggtcaaattaatttgctttattaaatatcacaattattgttttattattgtgttcttctttagttcataactgttgacacatttcatataccatgaaattatgtcttgttaaagttattttgatctattttataaaatatcgcttaaaatacaaaagccaaaaatagtatttttgttaaagaaaaactggaattaacaagtaattattggaattttgttcttagaaaaattgtaagttcaactttgttacattacttatttggaattagtttaggagaacttgtttagaggaatgtgctacatattgtaaaacaaaaaattcttatatatgtcctttgtaatatttggtagtaaatatttatatggtacaggctcgaaagaacttggtgaagattcttcaagatgttatagatggaagaaaagcaaggaaagagaacaatatgattgtagaggataaaacagacatggttgacttactaatggatgttgaggatgagaatggccataaactagagaatgagcaaatcatagatgtgattctcatgtacttaaatgctggtcatgaatctacagctcatgccactttgtgggcaactcttttcttacatgaaaatcctcagtatctccaaaaagctaaggttggaatctatacatatggatgcacttacttaatatgcaacacatattggtttgttttgttttgttttcaaagtgattaatgttagtttgattgaattattttcaggcagagcaagaggaaattttgttaaaaagagcagcaatagaggaaggacttagcatcaaagaaattaagaaaatggaatacctttctaaggttacattaaattatgtatactatatgagtatgactagggccgggactggatatggactaaaacgttttaggccagagctcacctagcccagagtccccccagattttttttttttttttttaaaaaaaaaaatatatacaatatttttagtaatttttaaaaatactatatattttttaagtaaaaatttgaataatttttatttttgtaagactccgtgagagtatagctatagtattataagtattagcctctaatattaaaaataagaaattttaaaagctttttacttaaatatggtaggtttaactttttgctcattttttttatggtttttggtttttttcttttagcttttcttatggaatcagattgggataattataaggcacaatttttagtaaaaatattatatttttatgtttaaagatttttttttatatttttacgggttttcatagaaacaacacgaaaataataagaaaactatataaagttttataaaaataacatcaaaacaacaacaaaaaataacatacagaaaatgaaaaatcaacaataaattaacatgagtacaacataaaaagaccgtannnnnnnnnnnnnnaatcaaaaaaatcgtaaaaatattcaaaatttcgtgaaaccgtattttttatatttttttaattgtttttatgtatttatgaaataacccaattagatttgcgagagaagtgaaggtactgtattttagaaattacttttttcgtcaacaaactagtttttttttttttttttttcttttttataaaaaagttgatttttattatatagaagtaaaattaatgtataaactttaacttttttatggtatttttttttcatttacgatgatttatcttattttttaaggttttttttttttttttgtttaaatgtacaattaagtttgcatgagacatatatcaaaactttctttttttccccacatttttataaatatcccttaaaaacattatgcaaaaatttcagctcattttctataccaacattatagctctgtttgttgaattaggtaattgatgaaacactacgtgtggttaatgtctcattgttcacatgtagagaggcaataacagatgttagcattggcggtaactaagtcattaccattactttaatttttctttctctctacatatatagtatctcaaattagtaacaagtttctcttttaattaaggatacacaataccaaaagggtggaaagttctgatttgctttagaggaattcatttagatccacaatgttatcacaatccaaacgacttcaatccttcaagatggaatgtaagtaacacatataaaatgtagattttgtagtgaaattaaaagcatgaatatgaatttttataaggaataattacactacatactaaaatttctaacttttttacttttatactgtggagcgaaattattttaaaaaatactgtgtactgtgttaagttttcactgttgttctactattgttttttagttgttccactgttatttttagttgttctgttttgtgttccactgttattttataaaaatacaatattttttgaaaagattttcatgtgacagtatttttgtaaaaattaattcaaattttagtatttttttgtaagttttcatttctataaagtggtgtgaatatatttgtttttatgtaggaatgtaaacccaaaaaaggaagtttcataccatttggaacaggaagtagattgtgcccaggaagtgatttaactaagcttgaactttcaacttttctccattattttcttctccactatgagttagttccatttctctttctttttctcaacattattattaattgattatagcttaaatttggtaacaattgacaaaatttgatttcttatagggttgaaagagtgaacccaagtagtagcattagatacttaccacacacaagaccaaaagacaactgccttgcaaaactccacaagctacctcaattaaaagacaacaattgacaaatttcatttcttataggcttaaaaaaaagattggagccattaattaaagaaaattttgtaaaaaatatgtatattttgcaaaagaatttgttttataagcttagacttggtatgtctttagtccaaagttttgggtggctagaagtagaactacaagaaaaagaaaaaggttttggtttgttatgataattttcatgtatgtgtaaaatatattgtagtgtataatatgtgagactcgatatttaaatacatgttatttttataaggttttgtaatttttttaaaattttggtctattatataaatttttgttatttttatatacccaaataaacaaagtaaatatagaaaattttaaataagaatgttatattgtgatactggatataaaatgtattatgggaaataattaagattttaatttcataatttattattattactcattgaaattagagaagatacttaaactaattatgataataatagaaataaaaaataaattaagtagattattggagcacatgccttggatgttaacaatggcattgccatttgccaaggttggtataaataataatttatgatatacaacagaaatttgatattgatgatgacacaacaatttattaataataatatatatgccaagtaatgaatgactactctactcagccacgtctctcagccttaacttatcaatatcataacaaagattttggtatactgcacatgacttaatgagttattacaatctccactctcactcttatttaaatggagtagttggtgcatgtgtttgagttgcaatctaacaatactatcatcttaattatcttctcatgactcatgataatattttgtaattgcatgtagggctggttttagggtaagatgggttag

SEQ ID NO: 24494 - DNA, 1528 bp, Cannabis sativa
gaggtataaataagtagtgaaaaattaaaatatagctcatttaataaaaatagtgtgtcaaaaagtgatataaatttgacatatagcaaattttatgtcaaatttaacaaaacatttgctatgatgtaaaatttataccataataaatacactatttttttcacttacatttatgtaattttgattattttattagtatatttaactatcacattaaattataaaatatttatcttatttttttaatattaaattattttttttaataaaacattaatttaaattttatattaaaattgtgcaatgaaccacaaaactaaaatttagattttatgccaaatatagtaaaattttaacaagatgattaatgatcatatatacttaatacacttaataagatgaaagcaatccttctctaataagttggttttgctataagttaatataagttcgttttgttaaggttgttaaaaacttttccaatatgaaagtacttattattattactcattagtagtttattacaagtaaagctacaaattaagggtttgcttttaatttctaatataataactaaaagggatattacaaaatgactttatttatttatagctaggtagatgatttagtcttaatttataagatgatgatcagttttgaacaagtctaagcagcattcagtgttgagtcctctgtcccagaatttctgatagtaatcagcataggtgaaactcctatacactgccggattttgttcattgaccaaatccttggctggctccataatggcatctaaagatggacagtagaaagttggtactgataaacgctccatgctactgttcaccacagctcgatgaagcacactcttataccgatcgttgctaatcacctgattattaattaattaaacacaccaaaattaattactttaatggcgaagatataacctttgataccatttgaccaagcccagtattaatatattattataacaatgatataaggttgatttgaactccagtatatattcttaacactaagaacaaagcttgatgcgatttgtttccattatataatctatcatatatattttctgtccggtcccacaccgaaaacttttatggcaactaataaaaagaaatgaaaaatcacttgtacccttttgatcctgtatcttgacccacactttctaaaagaccaaaaagaaaatcagagaaaatgatagctttaaaaagttttaatcattgaattcatcacagtgactagtgagtagagtaggcttttattatactaattaattacctgcatttgatctcctatgttgacaataaaagtgttgggaatgggagtaacagggacccattttccatttctgagcacttgaagtccagggacttggtcttgaagaagaacagtaatgagattaggatcggtgtgaccaggtaatccataagtgagctctggctctggacatggtggatagtaattcaacgccatgtgttgaccatgcttccctaaagaattt

SEQ ID NO: 24495 - DNA, 1429 bp, Cannabis sativa
agagagagagagagagagccttactgaagagagggaaatcgaattgagcttaaactaatgtgaagagagaggcttgctgcagcgaaatataggcagagacttaagatcttttcaatggaggtctcgtcgatgatgaacaaagagtcgtgggttcaaggtttagaatatctaaaaaatcaaactgaaacaaattaagaagtttaaaattaacaaagcttaccaacaatagagagaacgaagagaaagaagggagctgctacttgatagacacgaagaaggggaaagttgcaaatgtgagaaacatagagatagaggcggctgagtgttagtgatgatgttaaaaaaccctaggtattttttgtatcctttattttatcaatataatatattaagtaaaattttccatgtatgtagggtttacatattgacatttggataaattttgacacatacgcatacacatcatcatttaatttttaataaaattataaaatgaaataaaagtgggaaacgagactttctccataaaatatatgtttgtaaaactctacacctacacaatttatttgtagcaattatattcggaaagtttaatgagatttgacttatatatgccaaccaataattagtaccaataaatactagtagctaaatataccttttatatacaaatatttaattgtaggtaaaatatttgtaggtaaagatcagatttcttgtagtgccacctgacacccgataatggtacaagacgaaagaccacctcctgcacctgccactcgcaatcacataaggcaaacttgtcccttgaggatcataagtgtatctcaggccattagaacctaaaaatatcctattctcaaatgagaggggtttagaaaattattgtaacacttgacttagagaaatatacacttctatcatactccatagctattttatatttcttctttaagttttcatatttacggatcttcatcttagtcctaggtcttacatttaagtttaaatttttcaactataatttggttgattagttttcaccgttaatatttaataacaacaacaacaacaataataagatatgaatttatcaattataaataagttaaaataataacaaaatttaaacatataatactaaatattataattatataattaaaattattaaaatatgaaaaattaagattatatattaatttatttatagggtgtgatataaaaatttgagtatttataagtatatttaagttctattaatgctaataattttcttatatgcttatccgtaaaatattggtgaaatgttatataaatataactaaagctataaaacatacatatactttagtaattgtaaaaaaaacgtatgaaaaaataaaggatgaaattaagcccgaatataaaaattggctgacctgtttaa

SEQ ID NO: 24496 - DNA, 2891 bp, Cannabis sativa
atgtaaaaaaaaaaaaaattaaacgtaaaaattttattttattttttacaaaaaattataccttatgtaattattctatataattttgtgataaatttaactcataataaatgtcattttttatttattgtaatgcaactaattattatgattcattaatttttataaaatttaccttctttatttatcatattactattatttaaacaataataaataataataattttgtatattctcaatataatatgaaataactattaaataataattaatttttttcttgaaaaaataataatttttttttaattatttatcaatttatgtattaaagctcacagttataaataatgacatgaactaaatatagtacaaactttttttttttttgtcaaatttaacaaattttagattttgtattagaaatggtctaataagtgctttacatacaaactaaaacgagttagtaattattaaaaatatatcattggatacgttgaccaatttctttttattagttgtgacaaatattttgaaaaagattgataggggctatatattaatgtctcataattagcttgatcaattggggtcagaagatgattttctttctttctttctatctactatccacaaataaaaagattacttagaaaccacatataattaaattcaaatcggaaaattttgggtctaaatttcataatgtgttctatgtaaaagaaataatgataatttatatgctgggtgtttaaggaaattaattattaggttggtttggtaaccattacaaatttttttacttgtagtcataataaaatttgcggctaaaagtaaaaaaattataaataactataaatcaatattctaatgttgtgactaattaaaaggtccgtacatgactaaaaatattagttataaaaaataaaatttattatcactaaatttgtttttagtcacaatacttgttgtgactaaaactaaattaataacaacttgtatttaaatattatattttcgtgtaattttttattgtgacgtaaaatttatgttgtgattaaacagttattactaaaaataacttttttgtaatgaacattcacataaataaatatttccttattataatacgagtcctaataaatatggtataatatatatatttgttaaggtataattatttaaaattagtgctaatgagaaatgccagctaccacactgatctcatctctttactagatcgatggtgacctacacccacattctaaaagtatttgaaaaagaaaaattggcatgtattcattgcattataatttatttataagtaataatttattaatatatggtaaacaatatgacatatagtaaagaaaaagaaacctttttgtaattaattaaaaaaaaaaaaagaagattagtgttacatgtttgtctcttaagcgcgtgggatatatatatatagtacaacgaaagggatatatatttataaactaatgaaatattttaagagtttaaatcatagacaatcactttcaaagtggcagtctccaaagtccatataactaaagaaaaataattatatatataaaaataattataaaattaagaaaggaagaaaagatagatagataataattgttgatattataatgataaaaataaaataaataaaaataattatggaagttgtgaaagtaagccaaaacaaataaaataataagaagggcaaagagtttaggagagaagggaaaaagagcataaaatctaggatatatatatataaaaaaacattagaatctgtacacaatctgatccagcgatgcaattattagtggctgagcaaaacagcttaaaaagggttttccgagatctctgatttctcattagctcagtttttgcctaagaaaaaagtttcttttgttccaaacgaattaaggaagaagaccaagagagagagagagagagatcaattacataagtttccctttgggatttgcaaaatagaataagttgtgtcttagtactaattatctagaagaagagaaaaatataggaggtttgtataaatagttagtcactggactagctaactagaaattaagagaagaaaaaaaagatcagatcataggtagagagaagatatgggaagtggttattttggagagccaaatttgggatcatcaaacgaaagaggtggaaatggaataataagtgggtcttctaataattcatcaaggaaagggaagaagtctagttcagagaaaccaagacaaccccaaagaggacttggtgttgctcaattggagaaaatcagattacatggccagatgggttgtgctacataataatactactactactacttatgccgctcatccttctcttcattccaccaattacccttctaatttcagtaacgtaataattctatactagctagacatgaaatttcctttattttttggtgattaattcatgatatttattaatatatgtatatatatgtatatgtatgcaggtcgatgatatgagactccatacagcttattcagcaataccatcgtcttctttttcttattcttcttcttcttcctcttcctcagcctcttatggtttcaatcccaatatcatggtacgtattattactgcaattattttgctaattatatatgaaggagacaaataaaactgcctcggcaattacttttattagtaatttatagaggaaattaaatcatataaaagtatttcttttcctttaattttatgaattatgaattataattaattaatattctgctagctgttgggggaatacatgatcgatttgtagagaaaccatatatatagtaaaaatttctcgatcaataaacactgtgtattcttcaaat

SEQ ID NO: 24497 - DNA, 2389 bp, Cannabis sativa
tgtccacgtggacaatccaacctggcagttaacagctaaatttagacggaagtgttaaattgctaacagtttcctggttttgggagtttacctgaataaatttgggttttgggagtttagtgaaaccaaaacgaaagtatcggaggttttgccgccatatacccgtcaaattctatcaaccaaataatttaacttagttaaatatttttatgcacaatcaaacattctctcctttaacattaaaattaatcaaattattttaaacttttcttatcgaatttctcttaaaatattttaaaagttaaaacaatatatataaccttattgaagtaaaaattaaaatatacatgtacaatagggttgcacattggatgtgcaaaaatattttaaatattagtattctgaatttcaggttttttaggttcaaatttttgagtttcgagtgtaacccacctattttttgtgctgagtctcaaattttcgataccgagttttgattgagtatggtgggttccacccagtatacccaaaattttaaaaaaatatatattttaaataaaattataaacccacatccaacttcctcaaccctcactcccatcatcaaacaaaaaaaaaaaaaaacctagacctgacctctcctatcttcctcatttatatatctatatatacacaacacatttatataagggtccttcaatggcagtgatcaaaattaattactacttttaataatttatttatgacccttagatcttaatctaatggttaatactatttttgtatttaaacaagaatattaaatacaataattaatttttttaataaaaaaatacataaaagataggcaacttgttggtgacttgttgtatatgtagtgattttttttttttatcaagaaaagtattttctattaatcaacctgaccagatttacaactcaagggaagcccctcatagatatagacttacaactcttttaccatattgagaacatacctatctatactagataatctcctttcatttataagattaagtctactctttagaatttctttaatactctcatatatacatcttagactcaagcatttgttcccatatacacatgtatttcgattgaaccatatcaataaattgcacctgctaggacaacaaataaattcatcctacatgagtgttctcggtctctttgccttgagccaattcaaagatcctcaaaagagttaggccaaagttgacttccaagccaactcttaatctgttgtaagactctccaagagtaagggcagtaaaaaaataaatgactatgtgactcaaattcccactcacttacaggaaaaaaccttgtatcaattggtatgtgtttccttactatattgtctctagttaggagattgttgtggagtgcttgccacataatggatctgtgcttcggagccgatagcttacaccaagtagctgccataaactcatattgatcaccacgtacaagcttatcataaatttattcaatcttaaatttaccagtaacccttgcttgaataatatcctccttgatgaagacatccctaagtctcaagagctttctctagtaccaacttacatcagtttttagctctagagaccagatgtctctatccttcaaataaatgttatttacccatttaatccaaagcacatcctgttttgaagtgattgcccaaaggtacttttttaaagtcgccttgttccatttaggtccctctcataatcccaatcctctaagttgttttggtttacaaacaagctcccaagaagccatgtgcaacttacttgtgttccctttttcaccctataaaaaattcttgcatatctgatctatctctttggccaccttctgaggaagctaaaaaatactcatccagtaacatctaattccaattaagattgtgttaatgaggagagctctacctgcaaatgagagatgacaactagcctaagtatgtaatcttattttgagcttcttgatgatggtctcacaatcctcctatctccgtttggttgctttaaggaaaaccccaagatattttaacggaagactccctgtgttaaaagaaaccagttgctgaatctcctgtctagcagttttattaacacatgcaaagtaaatatatgacttttggtgatttgctattagccctgaacagttgctgaaatttgagaaagcttcagcaatgcacttgactgaattagcatttactttgcagaaaacgattagatcatttaaaaagcataggttaattagcttcaagcttctgcagggatgataagcaaaatattccatcacaagaacgaaggtaaggagtgaagtagggtcccttgtcgtaaaccttttgcaccttaaa

SEQ ID NO: 24498 - DNA, 5653 bp, Cannabis sativa
  modified_base (1682)..(1683): a, c, t, g, unknown or other
tctttcttctttttcttgttggtaaagcattttgaacgaagatagagagttaagaggagaaattaaaaagtaaaatcaaaacataccctttatgttttcctttgcggcgaatgacatagtaacgattggaagagaggggttgaccaagcactggaacaaagaggacagcatcataataggtgacgctgctttctccactgtgtcttgtataagtaacagttagatctttgttttgaggaaaaggcagggccttgattgacctttgtttacacaaaccgaaacaagttgtggtttcacatttttcgtcaaacataaccaaataaccagaattcggaccctcttcgggtactgaattcagtagctcaggagaccttctaagtaaagacagaggccttgtcacgtacatgattctctcttgacttagaaataaaatcttccttttagtctactctttctcttatgtatgttaatgttatgataagtttttcacacacataaaaactctagaggtttagagaagaaagaagaaatttagagttgaacttggtaggaaggatcataaaagtcagcccaagtttgagatagatacatgtacgtggcttccttaacagtattactaagcctaaactataatatatatttatactaatgctaatctggtacgagttcgttagctcagctttgtttttcgtttgtttttaattacaagtaaaattaataaatttaaaatgatcaagaacacctgagtggctgactcttcatacttcataggataattggcgggtcatataaatgatcaacaaaaataaatcaggaaggttcgtatatacgtatatatatattatataatatggtttattcaattgtacagacattgttatactggcagctcaatagtcaatggttccgccctgacatgtataccttgttatattacttatatattaaataaatatgatgttgaggttaaaattgtgatgtatattatatattaataaaaggatagtatataatatatgtcgaagttacgtagtataataattactcattttgtaacttaggttacaaaattttgttagaacatatttgtgagatattaaaaattggaaacgtgtatttttaaagttcttagaggcagggacggaggtagaagttaagaataaggggagccaaaagataaaaaaaaataattaaggggggccaaatacataattttttgaacaaataaattttttaatattaaattgctttataaatattttttgtccaaaattttaggaggggtcatggccccttttggagctaaagtagctccgtccctcttagaggactaatctcatattacttgagaacacttatttgtaagtgtgtaagtgtaaatatgagcaattaagttcggctataagaccatttttaatggaagattttaaatttgtgttaaatttgacacaaaaaatgagtttgtgctatttttagcccatgtgttaaatttgacacaaaaaatgagtttgtcctatttttagcccactgtttacaattgtgtttcaatacacaagatgaaaaataaggaaaaaataattgattatattgagaatatacaaatttattattttttattcttttattatttaaataatagtaatatagtaaattaagtaaataaagtttagtaaaagtcaatnnatcataataattagtgacattataataattagtgacattatagtaaataaaaaagtaacatttattgtgggctaaatttggcacaatacaatattttgtgccaaatttagcacaacttttagcatgtgccaaatttagcacactttttataacattattgaagtatagttttcttaagtgttctaaaatatagcaatacaccacttttttagcactccattagagatgctctaagtggtacctatttttgtggaagaaggagttgcacaaaaagctcacctgaataccacgcacaccgtcattgctggttgtagtgcactttatttcttggagaaaatttatttattaaattaatatttttatttaattaattaaaacagtttttaaatgtgtttacttaattagtaagtaaagatgttttctcgtcctatttttcaaaatcattcctacaatctcacgttctaacgttcccatgatcagaaacgtctttctttctgttactatcttaggtatattccctatatgatgcattagaaccactgagaaaaatatatatttttctcacagaatatatatatatatatatatatatatgtatacaattacatacaattgtattgcattatgtattctgaacaatagtgttttgttgggtgcaatatttcaagcgttctctatcgtgtaatagagctctgatacaatggttcgattgtgttgttttatcctgggaacgatgaggctaatagtctggttgcacaatttcggacaatgccgcgaagtcttaaagagagcgaccttgtctgcgacttaaacccatatttttattcagtaattttgttcctctttattttatgcagcaactatttagtaattttgtttctgccatgactaccaatgagaattctagtgttattgatattaataaactttttcattttgaggaaaaccattttaaaagatggagacaaaaaatattacttttccttactatgaaaaaagttgcttatgttctaaccactaataaaactgttatttgttacactgctaaggatgatgaaaagtagaagcaaactattgggaacacttatttataagtgtatatatagtgtaaataagcggaattgggttgtacctcaaggagtatccactttcgtagaagagagatgagtcacacaaatgctcagctgaacaccacacacgcgcaccgccacccccgtctaaccgagttggctggtgtgcaccttattttttggaaaaaatttatttactaaattattatttttatttaataaattaaaactatctttaaacgtgtttaattaattagtaaatagagatgttttcttgtccttatttttagcattgttccacaatcccacgttctaatgttcccatgataaaaatttctttattcccgttactaccttatgtgcattctctatataatgtatcggaaccaacaagagaaatatatctttttctcatagaaatatatatatatatacagttatatacaattatattacatcatgtatttttagcagtagtattttgttgtgtgggatattttgacggttctctaccatgcaatagagctccgatataatggttcgattgggatgtttcatcctgagaatgacgaggctgatagtctacttgcacaattctgggtagtgtcgcgaacgtcttaaagagagcaacctagtctgcgactcaacctaggtttttatttggtaattttgttcctctttattttctacagcaactatttcaataattttaagacgatttgtttctgccatgactactgattagaattatggtgttgttgatattaataaaacttttcattttgagggaaactattttaaaagatggagacaaaaaatgttatttttcctcactatgaaaaatgttgcttatgttctgaccactaataaacctgttgattgttatactgttaaggatgatgaaagcataagcaaactgtaaggaacacttccttataagtgtatatatagtgtaaatatgagcaattgggttcggtcccaaggggtacccactattgtggaagagagaggagtcacacaaaggctcacctgaacactacatacatgcgttgccaccgttgtttgactgaggtagctggtacacaccttattttttagagaaaatttatttattaaattattatttttatttaattaattaaaaaagtttttaaatgtgcttaattaattagtaaacaacgacacttttgtatctttattttcaacatcattcccacaatctcacgttctaatgttcccatgactagaaatgactttcttcctattactatcttttactaccttttgtgcatttcctatataatttattagaaccaataagagaaatacatatttttctcacagaaaatatatacatatatataatatatatatattgttatatatgattatactatattatgtattccaagcagtaatattttgttagatgtggtattttgatggttctctatcctgtaatagagctcagatatagtggttattttttttttcactatgaaagaagttgcttatgttctaactactgataaacttgttgtttgtgatactgctaaggatgatgaaaagcataaacaaattgtcgggaaccctatttataagtgtatatatagtgtaaatatgagcaattaggttgggccctaatgggtacccacttttgttaaagaggaaagagtcacacaaagacacttgaacaccacacaggcgcgccgttgctgtcgtctgactgagctggctggtgtgcacattatatttttaaagaaaatttatatattaaattattatttttatttaattaattaaaacagtttttaaatgttttaattgattagtaattaaagacgttttctcgtcctaattttcaatatcgttcccacaatttcaagttttaacgttctcatgatcagaaacatatttcttcctattattaccttatgtgcattctttgtataatgcattcgaacgaataggaaacacatctttttctcacaaaaaatatatatacattacatacaattatattacatatcgtattcctagtagtagtgttttgttgggtgtggtatttgacggttctctatcttgcaatagagctctgatatagtagttcgattgggttgttttatcctggggacgacgagactgatagtcttcttggataattttaggctgtggctcgaacatctttgttaggctatttttagtctatgtttcgggtcacaattagagttatttttcgatgtttttggacagaattacgcttgttttctatggttttaggtttctcgtagctgttggacgttcaaggcttcaaaagtacaacaaaagacaagttgagccaagaaaaatgcagaaatcaggattggttcacctatggccgcgacagatttatttacggccgctgccaagattttggcagagagttgtatcccgaggcgggcccagtagccgcggcgagatactccaccgccgcggcaagggaacccatggccgcggtgagattccgtacaagtgagggtaaattcatcttttgaatcctggaacgggaaataaagaaagaaaattgcgaatacaagagagggggaagcgatttttagacctagaaagcagtcaagagcagctggaggagcaaagtggagaccgtgattcattccaccaacagtttctttcttccttcctttttaatttctttatgttgaattttatttttggaatggttatggatttgaatatgagctaagctcccatttaaggaagatggtgaatgttgtttaaagtttaccctagttaatgtcatttgccattcctgttcatgttggttgtgaaattattcttatttgtgttattttcatgtttaagcttgatcacatttttcatgttctatgatctcaattcgaaat

SEQ ID NO: 24499 - DNA, 3157 bp, Cannabis sativa
gagcaaacagcatgatccaatcgtcatcttactgctagcaactaataatcattattaaaatgaagagtacggtaggtcccactactgattccattgctcgtcactgtcattattcatgccgatacttagtaaaaaaaccaagttagtgttacataaaaaattttccgtactgtaacaaaccacaatttaatttactgagtggaaatgcagttacagaaacattatcaaataagaaaacccataaattataaagatatagagaacaaattaattccatcagtgcagaaaactacactttctcaagaaagtaaaaaatataatttgaactggccaatcattcaatttgaattcatttcttaaaccactgggaagcaataatgattacacacacatacataaagaaaatgacaacatcaaaatagtgaacttttctttatcccttctccaagtttcccactcactctactagctgaggacattaggcccaaaagtcactatacaaatgaacttgcttctttaaaaaatttcatgttcacactaagactttatagtgacagaatttttgaccaagcaactggagttctgtccagtaataatttttgaccaaacaaccgattagttactactcccatcgcattgtaaaattgaaagagaattttcttgaaataagactacatttatagaaagctaaggtattctctataaaaacagacaaaagaccaacaaaaaaactaaaatgtgttaataagtcatcattatcaacgcattcatgcaacaaacaaaaactctggaatattgttatgttttaaattcataaatggattgttgttcaatacaaaaaaaatgacatcagagaagagaaacctcgtcaaaattctaccagaaggatatttgtgaacagaataaaggaccagcctagttcattgctaaggtgaaaacaataacaaacaggggataggatacagcaaaaaactcaaataacaaacaaacaagaattctaatgaagtttctcgattcctggtcattacatagcaagctagatggatcataaatttatacacagttattagatatgaagagcatgatggaacaaactatcacctccaataccaatcaaatatactattactggtaaaagatgttgtgggtagtgggtactagtccggcagtccttatggtttcacattttttgcaatattaataaaaaacgtcgctaaagcttttatattttagagatagcatgataattaccctaggaacattgcttggtccattgtcttcaaaacttctgcttatgctggatccatgtatatcagtgatggctacatcaagagatgatataaggctcgaaggtaagttaatctgcgaagtttaagacaaatcaaatagatatagtttttcggtttaatgtaaatgcaaattgatggaagatgaattaccttatttagagaaacagatggaaaggacatgccaataaaaaatccaaagataactcccatgatagtaccaataacaactcttgcaccatcacttgatcttttaatcaatccactgatacaaaagagaggaaaaatacaacaaaatatatattagcatactataatggtgtctgcttatgaaggaacaaacccaataactcgaataaaactgcctcatacctgcggtgcgaatttgccatatttgtctggtcctagagaatcaatccaatagatgagactaaaatatattctttgagaaaattattaagttaatattgcattcttcatctccctttgtccctcaactgaaaattggaatgaaaaacctgaaacaaaacaacaaaaaagcctatttcactctcaatcaatgtccaatgtagaaaacaccaattatatatattaaaattcacactactaatccactcaataagcacaaaaattgtgttttggttagaacagtctgatcaatcacagccatccagactccataccaaaaaaaaaaactctaaatgtcatcatgcgaacaatatcccctgtttatacatacgaatttctcataccagtcatacatacatgctaaattttaggacaacattacaagacaaattaatcacataactgaacaaacaaacaaacaaacaatcaaaaccgttattgtgatctgaaaaagcgcaggcagtgacaaaaataagctgagactaaagattcaaaacaaaaataataattaagcattacaaattacaacattacattaatataacaaatgatgataataaaagaatcaactgaaatcagaaatggaaagaattccaaacaaaagaattagagatttaaattgcaaaaaaaaaaaaaagaaaaagaaaaacgaatgagagagaagaaagataagcattcttacagaggttgttcaggtagggtttcgtactcggaagagtttccgagcccttttctccgatcaaatgtacggaatgaaatgaattctcagagtttcaagagagagaaaggagtgtttgtttgtgttgttagagagagaaagagaatgttgggtttttaacatgaaatctttcctttttgtaaaagacgaaaatgccccctgtttcttggtttagaaatttggccacgtaatcagttctgccacgtgtcaacaagagaggtgcgctttctcttttttaacttttgttttcattgttgatgacgtggcatcacgtggttgccacgtgagaaatgaaatcgaccatttaactctatttttttcggttatataatataaattaaaaaggttatgttctaactgttttgtaactaaaaggaaaaacgaaaagttatgttctaactgtatgtccaatcagctgatgccacgtagttatctaatgatggaatgtttactcttatttaaaactaagagcattgctattgagcacagtggtgtctagcaccttctcgacatgtcgcattacgattggctggcgatattctctaaaagttattatattaaattataagggacttgatacttagttcgaccaataacgatattgacacttaggaaagttctaagcatcactagtactctttagcatttctctaaaattaaataggagtgcgtgttagggacaaaatcaaaggggttaaagtgtaaaaaagtaattaatgggggctatttaataaatttttaaaaa

SEQ ID NO: 24500 - DNA, 1974 bp, Cannabis sativa
ttaaacttttaattttttttttcgaaatgggccctaagcggtggtggcctaaggcgaccctctttcctcttagctcagggtcggccctgcataacacctttaggtcagattattattaagttttattttcacaaaaaatcaattcaaggtcttatttgtaccattttaaaaaaatacaaggtttattttgttatttaacaaaacaaaaaatctaatatataatttttgtaaaatacaaattctaaaataatatttacacaaaaattaagaagaatgaagaacaaaatcaataaatatgttactacacagcacatgattaagacacatgcatggcgaaaggtttttaatcgatataaataattttcaatttatttattattattattattttttttttttgaggaatcaatttatttattattaataaactttttccaacatattttacgaatacatgcaaattcatgacagtgaatcatcaaatcactcatcagatcaatcatacatcaagttgggtaattccaattcagatttcagactacaattatatatttaatcaaattaatccctctttcgagggtttatagtattttcagttttgactcacctcaccagtcaccataaagaacattcttattgtcaatataatatgtttttttattttaaataataataataataataataaagaatgataagggcattctatattagacttttttttacattctctagctatctcatttatttgtttttttttttttgactattttattaattttttattttttattaaataatatgcaccagtatctttcttttaaattctttttaataataaatatatactattttatgttataaataataaaaaacagcaactctttctttttttcaacaacaaattttgcagattttttttttttatatattatattattttttatttcatgtttattataatatatatatataaagaaacaactaaagataaaaaaaataaactaaatatgattatgtctaattaatggtatgggttagatcgattaactattattttattttttttaagtaatttttcttttcatgccaaaaaactaattgatttaacatatctattcttttataatagttgtgtttttttatttcttatatacatatttgattagagagaaatgaaatttgagaaaatgtaaaaacacgaaaaaatacaaattttttataaaagaacgatacgacgcaaaaaaaaattggtgcaaaatttatgaaattaaagaaatattttttcatatcttgaaaagtaaatagccaatatttattataaaagcaattaaaagaataattcattgtggtattattatctattaaaaaataaaattttaataaataaaaaaaattaatttaattaattttttttaattgtctgaaaaacaaataagcaagtaaatagaattacacattttaattatcaataaaaataaataaattaattattagttaaaaaaaataaatgagatgactcattttaattatcattaataaatactaaatgagggcttaattatttttaaatataatttaaaaagttatacatgtacctcaagtaaaaaaaaatatataaaaaaaaaagtgcaaaagaaaattcacttaattaccactctaaaaaaatcgcggtttgaattttattttaaaaaaagaaaagttttcagttttggaatttaatcagtttcttggttagaggaacagtaccaccgtacaaaaaatctagaagagagtgaaaggtgcagatctctctagtttttatatagctggtacaggtaggtacttaaaagctcatagactatagtgcatggcattttaaaagaaaattaatctcaattttttatgtcatttaattgtcatgcaaaaactaattatatatttgaagttgttcgtcctccacaatgattcagacgagtacagcatatatatata

SEQ ID NO: 24501 - DNA, 3036 bp, Cannabis sativa
tgctataaagagacagtttttgactagttctatttgataacaagagaaaagctataacaataatagatcatagatagagaacttagagaatattttgaaaaatgatacatcatttacatttgttaaccatcttctaagtgatgtcacttagtgtaactaataaattagttaaattattctatcagttagttagcttggtagtgttttgtaattttcttttgtttcttgattgtacctggtatcggtttataaataaaggcatgttcttactttgtcgagtaatgcattcattcataactctatttcttcttcagttcctttctttgctttctagcacaacttagattctcttactttaaatagtatatcatcgtcttttgactagcgtccatggagccttccacctctaatccgcatgctatgtttcctgctgctactgctaatcaaacaagtatttggaatcccttctccaattctctaacaacttccctaactttgaagcttgatctcaacaactttctctcgttgaagtctcaggttgttcccacggtcattggacatgatctagatcagattctgttccctgatatatctccccctactactctggtcaccggagcccccaaccctgaatatgcacaatggaaaagaaagactacctcctactatcttggcttcgatcgtccatgaccgaaccagttcttgcttccgtagccaatttcacttcatctttcactgcctcgcatgctttggagcaacgattctcgagttaaaccaaagctcatcttcttcaactgtaaggtcaattcttgcatttattgaaaaataatctctcgatctcggaatatgttgaaaaagatcagtcaattgcggatgcttttatgattgttggctcaccggtgacaaatcaagatctagtgctgcaacttctcaacagtcttggcccaaaatttaatctgttcgtgtctaacatcacgtcgagaagtgatcttctctcatttgaagaagtccaggccttgcttctctcccatgaaacatgtcttgaacttcgcaatttggtcactggtgttactctcaagatgcaagcaaatcttgcatttgtctcttcaagaagtggtggatatcgtcctcaaaatggatttagttgtggcaataacagtgataacaatggcagccatccttatggtcgaggaactagtgcccaattactctgccaagtgtaccttcgaatgagtcatactgcaactgtctcagactcttttggttaaaactgacattctctatgatccataggctttaacaactactatgatccctgaaattggcaatgatgaatcttggtttttggatattggtaccacaaaccatgtctcctttggcacaaccaacctggactcagccaccacatacaatggcaatgagactattgcagttggcaatggtaagaaatttctcatctctcacattggtcacataactatttcctccttacctcaaccaattcatttaaattttgttcttaatatgtctttaatgactaaaaatcttgttagtgtctctcaacttaccattgacaatgatgtctttcttgaattttataaatcgtgttgttttgtcaaggacaaactaacaggcactgtgctcctcaaagggaaggctaagggtggtctttatgaactcagtgatgcttcaagctcctttatccaatgtgacctaacaacatattccaaagactcttgtgagccttacatttgtacttgtattgtcattcaaaactgtctactgaatcttgtactattgaagatatcaacaaaagaaattcttgttcttacctacttcttctagtcaagtgttttctatttctaaaagtaatgacattgcaaactaggccgccttgcctatagcactctaacaaagattctacctcacatatcatataagagttcattaaaaaccccacaattttgcaaagcttgtcaccaaggcaagattgataaactcccttttcctgaccactagtagggccacacaaccacttgcactaatacacatgaatttttggggtccttctcacatcatatctaaagatggatttaagtattgtgtgtattttcttgatgattttagtagaatctgttggatatttcccatgtccttaaagagccaagcatttgacatatacatcaaatttaaaagccttgtggagtttggggtggaaaatagtgaccatttgcttcttctttactcatcaaaaaatttattttcaacacccttgtccaagaaccagtgagaaaaatggtactgctaagcgtaaacacagacaaattactggaacaggcctaactttgttggctcaagttggtttaggtatggagtattggtggcacgccatgtcttctgttgtgttcactatttatagacttccaacaccagtcattgggaacttgtgtccatatgaatgtctatttaagaaacaacctgagtaaatcttttcaaaccatttggatgtagttattttcctcatcttaaaagaccatacaatgctcataaacttgagcttagatctgaacaatgctttttcttggggtactcatctcagcacaatgggtatctttgtgagcatccagatggccatgtcataatctcaaggcatgtaacattcaatgaaactcattttcttgcaactactctcactgcagcttcatcacaagtacatgtatctcaccaattcccttcttcttcttttcacacttctaactgtggtacacatgcgaatactgctactttacatgtgcacactccataccatgaaatggctactgagaatttcctaccacccatacccgaccaatagctccaacagttaccactcaaattatgagccctccatcaaacactaaagccacattacccacaaatgaccaacctactatcactccacaaactagtactcagaactaggggtgttcattggatcacatccaatatttttaggcctatccaaatccgatccaattatatattggatgttagatt

SEQ ID NO: 24502 - DNA, 2222 bp, Cannabis sativa
  modified_base (2180)..(2196): a, c, t, g, unknown or other
acacagtaaaaaagtaaaaataccgtctgacagtatttttgtaaaaaaatggcaaaaattagtataccatgtaaatttccctttgtttagtgtccatgttttgttatttaggcttgtttttctagaatgatttataaactgtctatcttcttaattttgtcatttgaaataacttactacttaattcaactattcatatataacaagaatactgtttatagctcacactctgttacagttgttacagtccggttttcatgggattgtatccctgattttatgggatttagttttcccttttttggcagcctttataaggcctttattcattgtattttaattcattcattcaatatcaataaaatactttccctttcaatccgcaataatatattcctgctagggcaaatgctgagcttgaaatcatttttgaatgaaatttttgtctaataatatattgttcgacttattcaccctcacaaattatgtagagaatttagttatgttagtgttttgttcttattagaaatgcaaactaaattgaataaattaattaatattctagtgtctaaaagttctctgtgtggattatgttatgcatttctcatgtgttaactagtgttttgtagatagttatattacatttagtagcttgcttgcaaatatcgtgtttggtgatatttataccaagtcttaacatgatcatgatagtgttataatgttatagtaaatactgttgtgtttgtctatataagaaaaaaaaataatactcattatctaaaattatatttttttcaatagaaatctaaaactaacttaaattttagagaagcggctaaccaacaacaacctctaattttagaaatagttgctgaaggtcgttggtgttctagtgatccgaacacagaggttcatgcaagtgtgggttatgttatctcaccaagtgcctatttgttttgtcctagccactcgatgattactatacaagaagttgtcgactctttaatttgttgcatggccatcaatcggagaaggttgtttcaagatgttaaggttagtttttttgtttatctaatttaatgatgtttgactaccttgttttgcactatctgaaaacagagtcctaaattggttaagcgcaaggttagttttctttcagatttctgggtgcctgtaaagtttaatcaagaatctcataaatattaaggtctaaacagttcaaccattacacaagaaccaaactataacttttatgtattgaaagctcttcaccatttttagatacagagctgaaaacaacaatagtaaacatatataggactaaaggcacaacaatatgaagtcaaaatagtgacaaatactataaccaaagagacaccattatacattatacatccctatagtccataaattaaaatatctcctccttatcataaaaaattattaaaatttattcattttgaatttactacaacatacaaaactgtacaaacaggtaactacaaacacattttctatattgattcattcttctttgttgcagatttattatgattcattcttctttgttgcagacttagtttttttatattgattccttctatattcattcttctttttgttttttccatctattttttatatttatttgtttatgatatctttatgctactgctgctagagattaagcttccttcaatccaaatctgactccgacacatacatatagtagatgaggattaagttcatggaataaagaattttaccaacattatagagttgtgtaattaatttgtttattgttttgtatttttttagagagagaacgttatagatttacattaattaattaatttataaaacaattaaacccacatctatctaaaaattttaatttcttaaagaaaaaaaaaatctataacgttctctctcataaccaattaagaatatatatctctcaaaactcattacacattcattgttgagaattgggttatattattatgtgaactttacatatttatacttaagaaaagtaattataaatatgttagtgaaaaaataatatactcaaattctaaaatttattattatatatgactaaatttagctattaggttaaataaaatattaaacactctaaaagtacgtactttccttatatatatatatatatcttnnnnnnnnnnnnnnnnntatctaacggcatttcttggtttaac

SEQ ID NO: 24503 - DNA, 3753 bp, Cannabis sativa
atgttagtaattaaaagcttcaagcattgtaggtgtctatcacctttttcagtattacatataattaagtattaagtcttatataacttaagaaaatatttttttaaaaatattactaactaatcataaaatgccacttataaaaatattaaacactactaatacctattaataatactcatttttaagtggctataagcgtgttgggatgagttgggaatggaccatagttagaaaagacacatttgattccattttctatgtcctcactcctcaacaaaatttaatctctttattaattattattattattattattatcattatttctatgccacgtcatccattacatgattattattattatcatcatctctttctctcatgaatgaaaggtcaattcattacactattatttttaatgattaaaatttaaaattattcatcaaaggcttggtcatgcatgcattatataattcaatatcattcacatttagtaggtgtgtatgtgacatgaggaatggaattagatagtgtgagtgatattttggacaaaataataataatattataaataagataaaagagaaaaaaaaaattacatgtggaaattaaataaaaaagtatatttatttgttggggacataatagtaaaaatttgttaaaaaaaggagtaaagtgtaaaagaagaacatataattaaaaaagaagttagtggtgggacctatgctcattagtctaatcctcttaaatttataatgaaaattaattaaagaaagactatattatagtagtgatttttttaattaatattactactaaatataaaagttaatttgactttttgttttaaatttttttctttctataacatctaacatttagttcatccaagaaacttataatacatcaaaataatcaatattgaaccaattttctctctaaaaataaaaaatgaaataataaaaattgcaagttgtgggtttaattaaagcatacttggtggatttgttgttaaagggtccaatgatattgacataaaacatttattggtattcaataatgaaattgatataaatgtatcaatgtatatggttaaaaccaagaatcatttttgaacttttccttactttgctttcttaaaagagccaaatgaccttttagtcttttcatatgaagcataatatatttatgtatacaaacaaataataggctctatttatattatgtgactacacaaactctatgtaacaaaaaatattgattaattggaacatttttgtttgattgtcattgataggtttcatctatcataaattcattcggatttgaaatctaagcactttttacatctttgattgattgtcattgacaaatttaatttgttagaaatttattggatagaaaatctagtacttttcacattcttttaatatttcaccgctagtagttaatcctttaattgaaagtaatattaaggtttgctttcttttatttttgttgattcttctcaatgagtgatatcttcttatatggattatatttaatttattaaaaaaatttaactaagtaatctatacaaaaattgtttgtaagctagctaagctaatgcttgatttgagctaaatcacaattaagagtggaatatggacaagaatctagtattagtatactacaaaaatagcaacttttatttttaggaaaagaaaatatataaaaataaaaatacaatatttatagtttgtgacaaatttaagtaaaggatcacatcacatgggtttgataatattataagttacattaatatatataacattgtaagttcttcgaacttcacatataataaaaattgtttatttataaatactaagcaattattgaaacaaaggaaaattgaattgattttattcgagattaattatttttgaaatattattattggacattagtggtacttaacattttttataagtgggtcttacgattagttaacaatattttttaaagctatttttttaagttataaaagactcaatatttaattacaacaataatagtatgataccgagaagaataattttttttagcaattttatacaactaaattttaaaataattagattattaattatgggaagaaaacaaagcaaattatacatttgattctattgacaagcacaaacgcgttttgatgaattaaaccaaagacattaaaaaaaaaacatttatttttttacattattttatatgttatgtaatttaaaaatatttttgtctttacaaataaatcccaaacttctccactcttcctataaaacagaagaaataatagtgtgtcactttacatttcaatatgtgaaaaaattgtaacttaattttagtatcatacttgtcggtgagaaaaattataatatcaaagatagaatttaaaataattaatcaaacgcatataaaaaatatttaaattatatttttagtattataaattattttatttttttaaaataaatcatttaaattaatagtataaataattatacatatacaaatttattataattttacttaaaataaagatattcgttaataaaaataaataaataaataattacattcaatgtgattaatattattttagattttatatttataaaattgaatattgaattatttattttgttaataataaattatattatgtattttttaaatagtacgaaataatattatgagcttaatttttaactatttatatataaccaacttgaaatagtttttagtgctaataaatgaaaaagatataattaatttttttttaacacttttagaattaaattttattttcacaaaaaataaactcaaatattattttaaaaaatataaaatcttatttattcttttaacttatattttataaaatagatcaccccattaataatttttacaatatatattattaatttattaattaaatatgatattgcgtgtcaaatatgttcatcttcttgtccatatttcatattgatcttcatctacattatccttatagtaaatttcaaatgttattatattctctcataaaattaatgcctttcatcctaatttattagccactctcttcatgccattacatatacataaaaaataaataaataaaattatatttaattttctcaaaataatctagattcttcttttcaaaaaccacatatatattcaaaaaaagaaaaatcatttctctttcttaatttttcctccacttgtaaaaattacaaaaacctttctacctctttcttctgcattttggtaagaatcttctccatcatcatcttcttcttcattttttttttatatatataaatatttttataattacataaattatataatatgtggttttagaaataaaaaaaaaaaatcagtttgattttgttcttgtaagctttattccatgaattttcaaagcttttttctgacaaagattctcactttctaacacaaaaccctcaaatccgaactgggtttccttccatggcgatccacaatcactcctaggatttcttttctctaattcaaaattccccttttttcgtttgttacagacaaaaatggatgaatcaattgtttcaaggtattggtgtcacatgtgttctcaaatagtcaatccaatcatggaaatggttgaaatcaaatgccccttttgccaaagcggtttcatcgaagaaatgaacaacaacgaagagggttcagata

SEQ ID NO: 24504 - DNA, 2728 bp, Cannabis sativa
ttggatataatagaggaaagagtggaaagaggggaggatcataaatctgtttgggcccacattttttttttaaaataaaagctgaaactttatttaagcgattcttgcacaattacatcgagcaatcgaataattacgctcagcatataatcatgaaactcgagcaagattataagccacacggttagcagaatatttaacaaaacgtaaacaaacattattcaaatttaaaattattctcttgcattcaacaatgcagcagcagaaagaagagtttgtattcactgagttacggaaagcttgaactattatagtttgtatttactgagttacggaaagcttgaactgttatagtttgtattcactgagttacggaaagcttgaactgttatgaggttatccgtttcgacggtaacttgagaaactctagattcctttatccagaacctccttcactccaaaagcctcgtcaagagccggattgacacaaccacttagggcacacattttttgatccctcatcttaatccctcatcttataggcagaagagaaaggaaggaaacaaaaagaacattaatttgtattgtatttaccaaaaaaacattaatttgtattgtttattagcactatattatttccatctttccaactttcattttaataccaaacaagggtaattgataattaatttatcttcctcccaactcaccaaacaaaactttcaaaaatatatatatatttaatttattcatattaatttatcattaatgattattattaatttttttttttggttatatttagcacatttttttttaccacagatagtttaagactctcaaatacaagatttaaaatttgtactaaatttacttcaatataatataagtaaaaaataattaattatattgataatcatttaatattttattgagaatattcaaaattattattattatttattattatataaattatggtaaaataataaatgagaaatatgtagtcttttgtcaaaattaataaataattagtgatattatagtaaataagattaaataaaatataaatatttattattatcaaatttaacataatattatatattttgtgtcaaattaaaaataactttcaacattaccaaatttattaagcacactttgttgagcactatgacatttattaacactcaatcacaatcacaagaagcaagtattaatatccatttttttttttttttttaaaaaaaaaggaataattaatatttattattattattatacataaagcacattaattatctactccaaattcaaatttaatttagttattataccaaaagtggacccaccatgtcgcataacattaatgtgatacagttatatatgtatcatgaacttaaaatgagagacgattcagtgaatccactcaatagcttaattcacctccaatctaatatatatatatatatatagaaatgctaaagggtaacattggtgccttagcaccctcttacgtgtcaatatcgctattggtgcaattaattatcgagtctcatatagtttaatataataatttttatggagtatcgctaaccaattgcaaggcgacacatttagaaggtgctaggcaccactggtgcccaataacaatgctcatatatatatatgtataataatttcgaattatatatatatagagaatgccaataaaatgttaaaacaaaaaacgacagataaaacaatatgaataacctactacatttacaaactaactactcacactcttttgcatgctgcctatgattgagaatagatattttctttacacttttctatagcatggttttaaaatccaactaagtgccacctcctacgcctagcccaattcttttctatttctactaaaattaaaacaaatatatagatatatctaaccccaccctccaataattaattgttatgttaatttatgtatatgttgtagcacttattaaagtggacctatttatttatttttttcaattttactttgtttttaaatatttataggaattcctttacaagcatgaaaaaacatgattggtcaaataactaaaaaagagagagacaatattgttgaaatgcaactctagtctcgaccacatgactagtcaaagccgtttcaacttgtgtatagtgcaacagtcgttattccatgttcgaatgtgccttaattaggatttatgttgtttttttagacaaaaaaaattatgttgattttaattacacattattaatgacattactattgagaaatatagtttttaactctatgacttcaatcaattttttttaaaaaaactctatgacttcaattaaaaagataacataataaggtgttttttaagatattgttttttttttatgtattttttactatctaaaatttttatttataaaaatactattttaaaattataaaaatataatttcttaacaaaaataaaaaaaattacgaaaaatcaacctcaaaataattataaaacaattaaaaacaacgggaaaattaacatcataacaacaaaacaaaaaattatcaaaaaattgattaaaatctatatttttataaatacataatttaagccataaaaataaaaatttctccttattaatatttttttattttttagtctattatataaaaaaaattcatataataatgatgaaattccacccaaaacccttt

SEQ ID NO: 24505 - DNA, 2652 bp, Cannabis sativa
aataataataataataaaattaggtaccttggagaaccttttggtaaacatgaggtgtttgagccacatacttgatgaaaaaggccatggtagtggcaacagtgtggtagccagcaacaagcaaacccatgaccttatcagcaatctcagcctcagacatatacttcccagaagggtcagtggccacaatcatatggctgagtacatcattcattggaccaccacgactaatggcttccttcttctcttgaatcacaccattcaactctctcctcaaaatgctagcagccttagtggctttataaaatcttgtccctggaaaattcaccaccatcgaatgcatccctacagttactttatcgaagttctctagtagcctagcaatcctctctggctcatcaatacccaagaagatttgagaagctaaggtcaaagtcagaattttcgttacatggtaagtcttgacttgggccttcccctcccaatgggccttcatatgttcttgagttatggagtccattttcgccacgtaatggaccagtgcttcgggcttcaagaaccccggggagcgaaggatcttcgcctctttctcacgatcgagctggatttgggccttatttcctgagggtttgtagaatgggataagttaaagaatactttttttttatctattaatcaaaaatactctcataacttttttaaaatatatctacttttttaatatatcatcactctctacttaaatctaatatacaatttacattaaacttacgagtctaatagggatatcatcaataaaaataggtatatcttaaagaatatgaaaataaaagtaaaaattaaagtgggtataccatgtaattttttctcgtgagattggaacatgcgcttcatggagtcgggtcggaagttcgtgaagtacttttgctcgttcgagaagaggaatttgaggcccttgggcccacaaatcacaatcattttctctccaaaaagattggtcttgaatatatctggggaatactttttcattctcttcagcacaaaattttccggcgtgcaaaataggaactcgatggtttcaccgattatgggccaccccatgttgcctggtggaagatcgtcattggaaaatttgaaaatgactttgtaaagaactaacaaaactggaactatacagaggatgatgaggtaataaagagtcttcatggtgttttactttcaatgataataaaggaagtgtgctttggttttatatacactttccattttagctttgtaaatgaagttgataaaaaaaaaaatgggtatgagataggagtgtttgcggtgcgggttgtaacatttttttttaaagtaaatgcaatttttgtaatttcttaaactacaatcgtaccgcgagatcttaaaaccgtaaaaactatattgcgaaaataagatatggtgcggtgcggtttgaacagtttacactatcattataatcaaacattatagtgaaatttaaaaattaatctataaagttttaacaaaaaaaaaaattattaaaatattcacattataacatgtatactaattatcaagtcattttactgaattgtctttaaaaaataatataatatatacatatatttatttttatatgaaaaataataaaaaatcatattgtaaaaattaataactttataatatatattgcgatgcggtttgaattataactattaaatttaaaatcacaaattgtattgtaccatgcgattaggtaaaaatgcaaactataactgtaccataaaaaatttcaaatcgtattttttatacggtgtgatattgtgatgcggtacagacaatttatggagtgtgacggtttgataaacatcccaatgtgatataagaagccttaatgaagaccatatatgtggtgtcggatgagttaatgagataagctttgaaactctcacagtccttggaattcaaatacataactttgcaccaccattatttctcttcatcatatgctaatctctttggaagttgagcaaaaatgtggttgtagattttaatggcaatacctggtttgacatgttagtctaaaattacatgagtcatatatgttttgatgtcaaattttgagtataacacatttcattgctactcatctactttttttttgaaagaaaattcaactttatttatccttcaaattcagcaaccacactaggaagcaactcagttagggtatttcccatactgaaaacacgatcaggatgtaacatagaagctctagcaaactcataaacgactacattagctgaccgtttcacaaaattaaaagaaacattactaacttgagtaagctactcatctacttaaaacctgagagatgtacatcttttgtgtttttgatgtaaacacatttatcacactcattgatgttaaagttattggttatcataacacatcaaaattttcatgccattactttagtgtttgtttaaatccatatataaaagactttatcaatttgcataccttcctttcttgtctagtaactacaaaactatatggttgttccattctatgtatatttcttgtggtatggtttcacactattttgtttatagtacattcgattcacactaaatgtgtatattatatttt

SEQ ID NO: 24506 - DNA, 1076 bp, Cannabis sativa
tgaagccgccgatttgcacgagtcacaaggcttccctacgataccccaacctccaccgccgttaccaattaatcccatattcttctcttttattttttaaactattttaattttccgtcaccgttaccgtaaaacgccgtcgttttataatttcgacgagaatagaaagagagagtttcttcttattacttctcaaatgaaatgaaatgattttgagttattattattagagaaagcaaagcagagtagagagtagtgtttatctattaagtcagagacgaagaaaatctttgggctagcgaataggaatggtacacgtggacaattcctgtccatgaaaaaaatgttttgttttagataaattttattaattttatttttttttactgttttaacttttttattatttacccaatggagcaatttcataaaaacttttaatatttatttcggattcgttgctgtcaaacgtctgtgccgacgcgggtcccacacgtgtgccatttagacatggataagtgcgactggggagtggggatcgatccaattcaatgataaattaccgatttaattacaatttatcgtcaaatattaaatatccaattaaatagaattaaatgttggatgtagtatttaaaaattcaatacattttatatctgaactaattaatgtttttatttaatttgcataagtaattaaattttatgttgttatatatataatataaatgtatatattaaaattaacattaaaattttactttaaattttctttttttgaattggatggatctaatccaatccaatacatagtgaatctaaaatatttgatgaattcgatccgatctaaaaaaaaaaatattatgtttaaaatattagataaatgtgaatggatagaaccaatccaatctaatatttaattgatgttagatcgattagataattgaaattaataaatcagatcggatggtaaaattaaacattcaatatatatattgactggatctaaataaatttaaaaatattgaatgtggtccaataaaatgagaattgagaaaaatgagtcttaattttaa

SEQ ID NO: 24507 - DNA, 6559 bp, Cannabis sativa
ttaaatactattttaatctggatattacaattgtattgtattatattgaattgtattgtagtagtattatttaatacaataatatgtttggcattgaatatttgtataatagattgtgtaatgttataatatataatatattttccataaactcgacccaaacactgactatgggttgggtccgggtcccggtccagctctgtttctcggtccgagttcatgtttgttttcggtccgggtcccgggtcccaggtctagctctcggtctgggtcccgggtttgggtttgggtccgggtctggatctgcgtccaagtccaagtctgggtccgggtctcgggtttgagtccgagactaggtctgtttcccgagtcctaggtccaattcgggtcccgggtctgggttcgggtcccgagtctgggtcaaggttcgggttcgggtccgggtccgagtctgggttcgggtctagatttgggtcatgggtctgggtttgggtcccgagtctaggtctgggtccgggtccctggtccaggtctgggtcccgtgtccaggtctgagtttgggtcctgggttcgggtctgggacctgggtccgggtctcgaatcccgaatcccgggttcaggtctgggtcagggtccgggtctacgtctcgggttcgggtcccaagttttgggtacgtgtcctaggtttgggtctatgtttgggtcctgggttccgggtccgtttaggtctgggtctgggtctaggtcagagaattggattgatcctggatcctttgtaaatattataatacaagataatacgatccatttatgtattaaataatacaacttacattgtattaaaaattttagttataataattaatacaatacattattttattcaaacataatgttatttattatttaatacaatacactccttatatgcccaaccaaacgagccttgggtgactctatttgaagatcgtttaataaaaaataaaaaaatattttattaagagaagaaattagtaagcgacaatctctcactaacaaaccaaactgtgatgacatatgaataaaactgttcactggttgaaccacaaccaaagcatccaattcaaccaccgtatcaaaccaacctttatccaacttaattaaattaagtacccctatcaattctgcaattttaggttgaactgaaccacactgcgactaattgaaacaggctcaatcagttttcctgcagggtcaagggtcacacaaccaaaaccatttttcaagttttaaaatgaagagcaatgtttgttctccacaataaaatgaaagtgtctgtaaaatttttgtacaaaaataatttttcaacaaagagtagtacatgtgatgactgatgtgtaatgtatgacaatgtatattttagttatagtagatctcttgttaattttgaaaaattctaaataatttagaatctttttaagttactagttaaaaatatggaatataataacaacaatatacacatacaatcatatcaactgaaaatagattataacttctctatttgccaaaaaaataataaaattatatacatatgtcttcagacaataataacatagggtatactaattattaggtaataatctagtaaataatatcacattatatttaaattaattatagtaattataaaaaaaaaatggaaaaataatatagtttgataattaatttttgaaatgaaatttttagtaattatgtaatgtaattactacacttcattctcatgtaaaattgttgggaaacaatcgatttctactgatgctgcataccatgtatgattgcacagtcgaactgaatacagttctttgaaccagaaagaaaatgagagagagagagggagttgggaaaaatagtagtgtttctattgtattaattattatcaattaatgaatacaagttacatcattaaagggtaaaggttcagtatatatagcttgtccaaaaataggaaaaagctaactgaaactaactaacttctactaacatgctaactaaataaaccgaccatttattaacaatttccaccttggttgatttattcagtgtatacaaaagaatgtatttgagattaaaacaacagtaaacagaaaattacagatcacaagtggcaatgatcctaagtaaattcagacaatgtctgaatttggcagtggtgagtggcttggtgagtatgtatgaggcattgtcctttgttgaaactttcttgagcttcacttttccctctgctatgacatctctgatgaagtggagccgcacatcaatgtgcttggttctctcatgatacatctggtttttagataagtgcagagcactttgactgtcacagagtatttcgatgcacctttgttctagactaagttctctgataattcctttaagccatatggcttctttcactgcttcagtacaggcaatatattttgccttagtagtggatatgacaacaatgttttgaagattttctttccaattaactgtgcagttacccaattgaaaaacccagcccgattgtgatcttcttgtgtccatatcacccgcataatcagaatttacatagcctttgacctctgatgcttaagagtttgaaccatacatcagtcccatgtcatatgtgcctttcaagtacattaacacccacttagctgccttccagtgctctatccctagatttcccataaacttgcttatgacacttactgcttggctcaaatcaggtctagtgcacaccatgatgtacatcaggctgtctaccaagttggagtaggatatgttcttcatgtagttaaggtcagagtctgtagtaggtgcttgtgagtgagataactttgtcatgtgtgtcataggtgtgctgactgatttaacctctaagaattcaaacttctgcagcactcttgaaatgtagtccttttgagatagcatcagcctctttccctgcctatctatgagtatctcaatgcctaaaatcttcttggcatgcccgagatccttcatttcaaattcaaaactcaacatgtctttcacttttcttatctcactcatatgtttgcttgctattagcatatcatccacatataaatgtagaaatacagtactcttggtattggatgttttgacatacacacaacagtcataggcactctttttgaaacctgatttggtgatgaaatcatcaaatcttttgtaccattgcctaggtgactgctttaggccatacaatgaccttttcagcaagcaaacataatcttcttttccctttcctacataaccttcaggttgctgcattagaatctcctcttccaattcaccatgcaagaaggttgttttaacatccatttgctccaatttaaggtcatccattgctgttagtgctaggattagtcttatagaggtgtgtttcactactggtgagaagatttctgtgtaatccactccttctctttgtgagaatccttttgccactaaccttgctttgtatcttacttctttagagccatgaactccatccttaactcttataacccatttgcaaccaactactcttctccctgcaggttataaaatcaaaatccaggtcttgtttttctttagagattctatctcttcatccattgctcttccccattttctcttgtcaactgacttcatagcctcagcaaagcttctaggttcatgctcaaattgttctatgtttagagcatagtgaatgatgtttgcaaagccaaatctttgaggagctttgtgaggcctcttgtccctgtctcttgtcagttggtagtcatggatagcagtggccccttgatccatttcatcttctagttcttcctgtagtgcttgtgtgtcatctgtttgtgcatgtactgcctgttctggtgttgaattatctgatagttccacctcaaactgtatactctcttccctgctgacattggtattgttgtgttaatttttgagtgtgttcttgtacactttgtcttcctcaaaaatcacatctctgctgataatgaacctgttttggttccctagttcaaggctccaaagtttgtaccctttaactccatctcgatagcctatgaatacacacttcaaggctcttggatccaacttcccttttctgtcatggacataagcaatacaaccaaacattttcaaattttggtagtttgcatgatgtccagaccacctttccataggagtttgaaaatttgtagctgaagagggacatctgtttattaaatgacatgctgtaagaacaacttctgcctagaaattcttgggcaatcctaaatagatgagcatgcatctaaccctctccatgatagttctattcatcctttctgcaagttcattttgttggggggtctttactacagtatggtgtctcataatcccaacttgtttacaaaaattcttcaactgatcatcacaaaattccaggccattgtcagtccttaatttctcaacctttttgccagtttgagtttccactagagtcttccactctctgaatttgctaaatgcttgattcttggtttgcagtatgtgaacccaaacatatctagagtagtcatcaattattgacataaagtatctagatcctccccttgaaatgattctagatggtccccaaacatctgagtggacatagtcaagtgtagccttggtaatgtgcattccaatgccaagtttgattcttgttgactttcccagggcacattgttcacagaattccaaatctagcactagatttttcccaagaagcccttgtttgtcaagaatcccaagtcctttgggactcacatgaccaagtcttctatgccatagcataatagaattggtcatactttttgaggccacatatgcaaagttgctggtggaatttccttgaagaacatatatagaccccattgatcataacacctttcatcaataccactgctcctttttgtaccattaaagcccatgattccaccttgactgagcatccctcttctaacatggccacagaaatcaaatttctctttatgttgggaacatgtctcacattctgcaattcatgtgtgttgcctcctgtcagttgcaactttatagacccaattccaatcatctcacatgctctattgtccccaagtctcacgaatccaccatcaactctcttgtactccaagaattgatctttgtctggacaaatgtgaaaagagcatcccgagtctataacccaatcaacaccagagtagtctttagaagcaaccattacacctgcactttcgtatccatcgaagtcattgccttatgaagctatgtcgacattcccatgtctcttgaaatcatgtttctttagttcaggacagtcttttttaagatggttagttttatggcaaatataacactttttcttatattgagaactagaattaaacttacctctcaattgtccatgagagtttcccattgctttgtttccttttctgtcatttcttcctcgtacaatcatcagaccttcaccagaagtttcttccttcactcctttgacatcaaggcactttgaacctcctccaatgtcaaagattctcttccatacatcatggtgtctacaaagtgttcgtaggactccattggaagagaattcagaacaataatagcctggtcctcatcctcaatctttatgtcaatgttctcaagatcaagaattatcttattgaagtcatccaaatgatcttcaatagattttccaggaagcatcttaaaagcatatacaatttttgtttcaagaacaacctgtttgcgagtgatcttgtcatgtacaagctttccagctttgtccacaatccagcagctgtaaattcctttgaaacctctctcaagactttgtctccaagactgagaatgatagcactatgtgctttgtcaagaatttctgcctattctttctctgatttatccttgatcttctcagctccaagtaatgtgcatcttgaatgccctggtgtacgagtaaagctctcatcttcaccctccacaaaccaaaatcattcttccctgtaaacttttccaaatcgaacttcgtatgtcccatgattctcaccttgcgttcttcacactatctgcaggagctctttcctcgatctttgaagcttaagagcacttctttgacagaccaccaagctgcaagaatgccccggctctgataccagattgttgggaaacaatcgatttctactgatgctgcataccatgcatgattgcacactcgaactgaatacagttctttgaaccagaaagaaaatgagagagagagagggagttgggaaaaatagtagtgtttctattgtattgattattatcaattaatgaatacaagttacatcattagagggtaaaggttcaatatatatagcttgtccaaaaataggaaaaagctaaccgaaactaactaacttctactatcatgctaactgaataaactgaccatttattaacaaaaatgtaagggttagaaagattaaaatatctcaattatgtg

SEQ ID NO: 24508 - DNA, 3245 bp, Cannabis sativa
  modified_base (1577)..(1588): a, c, t, g, unknown or other
  modified_base (2121)..(2121): a, c, t, g, unknown or other
tgaaccaactcatcttcatttataaattaaaagacttggaagttggaaatggaattatgaaagaatacttgtgattttgtgctctccctaatatttgactaaaatagtttagttatgattttttaaataatttattgtagacattataaatttatgatattccatttgttcccttcttgacttaaaaagtactgaaattcatgatctaattcactctattgcactaaataaaacaaacattaaatgttgaggactctaatgaattgggtgattggaaatgtgaattggacaaatgccaatatcttgtaatagggacattaactttgcttactattacagaaaaatatataaatacatatatacatatatgtttgccttccaagtacaaatttcccactttcttaatgttttaaagaaatcaaattggtcttttgtcactatttattaccatattttatacataccaaatcttgcttacaaaatgagctttttattatgtagaagagaataaacatttacctatgtattaatgtatattctttaccaactttttaaatttcctaatcatgaacatgaaccatagttcactaaataaaaaagttgattagttcatgaacacatttgcctaataaagggtaccttactaaataaacatatacatttaatgtatatgattttatataaagtatttgctagtcaatttcaacacaatgcttgtccaaataaaaaagcattatctaaaatatcaaatgcttataatactagactatatttggtccaagaaagtgacattaatttttgttattggttggcttcacctttaaatatcataatgtctttcatgagctggcttctcattttcattgcttctttttggggggcatatctgtcattttagcatctccctttttctcttcttcatagttacctcaatttttgggaactatttgtttttttaaaaataaaaataaataataataattgctctagtgtattatattcaaagatatgggttatggttttttcttaattattaagaaaaaaatatttagtttttttagtattattattggacaccagtggtatccagtactttttatatgtgacgtcctataatcagttatttaatgatattctttaaaacctatttatatggaagctaatacttaattacactaataataatagaatactgaaaagtacaagacaccaataatatatatatatatattttttaacaattctcttatttataattattaatttagatatattattcgttggacattctcttatttataattattaagtttgtggtgccccaccctaaaccaataataccctttttccattttccaatatagactatagagcactttcatgcttgccatacatgtttgaaagacattgtactaacaatttccaaagcttatcaactaattaattacattgctagttacttaattttggatggtagccaagataaaataaggagcattgctataagataccaatgatatctagcatcttcttgacatgttacgttacgattgactagcgatactccttaaaaattnnnnnnnnnnnntatatgggacccgatacttagtttgaccaataacgatactgacacatagaatgatgctagacaccactaataccctttggcatttctctaaaacaaactagcaattcataatattatttatttctatgtggggaatattatgttaacattttttattattacaaatacgtaaccatcttacatttaacacgtaaattagttataatataattttataattattgtattcatgagaattgttgcaaattttgtataaacttttttaaaaataaaaataatttattgtgctaaaaatataatttccataaaaaatttaaattgtcttattggtactgtaaataaatttagacttgtttttacagcaaaaatatattatcacaagagctctattataagattaaaaaaaaaaaaagtaatgtcataacttatttacttgtctttccgattaaaaaaggattagcttgtcacatattctttgtatatatgcatgaggagtggtaattataattttctattacaatctcttagtcaanctccacgtctgaaatcacatgccgaaatatttttttttatatttttttatagcagtattcgttctagttacaatatcatccctgtaaatttttaaaaaattccgaataatttacagtaccgaaaacagagttctcgatatttcagtttaccaagcgtgttcaaaaaacctcaaacatatttttggtactgtaaattattcgaaatttttcaaaaatttacagggatgatatttgtaagcataacgaacaccgacatagaaaaaatttgaaaaaaaaaaaatattccaacgtgtgtttttgtgcgtgaaggttaactaagaggttgtaacagaaagttcacagtagcacatatatgtattattactttttaaaaaaaaaattgaggcaaatgcattattgtcctctaatttattagctgccttacaatactaatttgtgtgattataattacctaacatagtaattatatgtatagaagtggagcttttagattaaagatatttaattgtaatgtgcgcattaatttgtgggcaaaatctatgagttagggggtgtttagaagtcatgtttggtaggtcatatcatttatttactcagtaatatgtccaataaatattcaaactaaaattcgtccaatttcatatttacactcacaaaatttatgtatccactcatattaaaattaaaaaaaattaaaacttaaagttactcaatattttctttttcttcttataaatggtttaataatttgaaagagttaacttgattaatttaattaattaaaagatacatatttttatatgtaatgaaatatctacttgttttaatgaaatttgatcaatttattgtttaatttataattttttgatcattctgatttgttatagatcttaattttttttttagtctttaactatatagtattaatcacatactaaaaatatataatatttagtcaaattgttatattggagggttggacaacttgaaaagtaataaatttggtattaaatataatgtattaattaataggaataaaaattaataataaaattttgttattaatatgtatttattgtgcttgttcataataacaatgtcagtgtgaacaatcactacactaa

SEQ ID NO: 24509 - DNA, 2367 bp, Cannabis sativa
taaaatatttatacaaatgacaaaggaggtggaaatgtcaagtgtttagtgatttgtcaagagagagaggaccatgcaatatgggatggttttgaaccttattttcattgtagatacatataaatgattcatattatgtgtattacaatatttagaaagggtttggggttggggattgaggcccagactaggatctcggatccgactccagcactagactctcacctagacacggactcggaccccgagcctggacgtgactttggactccgaacctcgaccccgtcgccagacatggactcagatacaacagacccatacccaaactgacttggaccccagaccccgaattcaaactcagactaggaacgggacccaagacccagacctaagcttgaaatcaaccctagacttgaactcccaacctatacgggacctgaacccatgtctatgtctagggtcgcggtccgagtcgggtttagagtcgaatttatggtaaagataatataatttataaacaatatattcatagaagtcaataccaaacatgtatcaaataatactaatgcaatagaatacaatccaacacaatattatacaatacaatataatacaacacggtctaccatataaaccctaaaaatacataatatactatacatatatgataataaaaatgcctcctaattattattaatattatattttaaagaagcaaatcattaagaaactaaggtaataataatcataaccgtgcaccacataaacttgatacacacttatacaacaagtaattttaacaattatctatttgttaaaaatgacttgtcgtatgtgtcaagtttgtgtgcacatttcattaccctaatgacaaatagagagaaggattcaaatgagggactgcatgtgcacacaatggcttagccttaaacattgagttcccctcttcagtactcaaatctatcttctccatcccatgaggaatcttccatgtaaaaccttgtaataatcttcccgaaagcataactgtcatgttcgtacccaactccactccaatgcaccctctcctctcagtggtgaagctaataaaccttaaatctgtctccccaagtcacaatgcttctcgtcaagatggcgatcaggattgaagcgtaatggttgatcccatacggtaggattgcgaccgagcccgaatcgactcaaaagaacattgctgcctttaggaatgaagtaagccagcaaatgtgcagccagaagtagagacatgtgggacattgaaagctgtaaccgggtggaggcgaagagcttctcttgcagaagcaatgatgtaagggagttgaggaatgtgagattcttggaggagtgtgttgttattgccaacaacactatctatttcggttcttgccttttcaagcatttttggttggttcaatatttttgataatgcccattctgctgcgctgtatggattgtctactactgctgttaggaacaattcctgtttatatatgtatatatgttgtaaggatttgaacaataatattaaatcacatctctctaagactctaacaacaatggttgatccatttttttttaattaataaggacataattgtacaaaaaactataaaatgaggtagctaaccatatatatatatatataaattaaagttattaagtgaaaaaattcaatagtactatgtatattacaaaagttatatgaaatacgatattaacatattttttttaaaagaaattctaagtgattttttttttttttgaaaatttatatgttactattttacaccatattaattcaaagtataagtcactataaaattaaaccccctaaataattttgcatatgtgtaattgtgcccaacacataacttattgaggcctagctagttttaaattgatctacctacgtacatacaaatatatagctttaatattatttggcaagtacttaatgcaaatcaaatcatgcatgcatataaaatatattataaatttaaaataagaaatataaatatacattaatttgaacaaaaatcttctgtccgattttatatgtgccaatcctgtctccaccaataaaacattgacaggtcatttaattttaacacatcgattaaccgaagtttgagtcaatacactctagacttttctgttaacataattatttgccttttcctattctgttctatttttatttttttattattttcatagaaaagtggtatcatccttccaaattttaaaatattatactataatttttgcttaatttatttttattaaaggaaattctattattctttcttttttttttttttttaaggaaaatggtaaactttattagaa

SEQ ID NO: 24510 - DNA, 1768 bp, Cannabis sativa
aacgacatcctaaactaagtagtcccacctaataactaccataacactggggctcagattcaatttactccctatacagattctaggcctttcacctacaggtgagtgtacacctgacctgcctatgatgacacggagactaggtcgtgaaacaacaatatgtaccgaacatgatcaacatggctctcatcagtataacaaaagcaggtaaataataaaaataacaaattcctttttaattacaaaaaattcgacagtatagcggctgtattttgaataaacataaaaatcataatctgcatagatatttgtataaaaatatatttggcacttcatgccccagaacagtttagaaaaatatgcaaattaagttttgtagtttaaaacaatttgcaaatcataaaaatttgaatatgtctaatgatattcagcacatataaaaatcatattgagtccctacctctcgtaagtcattaaactttgtccaacagatgatcttaagtttgaagtcccgagctccaattgtttagtccaatcttagatattactttcacctataccatcaaatggccaaacaattatcatctttacattctacattcaaaattgagtccaacgatatataatatgcctatacttaaagtttggagttccgagacctcacctaagcagtgcgcattaactaccggtggtggtaaaaattagtgtaccagaaacgttgccaaaaataagggtagtgtatatcaaaacgaccgtttcgacaagtagatcacacccatcctaactatttatcaaaatagtacacaatattgtcagaaagttgcctaaaagggaggaagctacaaaaaaatgtcacaaaaaaaggtagtgagttaggcaaaatggtttagtgtaggtttgttctcgttgacgagatgagtctagtggtaaagatggctcatcaaacgaacacaggaggtggctggaaaatttgttcaaagtttgaaccgccaaactttgacttgtgatcccaagctaatggtagcgaaaggagtggtaccgcttgggggttgaggtcgctagcacctgcggttttgattggttcgatgcgtggggccagattgtggtcggtgatggggttttttggtttttctgtggtttgaggagagagaaagagagaatgagtgatgaagagtacgagaggtggtctgtttatttttttatatacatatatattattatatttatttatttattattatatataacttcccaaaatttctagagagctttcttctgtgaaagaaacaagacgaatacaaaaatgtcattgtaaacacttgtaatacttaaatacatgccaacaaaggctaatacaattgactagtagactaagatcattaacgcctgaaccacgtaaaaaatcaatttatttattattagtatcttgcaatttcttcaattcatattaatatgtttccgaaaatctcgataaacagtgattattttaaaattattataagttgaatatgttataattttctctataagtatatttgttgtttaaaaaataaatttaattaaaatatttttctgagtaaatttgaatttttaaaaatataattagaacaaaattttaaatcgatataaaataaaaagtgaaaaaaaaattaagtttggagttgggttaggagttcgttagttaaatttataattaatactaattaaaaaagtattattattctattaatactaaaatacctaatacaatgagagagagagagagaga

SEQ ID NO: 24511 - DNA, 2851 bp, Cannabis sativa
  modified_base (1934)..(1948): a, c, t, g, unknown or other
aaaataattaaaaacttactaaattaattaaaaacttaagaactaaaccaatttttagtaaaaaaaatgtgaaaaataactctaatttctagagttatcagcacccaataaaatagctccagcagaacttaagaaattaaagttataactttaagggatgtttgatctagggtttacccaaccttgtgtattttcttgggaagctccggtgttgttcgttaagaagaaagatgggttgttttgtatgtgcattgattatcgagaactaaacaaattgacaatcaagaataagtaccctcatcctaggatcaatgattggttcgattaacttcaagaaaagatagtcttctcatagacttatcttcgctcaggctatcatcagttgagaatccaagagaaggacattttggagactgctttctacattaggtacgattattatgaattcttagttaggtctttcgaactgatcaatgctttggtagccttcatggatatggtgaatagagtgttcaaggatttctttgatgtatgtgttaaaatgtttgctgatgatatctttgtgtactctcaatcggatgcggagcataaataatagttacggatggttttacaacgattataagaatataggttctatgccaaattcaaggagtatgaattctagttaattctaaatatttctcttaagtcatattgttagtaaagatggaattttggttgatttggagaaaagttgaatccttcaaggattggccgaggccatacatagttattgatattagaagttttctagtttagttgagtagtattatcactttgtggaagggttttccaagacctctatgcctttaacatagttaattaagaagaattagcgatttatatagacagacaaatgcgagatcagtttccaacagttgagacaatggttgtttacaacttcagtgttggttttgtgataagattaagacaagttcgtggtttatggtgatacatccaacatgatttgaggtgcattaggaagcaagttgttagggtcattgtgtatgcttctcgtcaattgaaggagtatgagcagcgttacccaactcatgacctagaacttgctacagtggtctttgctttgaagagttgataacattatctatacaaataaaagtaaaaatttatattgaccccaagagtctcaaatatttctttacgtagaaaggattgattatgggacaaaggcatggttgggattagttaaagaatatcactgtaaaattttctatcaccccgagaaggccaatatagtggttgataccctaaataggaaagatcctgggaaaattttctatacaactataatttttcctcagttagtggcgaatatggtcaagttaagttgtaatgaccgcactttagaatatggattagtaaaagcaattagcattgattattagtattttttatagttatttatgaatttgtttaattatgggtcccattattagaaatgggcattagagtttctcaatttcagcgattttattatactctaggagtactatttgtattatatatgaattatgctatttttacaattttttgctcagcgacagcgaaaaatgcgatggatgggtattttaatcacatgggtaagtctagaacctttttcttagtgggtttaatgttggagaaaaataaaataccgagtttgagtgaggttatggtttttgactattttacacctaggcttgaattaactttagattaagcacggagggtattttagtgattttatgagggggattaggtggcttttattagagcatgacaactgcccctttttgtgctgagtattgtgtgtgtaatgcatttttggaaaaataggatattaaaaagaaaataaaaaaaaataaagaaactcattctctctctctctctcnnnnnnnnnnnnnnnctctctctctctctctctatttgaccaccaccaaaccaggaggaaccagccacctccatcatcgtttttcttgattttaacatggattcaaggagtaattggtgtaggtaagccctagaaactcttaatttatgaatttcttaatattttcgttggttttgacttgtgattttagagaataggacatgtaagggtttgattgggttgtggttcagtttttaagtttaatttaagtttgaaatagcttcttgtagctagtttggttcatccatggcatgttttgattttgtgcacttttctggattttgttgattggattatattatgggaagtcaatataggtgttctggaaagtttggtgggatttggacatattttgagcaggtttggaattgtttgggaaaacctggtgcaaactggttaacaggtttgctaggatttgtaatacctgttaatcggttttggcaggttccccgaacacttcattttcctctatttgtgtttataatagtacattggttgggtgattccctatttcctagggtattgtaactccagttagtaatagcagaaccttaagttggaggtttgggtttcccagattagggtttttacgtgttatttacccatttttattatgtgactagggcatccatccagcacgagactttccgttaaggtcggccaactcacttgaattcagaagcaagttaagaatagtgtagaacatgtgatatatgcgaatgtatgtatgtgtgaaatatatgtgcatgcttataatgattagtacactaccaacacctgtacgaaaatggtacaaagtgcattggtatagtgtatacttcttaaagagtatattacggtgttaccagcacaagtacgagaaagtacagggtgtgtgtg

SEQ ID NO: 24512 - DNA, 2220 bp, Cannabis sativa
aaattcagtttttgtggttaagtgttacaaaccgtaaagttcaggtagtttagccgccaatatttcttgattatgtaatgttacattggtgtataacaataaattttaatttagtgtacgaatgttatattttttaataaaatataatatagattaaaatagtgtatgtgacattagaggagttatatttcaaaattaaattagtgtatgtgtggtaattaaactatatattatagtataatcatgcacaaaaactgtaacattagaggagttatattttaaaatagaattgtacatatgaatcaagttttgataatatgtaactaaaagtatataattatatttggaggttatgaaagcatgtgaaaagagtttttgcttgttagaaacgaacaaaatcatcattaatttcatatgtgaacgttggttttgagattatttcagagagaagattcaaagctccaaattgaagcttaaaaaacagtccaagcggcatgttgcctcttactaggcgacatgtcgcctattggatgcatggagaacgttttgtcatatttcattgtattccgatagttcaaatgtttttgcatattttgcgataaaagttgtgtaaccgaaagtattcaatgaaaaacattttgaccttttactccaatgttcttctgatccttaatactctcatacacaattgttaacatcttttagtcagtgagatttgaatttttaaagttttgttttcctaaacactataaatagggacctaaaagattcattttatatgactagtgagtttctattaatgagaacacgttgctagaaactataagcttgatacaataaagacgaaatcttaccttggtcgacattgggtagtggtgggtcgacgttgttgggtcgagttggtctggtcgtcttcgtggtgtgacaacaagggacacgtgacaatgggtcttcgtgctcaaaaggatgggttcgagagagagagagagacgggaggaagggagatagttagttagtttaaatggaaggaacctattttgcatattaatagagataatttgattcaattcacttggctgaactgaattttattttacttttcactctttttttttaatttatttttaaattatacttttcacatatattaattattcaattcaatgcaagaaaacataaacaataagaggaaaaagccatttagagttctcgcatttatcagctcgcttttctctctctagagttttctagtaggcatgcgataccgtattccctgttcactcttggtcccatcaatggcagttttcgtccacccttaccaggcatgcgataccgggtactgatttttctcctattaataccactctcatttctctgattcctaagaagcaacatgctcacactctgaaagatgcctataagcctttgttcaactttttacaaggtaatttctaaagtcttggctaattgtttaaaaattgttttggataaaattatttctccttttcaaagtgattttgtgtctggtcgagtcatctttgataatatccttattgcccaagaaattgtgcatgccattaattctaaaaaaagtggtaagactggttgggctgctcttaaacttgacatggccaaagcttttgatcgtgccaattggcattatttagtgaatgttatgttccacttcaattttccacctcggtttgtttctcttgtaatgaagtgcattactactactacactctcttttttaatcaatggttctgttggtgggtctcttaagccttctaggggtcttaggcaaggggatcctctctctccttatctctttatcctttgtgcggaagatttatcctctcttcttagggccaaacaggatgcaggtttgtttaatggaattgctatctctaggtctgctcctcctatttcccacttgttttttgcggatgatagtcttgtcttttgtgcggctaatcgtacatcctgttctgcccttcaggaagtctttaatatttactctagagcctcgagtcaggttattaacttttctaagtcttctattctcttttctcctaacacccaacaagatattcacactcttttttttcaatactttcaatcttgaagatagaccttttatatgtaaatatttaagtcttcctcaatgtctttctagatctaagtatcattcttttgctttcttaaaagataaagttaatt

SEQ ID NO: 24513 - DNA, 1386 bp, Cannabis sativa
aaatctattactttttactcataagaatcagttttcttcaaaaactcaaattattccaaacatgatgaaaaatactaaaattaccaagtaataacatcttctaactatggagaaattaacaattgtagagcctaagaggctcttatcaaccacataacctcacattttatcaatttattaagtacttactatatatatgtacatgtatttgtggttgatggtagagatgttgtccatgccacaacaagcactgcaacattaaaaggaagggaaggatatggaggatactagtatgaatttagaatttcaataattatatcataattgtagtttaaatatttattaatattattgtaatatgaacaatgtaagatttaatttagtctgctataatttaataaatttaaatattttaattatttttttatgagttttaatttaatattttaatgtaaattaattaatttcaaataaattaaaaaaaaaaactattagaggagacctatattgcccccaatgcttacttttaggggccataaattgcctctaaaaaagtataagctgctcctaaaagtattttagatctcaaatattgatttcaaataaaagtgtcgtccctagaaaattaaaagttgcccctaatgttcacttttagggataattttttttcttgcccctattaaggaatattagggacaaaatattagaagctatcttttagaggtagaatgtcacctctaatatcttttagagacgaatttagagtgtttaggagcctctaaaactctcttttcttgtaatctacttgtgaagactcggtttgaccgagtgtaaccttatttatatatataataatgtatatgtatacaaaaaattattatatgtatacaaatcagacccctatcgtccctctctctctctctatctatctctctctttttctctttcttcaaaacacaaaaaaaaaaaagaaaacccacaagctccatcaccgggggactccggcgacccacctccggccaccgaccagctccacacaccggaccactcgaaccccctggtaccggcaacctcaacccccaagcggcgccgctccttttgctgtcgttagctcgggatcacaagtcaaagtttggtggttcaaactttgaacggatttttcggtcacctccggtgtctgtttgacgagccgtcttcaccactggactcagctcgtcgaggagaacaacatacactaagctatttcacccagttctctactttttccaatgacaattttgtagctccgcccgttttcggcgacatcatgtactgttttgacaaacggtcggcataggtgtgatctactcgtcgaggtggtcgttttgatatacactactcctattt

SEQ ID NO: 24514 - DNA, 3204 bp, Cannabis sativa
ataagtgatgaaaatacttctgtctctttattgataattaaatgataaagatttcattgaaatagagttttatttagggcacaaagcacaacaaaaggtccttttaattgtgttccagtgtgttctagtaggtgtgcaggaattaacttaacttattcacgaaaaaactaatgtcaagtttggtgtgtgtcaaatattgcaagccaccaattatactcatgtaggttgtggcatttgtcaaagtctctccatcagattgtgataaaacctttcctattgtcataggcattggatgaaatttaagatggagtatctcaatccttgtaaggaggtcttccacatactttgattgagtaagatacatcctcgtatcgtctctataaacctcgattctcaaaaattaataaagagaaccaaggtcttttagataaaaatatcttattcatcctttgagtgaattgtttgagttttttttttttttttttttgtatcattcctagtgactatgatgtcatcaacgtagataacaaccatgatgatagaactctaggttttatagaaaaatagtgagcagtcaactttggagaagtgtggctttcaactttccaaactatgctctaggggattgtcgaaggccatgagagacttggtcaacttacatccttttttcctttgagtaagctccatacaacgcctcaagagcactccaaagggtagcaaaagtttcagatcccatcaccccagtcacaatctcctccgtaatagatccatacagccagcccattggaagttgttcgtgtacgatccattgttcgaagaccgaagtgaattgaaccccaaaaccaatcttctcatcaccatctctattgacgacacttggaacaaactttggtggcttcacacgagtaccaatcacatagtaatctagacgatggcccctaactatgctggacatcatatgttgacattgaaatagtggcaaatggaaaaataatgaaaaataaagagaacaccacattttatagtatttcactctccatatcatgatgttaatggagttatgtctactttgagcttttattatcgtaaaaatacattttcttacaagagaactagagaaaaaattactaagtctagtttcacctcacaatttttagagagggaaatagtgaggaaagagaagttatgaccttgtagagagaatagaaagtgtgaataatgagctagaggagctcttcttttataaggaatgaggtccaactaaattataataaaataatagaaaatttgtacaaaactcgctggaaaattcatgcaattcacagtcgagctcacgaactaatttttaggtccaaaaagttaaaatcgtgaaaaggacattagacaagcttagatccatcttgaataaagctttccaattccacttgaactgcattatttgaataaaaattgagtaaaatatggccattttaatgagcagtgtgtagtgttgaaaaactaggaattcatagatgggcggccaagttgactttggggcacccagaatgacgttaaaatttggttttaggggtcttaagcatatttatagatgctcggatgatgcaaaagctttccttagctcattctttgactcgttattcaccgtctcttcggcaattttacatgacgcacgcgggagttgcccaaatgatcacctataacaactatcaccggtgatcactagtctcatatgtgtctgtggacttgcgcatgacacatgtacatgagatattgacttacggaagcatcaaaatcttattttggtggcaaaataagaccgatgcctgagatagattatcgtttgatggatgaaacactgagccctagaccaatgtcaacttaggcacccagtgtggttcactgcctaggggctgaaccactacttggatgatattttcttctgattctaagtcttagatcctattttgggagaaaataagaacaatgcttgagacggagtcacaatcaaattgacaaaactacatgttcatgtagaacatgtcaacctgggtgcctaatgactgggtgaatgtcacactagtcacccatattttcaactgggctcttggtggtttcatttgatccttgaaagcacttatatcttcatcattgaacaaaataaggaaaacttttgggagacttccctggaaaagtgtaccaaagtgccaccggccaccttatgttgacctggcacctaatgtgacctaggggctatcactgggtgactagacagagttcaaagctccaaaatacatctcgttgatgttcaatcttctttttggtaaaaattactccatggattttagttttgtcaaactagcactggcattactcagtgaagtgaaattagtgctaggttgtaatgtcaacctaggcgcccatagtttgatttggcctcctttggggtgtcactgaagaaaattcatgtcctggcattgttcctcgttggatttgaggaattagggtccaaaaagttcccaaaaacctaaaccctagtcgccgtgtcgcccatgtcgacgatatgtcaacttgggcatccattggggttccagagtgttgggtgtagtttcttatagacttatctccaatgtttgaaacttgtttggggcatgtctctcatgtatcctactgcaatggctaagtagatcgcgcatcagaagtttttgcaaaccgaaactgatgcaagacggtgcacatgatatcaacctaggcatctagtattgctactagaactaggttgagccatgggatgtccacgtgacatcctcagcctcatggttcatcattttagggtcattgtaacctacttgcttgaactcatcgaaggatagcacccaaaaacaacttcgctagatcttggtgcctacctgggtgcccctgaatgttaactaaggtaccggcacagttcccaatactcaagttgaccaccctaatctcgggaggtagggccccaaaattgttttcctttttgccacgtgtcaaaagtggtgtccacatcattaggtcaaatttcagggtgaacaccatagttctccaaagaatgaaatttttttgatccagtttcagaatggttgtgttaggttgctaccaaaaggttcactaggagcgtgagcaatactagttgaagctacatttgtagttgtgacatgtggtgttccaatattg

SEQ ID NO: 24515 - DNA, 3364 bp, Cannabis sativa
aaaactcttgttttgccaaaccaaactattacgaacacgccacaaagaccaacaaattatggccacttgactagttttggtctttgaaaaattgacaagacattacagaattaggcaaaacaaattggtggcggggatcataaggctgaattatatatatatatatatatatgtatatcaaatctctaccaacaaagtgtagcaaatgggcacaacaaaaaatcttatttttagtcataataaaattcacaactaaaagtaaaaaagttgtaactaattatgaattataattgctatgttgtgaataaaaagtctgtggctaaaagtaatagttataaaaattacaatttgttgtgacttaaaaattatcactaaagatagtagtttttttttttgtagtggacattccaccataatatgtagaatagtgtcaacaccctctcaacacgcttgacaagtcaacgaaacattcaaatgcttcccccacaactgagttgaggcgggaaaaatactaaaataagcagtccacaacgtacatgaacttttggagaggaattttaagattccataagaaccttcaaaagcgagagttatttgtgccatttttgttaagcaattttaggtatccaacattatatcaatatgtcgaattgtaattaattaacagttcctcgtctaatttattaaatcaaattattgaggacccaatattaatatatgcactaacaataatacggcgcctcttataatgtttagcacggtgccctttagcattttcttatacataataattgtgttgctctattgaaattaaatatgtacacaaaaaattgcatagcaaggtagttataaccaccgtgtactgaaacagtcaacaatagacataataatcatcacatattgtgtatctcatcatgagcgatattcaaaaacatataaaaaatgactggaaattaatcaacaattttgaagctaaagctgatcgtaatctataactagagaccttacaataaaataacaacgatcaaaaaaatatttcccacaaaaattgagactagctatttgttattatccattatggccgtatgttgtaatctttcaagagattgtatgttcttttcaggtttggaaccgatacggctacgaactccatttcataatagaaaaaactaaatttgagtatttcaggatcaatgcagtttcccccaacttctttattgaatgcccctgaattaatctataatatataacacatacttatttatattagtcacatatatatacacatatatatatatataaattactcagtagaaagtttaataattagcaaaaaaaacaattgttatacttacgccaagatatatagttttagtaaaaataaggtcaaataaagtaaagttataccatttcagttagtccttcgtcgatttcatagtggaaatcttcccatacctaaaaatttttaagaaaaaaatggagggagaatgggtgattaattgttataataatgtcaattaaaaaaagataatggaatttactaaccatttgacagaagcaattttttgaaagttgaagcaatgtccaaagacgataattttgatttttatagtatacgcttatatatccaacttcctccacaggtttaaatattttctccagattgcttctataaatcccaaatagtgaccattgttccacaacttccttcaacagtaacttgtcatttttcttctcctccagaaaaggaatcacctacttaaaaaaaagtaattacataatatgtataataatattaagtaataaacaaaccaaaaataaatattttttaagaaattgaataaatatataagataagctcaccctttctgtaatcctcttttttaaaacactctcgtatttctcataaagggatttcgttatcaaatgcaaacaatccaaaccgcccacactataatttttacagtacagttcatggacagctctgcacatatatatgtacaaatgatgttaattaataattgtagctattaaatctatataaaataatttaataatgaagaaaaagtgtcacgaaaaaacaatattaaaattattttcaactacaacattaatttaatttcccttacattaatctggatgtataaagaaacttaaagaacaaaattgttattatgtatacttacattgatgctaaattaatattcttttgttggtccaatatatctttctcacaaatattacgatgatgatgatcaagcttctgatctatagtggtaattgctttatcaataatcaccattgcttcatttaatgcgttcttcaaattctcattgttgacatcgcctaattcccaaacattggccatcgctctgtcttgaatgatgatttataatccagatattataattgttcctgaaattaataagcacaacgaataattattaaactatataaaatatatattcatttacaagttaatactgtatcaattaattcttggtaaattcttgaaattaaagacaaaaaataatggcgattagatgacaatagtttgcctcattgtatattagtattagaaatgataattagtagttaacatcaccatgaacatgacatattattagtatcatatattaattacatatatataaatttagagattagtaaaatagttatccaattcaagaataccaacaagacaattttcataaaaaaaatacagacaagataatatttaccaacaatgctccttcggtttcaatactttaactctaaggatttaattatatataaaagaaagaaagaaaaaactagtttttatataataataatctgattaaagatctgaacagagaaaggttgatcatatgcagaattcaagtagagagattcatgaaaatataattagttcatatacagcaattaaagtatgtgtttaaaaagaataacattgttactcgagaaatgaaaaaattataaaaacacgtacgtacctactcaatcgtacttggaagagagaacgaaaaatataaaatgagaaaatatgaatgaatttaagaacctgaaaatattttccatctatatatactgtcttttcgtaatcaagaaggaaaattttctactatcaaaactatatagttattttatttttggatttttacactcggtgtcttattttgctatttttttttttttatatatttttgtctttattcggttatttaaatatttttaaaaaatttattttttcaatattatatttaaaaagtttgatttacaaaaatacttatgcatgtttatgtcatgggttttttctcctatttctgccaccttcttctgtttcattctttttttttttttt

SEQ ID NO: 24516 - DNA, 3461 bp, Cannabis sativa
atccagtttcaatggaaactgtatgctgtgtatggcaccccttacaatcaagttaaagatgttttttggagtagtttggaaaaggaggtcaaccattgtcaaatcccctgggtaatggtaggtgacctcaactgtattgaaaaccaagaagaaaagatgggaggaaacaaagtgacttatgctgaaacacgatggctcaaaattttttttgagaatacagggtgtgtcgatgttcgatttattggtggcaaatacacatggaaaaacaaaagattcaaggggggacttatcagagaaaggttagatagagcgttgtgctctgctaactgggtgactgagtatgttaactcgggagtacaaaatctacctatctccatctcggatcatgcaccgatcgttatggatacacatttatttgttacaaaaggctttatcccgtttcgattttttgaagcctggacatgggaggactcctgcagaatggaagtggttaagttgtggtgtttatctagtcgtggagcgactaacactcttttgcaaaatgttagcagtacaagaaaggcgctgcaagtatggaaaaggagtttgaagaatgtcaatacagatgatataaagaacttggagcgaaggttagattggattcagcaacaacctatctcgaatgccaccagtgaagaagaattcagaattcaatctcagttgatggaagcctggctgaaacaagagagtatgtggagacagaaatccagggaggtttggcttgctcttggtgatcgcaatacaagatatttccacacagccactgtcattaaaaaaaggagaaacaatatttggtcaatcaaggataaagatgagatgacttggaaagacaagaagaatatagcaaggaccatcaattcctacttcctggatctctattcctcttctcggccaattattgataatgatcttgaagagctgtttgtaaatcgcatctccaatcaatcgaatgaagatctgatgaaaagcccttccaataacgagataaggtcagtcgttttcagtttgcatcccttgaaagcccccggaccagacgggttttcaggttgttttttcagaaaatactggaatatagtgggctcttgtctttgtgaatcggttaaagaaatttttcaggatgggtacattgatcccaggcttaaccgaacctttatttgcctcattcccaaagtggagtaccctacaagcatggatcaatttcgcccaataagtctctgcaacttttcctacaaggttattgcaaagatcttatccaatcgtctcaggccgttaatggaagatttggtctctccacttcaatccgcctttatccctggaagatggattgctgaatcttccatactcactcaggagatcattcataaaattcaacacaagaggggcaaaggaggtcttatggctatcaagttagacatgcacaaggcctacgataaaatggagtggagctttattgagaaggttcttagtgctaatggattcaatgaaagaagcagaagactactaatggcatgtgttacaagtgtttcatactcggttcttttaaatggctcccccttaaagaagattttccctcaaaggggtttgaggcaaggggaccccttatccccattcttgtttcttctttgtcaagaggttctatccaaacttctatccaaggcagaaagctgcggactggttcatggtatcaaaatatctcattctgctcctccaatttctcacctaatgttcgctgacgataccatcctctttgctcgggctaatgaaaatgatgcgaatgctctcttaaagtgcttatctacctatgaactgtggtctggccaaacttgtagtaaatccaaatcaggtgtgttcttttccaagaacttaagtttggagaggagaagtcggcttcttagtatcctcaagattgagatggttcgaggagatgagaaacacttgggcaatccgtttattttcaagagaaggaggaaagaggattatgcaagattgaaagatagtatgactaagaaactggagggttggaagatgaagttgctatcctatgcaggaagattgactcttttgaaatctgtagcttcttcgatgccaatttatgcgatgtccacaactaagatccctttatccagttgtcgacaattggatgctctaatgagaaagtactggtggcttggaaatgtagagaaggatagattccttgctctaaaagcttgggataatatttgcactccgaaagcctcggggggactaggcttgagaagatgcgaagatatgaacaaagctttggtggctaagttggcatggtttcttgcttcaaacaaagatagacactggacaaaatgtttgctggaaaaatactgtaaatttgaaagcttctggagtgttagttcaaaaagtaacgattctcatcaatggaaggccattctagaatcaagagatattttgttaaggggctcaatgtttgtggctgcttcaggggacaacatcaatttctggacacaaccatggataccctggttggatcatcatgagttcacagagttgatgcaacaaattcgattgagaagatacacgatttcaactctagctgatgtctccatagacaatgaatggaacgaggagatcatctttcaaatatttggagaagagctagggaatcgtatcattcagattcctagaataccaacccctttctcagatcagatctactggaagaatagtctcacggggcaatttactgttaaatcagcttattttctagaccaatcctggaggtttgctcctcctaataaggtttggaattggatgtgggaaggagggattcatccaaaaacctcagtcatcttatggagactgctgaatgaagctattcctactaagaatagactcccttttgttcgggataaagattgcatcttatgtgacaggggaggggaatgtgcaattcatttatttcgggattgcagttttgctaaggcggtctggtttggatgcaatctgcctttgaagattgattgtattccaggcggtaacatgtttacttttgtggagaatttgatatcttctctgccatttcaggacagaaaggagctgcttaatttcatcgggtgcgttttcactgaaatttggcatcagagaaatgccacttggactaggaacatggctgccaatcccacttcagctatcattaacatcatgagtgcagttcgagagattaagaatgcgcttgcttgttcagaagggacaatcatggaatcacatccaaaccatatgtctttaaaagatgataatctggagaagagttctccaattgaggaggtcagacatgtcctctttacggatgcttcctggattaaaggagtggcaggaattgctgcaattggagtggagcggtcaactggcaggtggtttgttaaagcccaaag

SEQ ID NO: 24517 - DNA, 10400 bp, Cannabis sativa
  modified_base (5451)..(5451): a, c, t, g, unknown or other
  modified_base (8507)..(8507): a, c, t, g, unknown or other
tttcaaaaaaaaaaaaagtacaaaaacaataaaaaattataaaaatacagtaatttttaatatttttttttttacaattttttagattttatttacaagttattgtcatattgttattttattgttaaatttttgttcttattataattattaaaatataacaattaaatgtgaaagaaaaatattagtgcttggcttgggatcttaacccgaccaaattgacaaatttattgggccggtagaaattttattttttcttgattgaatgaatttcacttagatttttgtaatacaatatttacgttaagttgaataaaatgtaacggccaaatcaaccggcatacaccctattagaaaattaatattaagatatttatcaaatttctacactataactataaaatcacaccaattaaaatttaattagtagtatgtcttgcatattttaaatatctaatccctttttattattatgaaatttgtgaaattcacagttaattgttgatttggcttcaaagtaattgatgaggaacttttattatccctaattaatatggctaataaatggatgatatatatatagtaagaaaagaaagaatgacacataaatatgtagaaaacatcaatattaatacaaacttatacaaaacaaaaaatgattaattgcttaattaatataaatacattaatttactcaaattaagaattactaatctatatgtattaacaaaatgttgtatcttaattaataattaagattgattatttttgttcttcaacgatttcatcatgagtagtagtatgatgatgatgatgatcaattggaaaacgttgaagttgatcagcaaaagtaggtgaacggttatgatgagacaataaatgttgaggactagtattattactattagtattgtggtggtccatagtgttaacggtggtcgtggttgtagaagataattcatgttgtgaagtttgatttctctttcttttttcttttacttctgagtgccattgttttatagctttcactgtgtgctcttctagaactgcactcttgaagtttgatcccatctatataatatataatatataatatatatatttaagaaaaatgatgatgatgagttgaattattaattgtatgaatagaaagtataaaaataataatttgatgaagatgtttatttattacctgtgtaacaagagcatacagaggaagagtgatgtaactacacattacttgaactgtcaccctgccaccaaaattaattattttatttattacaaatcaaattcaccaaaaatatatttccaattattaaccttattattatttgtatatagaggaaaatcagtagtaataacatgatgttttggtaactagatttttttagttcttttttttttttttcataattgtaattttttaggatatctataattttttttttttggaataatttacaataatgaaaataaaatttaaacacttatttattatcatgtgtgtataagaaaaaataattacacatgaaacaaaatatttgaatctcaattttagtatagtaagctattaaattcattttgaaaatttattaataatcctaaataactataatcaacacgctcataacaaaaaagtaaacttaaaagttcttcttaaagccaaaatagataggaaatttactaaaataccggttaattcttacccccaaaaaatgaatggctataataataattgtaggactattatacttacgctaaaaccactcttgtaataataatcaatgtatgttcatggtagcaagacgaaatcccaaattgccactgaaagaaaataatcatatatatatatatatacaccaaaatattagaatatttttcttttgtgttattgtaaaatggttaatttattaaaaaattataaaataccaaggtacttaccgtgacccaaacaaagaaagctaactcgaaagaattctgaaaataatacaataaaaacttgtcagctagatgtgtatagattattttttttttaaaaaaaacaatatgtaataattaaaattaaaattaattaccataaataaggttaaatgcaagagggtcaagacgaatttgggttgagcaaaccagaaaagattatcatttggttgtaccaaaggacttcccatgattacattgtccttttcatcaagtgtatgagccatccttgccacaattactccaagcttagcaccaagtacaaccacaatctatatataaagtacactaattccattaatacaatcttaattattaattaaaccataattaaataatcccaagtaataaattatgctaaaatttgggagaaacttacaagtagtgggataaatgaaacccagagatatacatgccaacctgttaataataataattaattaagtttacattaataattattattattagtagttttaaatttgggaaaactaataaattaaatttaagaagttgaagtgtatactgaccgtgtacatccacaagcatgaaaacgacgactaaaagccacatgggagggctaatcaattcacaacgcaaaaataaaaattaattagtaataagcaaagtaattaacagtaccatatttataaacatgatgcaacaatattataggctaaattaatttaataaatatatatacatatttctacaaatattacaatacattcttaattcaaaaactacttgataattatgattcatcctaggtttttcgatgattttatatagaatttagaagatcttttttctttatttttcaccagaagcttaattatattattattttgatatatatatatataaacacatatagggtcataggacaaaaaaaataatatttttggggcgtaaaaaaaaatataatttttaaatttgaaaaaaaagtttttaaactaagtggaccctaaacacagacccgagcgtgcaaacatcaaaaatgtgtataaaaaaattcaaatataaaaagaagggtgggcttccaataaggtggctagctatagctagctagaactagaagcatattgcatagtgtttaaagtagtagcatgcatgcatagtgtttagatttacattttattttatttatttatttttcgtgcatatacatataatataggaatatatattggataatgaagtatatatattggaaattaattagggagtgtaacctgatgccaactacaactttgaaatcatcctcaagagatctttctatgtacttttggaaattaaatgaattgttggttgtactggtcaaatgagcctgcaccataatttaattatataattaataaataaaatgcaggtaattaatttataataataatataatataattagatatatagtagtgatgattaccgaaatgaatccatggcgtagagttaggtaatcaacttttgcaactgaattaaagaactgtcgaaagaagcatatctgcatcaaaatcaatcaacccaccaattattacgaatatctatatatgcaagtaattaattaattaagctaagcatcattattattaattaattaattaattatatactatgatgatgatgacttacaatccataaaagcatagatgaagtaggtgtgcatgaactcatatgtcttctcgcaaatgtagtctgtctagtatacctaaatcgaaatggatctaaataataacaaagtaaattcaaattatcatcattaataattaattgcttttttacaattcacatttttaaaaataataatattatctaattaatttaagacaaagtctatttaaatatacaattccacacgtccttctttacttcttattggtcccaaatccaatattagtaataataattaaggttcataatatttgacattttcttttcttgacttagttttttttgagagagaaaaggatttaggaattaagctgtacgtaattcggttggtattaataataaatgctcaaacttaactcaacaaattattaattattatccaaaaaaaaaaaagcgcaaaaaaactaattattttcaaatattgatcagtagtgattgtttttcaataactatattattcgatacatttagaattctttaaaattttttatgagaaatcttttgtaactatatatattatcatgctaaaaaacaatacctataaatactacgtacgtacaataatatattataacttaatattgtatacataaaaagttacatattcttaacacccctttttttttttatctaataattaattaattaatagttttttgtgttaattagttaattattgttaccgttagcaacttgatattccactgtctgagtttctttttcccaagcctcccaccgtctcatctgtatatataatatatatatttatatatatcaacatgctcattaatcaataaaattattatccaaaaaaataattgcagagttttgggaaaggttactgattattattagtaatgatttgaaatctaattaaagatgtgaattggtaaaatattagtctaattaaatattaagtctcataccatataaaaaaataatttttaaaaaatatcactaaccaatcataaaacgttatctataatctattcaaagagttagaatactcaaaaataatactctttaaaaatctttctcaaacattattgatcggataggatggtagtagtgaaagttgacaataacgaccaaactagatattgttgaagataataactgagttttcagtgccatttataactttgggtccatatacaaaattttatatatattatctctactccttcacactaaactaattaaatataattcacgtgtattgtgtatataatgtatatatgtatatatataatacatacatgtcatgtacctatacataattataatacattaattaacaatacattatatctaagcaattaataataataattaagacaaattcatattaagatttttataatttttttaaaaataaaaatcacatttttttattaatttcatataactagataattaaaatatgacctttttttttcattcaattaattctggacaaacaaactatataagagatcagatccccttattcttcattatataaaatttaattttatggggcacacaacacaacacgcacattgactaattaagtattgcatttagtacccaattttccaaaaacaaataaaaaaaaaggttttaagacttttggttttgaaataagttggattatgtctcctatagatcccatgaaatatatatctttacaagtcaaattattagttctagaagtaattccaaaattgccatcataaatatctaacctaaaataatacataaagaatgcaattatatatggtcctttcttagcattactagatatatatatatatatatntatatatatatatatataccaaaagatcgaatatgtgaaaatcacacatggatcccattctaccaccccttctattattattactattaataaaaaatatttagataaatttaataatggggtgagttgatttaaatgtataaattaatcttgaaagggtagcaagaaatattactatatattaattatataatagtatatccataccttggctcttcccaaagccatagtgaggacactatagacaatttgcatcattgctagaacaaaaatgaagtaattgagttggttcattccaccctgtgatataaatgaggtcttcccctgtatttatttaataacattaattaatgacaaattatgtaaaataagattgaaaaacaaaaacaatttttttatcattattatttactaacactgaatggtcttgtaaatgatcactaatatttattatacttaattctatggtatcatagacatttatttaatttttgttaagagcattactataaggtactattaatgtttaacactattatgagatgacgttttgtgaatagttagtaatattctataataattattaaattaaattatgtggaatcaaatattttagagaatgctaaataatcactattaattttttttagcatttccagaccttattattacatactacaatggtactcaacaccattataaaaataaggctttatgaatagttaacgatatttcataataaattaattataccaatcaaatgaaagatgaaaagaaaaaataaatgaaaaaagaatatgtatacctgtgattcacaataatcagtcaaactagattcatcatcttctcccaatcttcttcccatttggggttcaaactcatgaaaatcctcaaagaaggtgttggtattggtgttgaaggagtttgaatgtaataacacagcaatagatttaatagtttttgtgtggacactattccggcatggaagcatggtgtaagctaacttagtgggtatgcaaaatttagagattggtctttgagttacagccaagaacagagacatgagtcccaaaagtataagcactacacacacattaattattccaatattaaaaaccccaaatcagtaaaatgaattaataaaacccccccaaaaaaactaattctgatcacctgatttgagcttctccacagcctcatacagagcagtctttctgttccttttcaaccactttatcaaacacaaaattttaagtcacaaatttcccaattaataatcaaattacaaaaccaaacttatttatataaatacttacagtgccgagtatatggatcaattgttcgatgaaaattgaaatagaaatgaaaacaagacaaacagtggccacagcccaagtgggtgtgtattgaagagacctgctttcatgtggtgccatagccaatttgagagaacaaagaatgaacaataattttatttattttttcttaaatattggtgaaggttataactccaccagttattatagatgtctctgtctattttattatttgacacgcctgactttttagactcaattaagtgtagttttgattaattaaataattggtgatactttatttttttttttaacattagaaaagaaagattgtaaatttggagtggtcgttgttgtcttgtcacgatgaaaagttagtagcaatatttatggattgtttgttggatcaagtgtgtgttagtgttcttcttttatttgggtacttttctttattattgactttaaagttttgcatgggatgggaaagccgttggagctgggcattaattttgttgactttttagaaaaggagtcaactaactattttcttttttgtttctttctaagggtaagaactgttctctatatatgtgccattaataacttgctgcttagccttataaatacaacaccaatcttcggccaccggccatggccgccgcggttctcacaataatgttattaggtcggtaagaggattgttataaggtgtttagtagtacctaatatcacttatagcataggttagtgatattttaattatttttttaataatatgagacatattagaggatgctagacactacttagaactcacaaaacgggtcaaacacgataacacgactcgaaacgaaacccacacgaaaattggtaaatttggatttgctttaaatgggttcaggtcttgttcggggtgactcgtttaacccgtttaataaacgggtcgtgttcggattgatacggctaatacgaaaatgacccgttaatgacttatttaaagttattttagtattttaacatgtcataataaaatgggtcataaacgtgttattggttgacatgtttaaacaaaatatgcttataaacgagttaaataggtcgtgtcgaacgtttataaacgggtcgtgtttgagtttcattttctgacacgattattaaacgagttatgttccggtcgagcatatacttgttatacattggtctcgacccgacacgaatacaacttgcgaacacaaattaccacacctaacatttctttaattataattagtataatggtttatttattaggttatgattttattataaaattttaaaaaattgcacctttaaaagagatgcactgatgcatctctatttgttttgacattttttttttcttcagtttattgcattatttattgtatcgatataaccttttaaagggggtgtgttatagaattttccaaagttatattttcaaaaatattatttataataaaatatggggaaattctataatgcaccccattaaaagagatacactgatatatttttatctgttttagtatccgaaataattttttaatcaatttttttctcatggtcatgtaaattatacttatttaagacatcctgcaaaattttaagaaattcaaaaaagtttaacacgccgaaaattatgttcaagtagtgtcttgcacgcgtaattattttattttatacgcgtgtaaaatagactatttgaacattattttctanattgtaaattattccgaatttcttaaaactttgtaggatatcttaaataactataacatacatgaatatgaaaaaaaaattagactaaaattttttttgggatgccgaaacaagtagagaatgcatcagtacatctcttttaaaggggtgctagaatcaccctaaaatatataatttggtaggtaaataattttgaagacaaaaatatttattattcttttttattttatttaatacattaatatttggcatgcttgaaagtggaaagcattccttggaagtttgtactgattgatacgtaattatatgtaaatggactacttaagctagatagaaaaagttagtttatgtgatcataattaataataatcgaagctataaaaaaaattaaattcccctagttgattttgacaaaggaatatagcttgatcatatgattcaaatacatttttaatgttataataattaaaagcattattttaatgatgatttataattgcttgtcttgactgtattttaagcttgtttatattcttagtgcataccctaattaatttaaaatattagaattacgtaacaaataagaccagaagaatatataatttataatgcgaggtttatgtgaaattcaaaagtattgtcctatatttaataagataataactaacacaagatcattaactgaaatatcatatttaatttttatttttttcaatgagaaaatcagattgaccatatatatatataggagaaaaattatttgtttgaacgtacattataatactaatattcccatatgacttaactttagaaaatcaaatcaggaggaaaactaactaaaatataaattggctaattctgatttttgtctcttaaatttagacatatactaaattatgttcctgaatttttaagaccgttaaaaattaaatgagtatgatttaataatgtcaaagttgaaggaaatttggagaacataatttagtatataaacaatgattgaattaataaaattaaaaaaaaaattcttaaatccaataattttaatagtttaagaaaaaaatttaaccggtaaaaatgtttagcatgaacttaaggaataaaaatcctagttaaaattaatacatgtcaaaattaatagcattctctaataattttttaaaagaacaaataatcaaacgcatttattgtaaaaaaattaaacataaatttatattgtgtagagttatgtattttctgaacaataatattgccatgaatcaggtttactcataattataaatcatatcttaatagaaacctattgttataaaggaaaatattaataggtgccttaaagtatcaaacactgtaaaaagtagtctattgtaattgatatattttattaacaagtatcatacaatttgatttattaagtaatatagagaatcacaaattaattataatgtgacacattaatataatattaagtagcttaagtgttcaatagcaatgttctataataaattgtttaaaagataatgttttacaaaacagttctgtataattaatttatttcgacacataattgtttattatagttatataaaacacaaaaaaatcataaaatgggcatttggtctagtggtatgattctcgcttagggtgcgagaggtcccgagttcaattctcggaatgccccaattttatgcttttaccattcattttcaatcaaaacgccttttttttttttttttttgatgaagttcaatcaaaacgcctattcttatcaatcttcataaaatcgaaaatgttttcaatcttttttacaatcaatgagtatcaacacaaaatgacaatgtactacaaaaacaaacatatataaatgttatggttttagtttaggcttcaatt

SEQ ID NO: 24518 - DNA, 3110 bp, Cannabis sativa
  modified_base (1971)..(1993): a, c, t, g, unknown or other
gtaaaataatttccaacaccacatgtatctattttatagatttaaataaaacctgtccccaaggacaattttcttttacctagcattgattaacttgttgatgccactgcaagtcatgaattgcttaactttatggatgcgtactcgggatataatcaaatcccaatgtacggactaaaaatgctcgacttgcgcactaagtttcacaaagcttctatatcccacttctcactattactttgagataaactccaagcatctatagaggcctaccattgatcaacttgttgatgtcaccacaggtcatgaactgcttaacttcatgaatgcgtacttgtaatataatcaaatctcaatgtacgaactaaaaatgcttgacttgcgcactaagtttcacaaagctttcatatcccacttctcactattactttgagataaacttcaagcatctatggagaggcttaggaatagatatttttgagagcaatcattagattgtgcaagctttgattctacccaaaaatgggtcatattctcttaacccttatctttgatttatatggattcttttatgattaatctcattattcttattgttattgatctttaacaagtttattgtcattctttatcatcattatttcattagcattaataagttatcatttatattaatgtatgcattgtttttttattatcaagattcatgttcatctcatatctcatgaatgtgaattttgatttcattatggttctttattcatagaatacattctctaattgttgtaaattgattatgtaagatcataattcctagcaacctttcgattataaatataatttgaaaattttaaaatatatttaaatgttgaattatttattaataatttatatataaatatcgaaaaaattattactcatacgtggggttatgatcttataatgtataagagaattaagatcatgagctatcaataaaatagtcatcaacatattaaagtttagaatctttaatcaatggttactagtacggtttactgatgcacgtcactcggtgctggcaattttaatttggattactaatgtagtttgacatcttgataaatgtactgtatataatagatattatatataacaagactaatatgtaattactctaagtttatcaaattaattgtttactattaaactagagattatatatgacaagactaatatgtgtttactctatgttatcaaacattgcggtgtaaatttgacccatcttatattttgtgccaaattttacttaatttttagcatttgttaaatttagcacactttttacactaccattagagcttcattttttaatgcactaaaaaatagcaatacaccaattttatagcccttcatttgagatgtttttagagtatctctaatagaatgctataaatgtggtgtctatgtatattttagtcaattttcataaaattaaactttgatggtagtgtataatgtgatttaaatttagcatatgctaaaatttgtgtcaaatttagcacaaaatacacgatggactaaattttacaccgaaataaatattactttttattttctcttttacgactcgttaatacaattaataacctttaataattttatttatatatttaatatgatttttatatattcaataaaaatttaatatttttgttgacttttttatatatttctattaaaataaagtttattgcattggaccaatattattataaatttaaatcaaatgtaacatcgacttattttttaagctaaatttagtacaaaatttacactatttattgacgatggtctcaagagagaggtgaaaacgaaagaaaaagaacaatagtttggtttttttttagaactaatggtgaataggttataaaaagatatttgatgcaatacaaacttgtctgatttatataaaaaaataataataataannnnnnnnnnnnnnnnnnnnnnnataataataataataatagtgtatcttcttatttatattttttttaacaaaaaagtggggttgtatttctctatttaaaccagaactatttttacaataaaattagagcctctttaggaaagattaccttcctaataatgcatatgattttttctatgaaaagttgcatatgattttttctatgaaaaaatgcatattattttgttttgcatctttcaacctttacatatatggggattatttgtttgtttttctgcataatagtatgtactaattgttagctgggaaaattaagaagaaaacgatgtatatatatactagtcaaatatcactcactaaaaaataaaaaaaaataaaataattttggtatatatattttctaatttacatttttgataaaatgtcaacattattaagaggtatgtggaatgcatcatcaattaataagaaaataataaatgaaccagttgtgatgtttcattatagttggttaaaattttgtcaaaattactataatcatcaacaatatgacttctttgtgttaaacatagtgggaagggttaagcttttttaagagaatttttttccagattttcttttttttttttctaatacattttcaaaggcaaataacattaatattattaaccaaaaaggaaagtagatatttttttatataaaataattaaaggaaaatagaattagagtactctagatagcttacttactattcttggctttgtattaaagagaagtgttattaattataaatttctattataatattttaatttattttcgtacctaaaattataggtcggaatattttttttaatttttttataacagtattcgttatatagttacaatattatttttataaattttttaaaatttttaaatagtttatagtaccaaaaataaaattattgatattctaatttacgtattaaaaaacttcacgcatatttactttattttaaaagtttatactagtttaataaaaatattttaagatgtatttttgagcgcaaagactaaataaaaaattgtaataaaagattgagggtaacaccatttttttatattattagagggagtatttgccacgtcacca

SEQ ID NO: 24519 - DNA, 1762 bp, Cannabis sativa
atgcatcgctatttatatattatgaaattacgaaatgagtgtcatgaattgttttattgtttggcaaataattatgtttacacactctttgaacaaaaaaaataataaaataaaataaaaagcctatagtaaaacaaatctcataatcactaggtaggtgtaaggattgagtgaaattatgatttttaataattaacattattataaatatatattatatatattatgtacgtccaacttcttattacatttccaaatatagatatgggaccaacaatatagtagagtatatattgtaatttcgtgataaattcaatgtatgagaatctaaactctaaagtaatctaagattttccccctcaataataaaataaatatgtaaagtgtatatatatatatatatatagtctaatatttggtaattaatccgaacaatttcgataagtataagaattttggaccgaacgaataaggcgagcttgcatgtctcacgttataacaacatgcatatatggtcacatggtggccctattattcatcatcatttcttatacttataaattaataatctacatacaaaaaactacgtatatatatacatatataaataatactattcaattttgaacatggaataatagcaatataatgtttgactggcttgaaacataaatatacatgcattaatttttatatataacacatgtgcattaatttatatcctagtcatcaattaagagatctcaattagatcatacaaaaaaaataaaaattattcaaaccaaacttattttgttcacatttatatattatttatatagtttatagtccaaattaaagtgatctcgcaaaatttttccagttattcgttgacaattattatttttttttaaaaaaaaaatatattttcctaatttaatttttatgacaaacaaaggtgtcgtgtatattgagtgtgcatatataattattagttatatttgttatgtatagaagacacaagtactcaaattaattatagtttttttgttaaaaaaaaacattatataattaattaaactgcatgcagatcagttctgttgcagtactacagatcatcagatccgatatgaaagcgcccaataaattaaatggaattccatgttagtctgatcaatgatttaattgactaattatgaacaaatataattataacagaacatatatatatttaaataaataaatatatatatgtggtgcagtgggtgttaattcgagtgattattatctctagctgagtagctcatcattattatgctaaccttattaaattattaattagtaattataactgtattttattttgtgtattaagaaattgtagcactaattaaaacttgattgtagaatatatatgagctgccgagggagcttttgttggtactttgagttgcttaattagtatgcatggttggcccaatcatggttttcaagctgtcatttctacttagcatgtgattcagttgagtacattttattataataagtactacactagaatttaacctgaacattatatatcaagtaatacttgtatagaaaaaaaatattatataaagtttgttttaacttttttggataattttttttttatttcttttgatagatttttttttttggaagaacactgagttcattaattaataagatatccattgaaatgtgcctgctgattggttagcaacctctaatatttttagttaggtcattcccaaacaagtta

SEQ ID NO: 24520 - DNA, 3717 bp, Cannabis sativa
ccatataatgtagtaattaatgctccttgtaatattgtgcacgtgttccaggaccacaccaaagtaccgcagttgagtttgaagttgaacacgtgttcaactgtaccagaattaatttaattataatacgtaagagaagagattttttatttaattaaataactctgcattccattcgattaaaaataaaaataatttaataactgctatatgttcagttaattaaaattgtgatgtgactacgtacttacttatatgtagttccctattatttacgtaaattaaaaaagagataagatattatataataagatcctgatcaaactttagcttacaaccaaataagaaaaaatatttatatatatatccacagatattatagaattaatattgttttttggaagtatcatttgtaaatgccttttcttttttctgcaaatattaatgcacgtagttaattaaaatatgatgcctctcacttatattatatttcaaaaaaaatcatttactccttaaaataattagttccagacctgaaccgtacgtacgtatatatacctacctacctacacagtatctttatgagaatattttctatgtagggttccatccagggtgacaacaacaaacatagatacgaaagttgtaaactaaacaaacatatatgtatatttgggaactatagatgatcatgtttttcacctatatatatttatataaggctggtcgtaattacaatgatcatatactaagacaattaatgccaatttattaactttcggcaaaaccctaaaaacaaaaatatatattaactttcgagaaggggaaaaaccggtagttttttaaagatcagcatatatatatagtttgaaatattgtacgcttattataataagtaattaattaataattttttttttcttttgaatggaataattaattttttacagtgacacgtgctggtgacttaacgtaggtcattagatttgacggccagtgagctggttacttaacgatcgcattaataaatttgtgggtagttaaaatgggatttttacaattaaaaaaattagtgaaagagcaacatttttttattattattttaaaaaaattaccacaaaagaatctattttatgacttattaatcacattttcagactaattaatacctcacttttactgcaattaatatttatgtatatatacactgtgtgtggacacacagctatatatttttatatgtatgtatatatatatataattaagttgttgattttgttttcatggttggagatcttatatatctgtgggtcagactcatttgcccaccgatatgatattgaattaagtatattttttacacaactaattaattatcaatgaaatatagtaggtggttcgatatcttctggacggtcatcagatctcattatatattattaaaagtttagactgtacgtacgtagtatatataagctaagtaagtatactttcaacttcacttaaacaaatttgtgtataaatgtatagttttataaatttgtattgatttcccattcttacgaacagaaaggtaaattaaagtgaatattcacaataattaggctccaaaacgtataaagcactagtaattaaaagtgattaattggttagctagtgatttcgcctaaactaaaacgcgctttttaaagtcatgagcttaggaaattcgaatattttttaatatattgaacattttagatttgttcttttctttttttacgatatcgaacaaatattgcaaagttggacactcctctattttagccaaaatggtcttctggaatttgtgtaaattagtctccccttttacttgtactatctctatatattgcacgcttaacctcgtcaaattctgctcacgtgtactttgactcgagacaaccaaatgaacaacaacaaaaacaacaaaaaattctccagttaattatctctcaagcacataattaaattaatatcccaaccccaagcaattaatcccggcccagcatatatataaatactcgattatttcacagataatagactaattttatggatcgataattaaattgaaacttgatacacatgtaatatatattatatatatatatataaaaaaagatctgtttaaataataaataatcaggatatatatagttgctaattattaaccaggttatataatagttggtgctaaactcaaagatataatatgtgtagagaaagttaattgattataatttatatacgtacgaacgcgttggatcacgtttgttataattaattaaggtagtatatatgtaggtaatggagcttgataatctgactagagtgatgactgacttgtttacttaattaactttaccccatcgctagctacaaaagtgtactgattatcaaaataagtaataaaaattgcatggcctggtgaaggtgtatataacaggccactgtacacaattaatttttataataaaaaatgtcagtgtgtatatacatacatatatatatataaagattaaattgatagaaaaaaaaaaagcaccgaccaatatgatatgaacgaattctaattatgaatcccgtaacgattataatgagcagattaatcttgatctgatttaatatttttttgaggaatttgatttttaggtttaatttcagcctatttataagtaattattaattataaattgtattttgggcccttttgtaaaatgcaatgtttgcctaaattaatatttataaatatatacatatatttttttttttgcaagcaatatatacatatattttaaagatacagggatatggaaattttcttttaaaacaaaattcatgaatagatgacaaattgaataaattgtgatgtagaaaaaaaaatagttagaaagttatgataacaaggtaaagaagcaagagatgaatctgagactcaaggagtttgaagataaaattgccagcttctctttgagtacgaattcaaaagattggcagcaactaaaagaccttgaacggaaaaataatattctccttgataaagaagaaaagttttggaagcaacgaagtcgcgctctttggctaaaagaaggggatcgaaacacgaaatactttcataggaaagcaaacactcgaaagaagaaaaactctatcttgggcattctgggtagcaatgataattgggttaatggaaacaaaagggtgggacaggtagcctgtagttatttccagcagcttttcgaagctaatccagcggctaaggaagagttggaggagttcaaacgagtaatcccaaacaaaatatcccgagaaacaaatgagttcctcaaagcaccgtttactaaggaagatgtatttcaagctatgcgagatattaacccccaaaaggctctgggtagtgatggaatgccgggtctcttctacagaattttttggtcgagtattggtgatgaggtgtcaatagtttgcttgggggtcctgaatgatgggaaaccggttgaggaaataaatgatactcttctctccctaatcccgaagattgagaagcctacccgaatgtcgaatttccgacctattagcctttgcaatgtggtgtataagatcatagccaaatgcctcgcgggacgcatgaaaaatagcctttaccaagctatctcggaagaacaaagtgcttttgtgggaggtagactcattcaa

SEQ ID NO: 24521 - DNA, 2690 bp, Cannabis sativa
taatacctcaagtaaacacaaaacctactaaaattgtgagagtggaagaaaacatagagaaataaaaatcctaaagtacaatgcaaaataaactaaagaaaaaaaaaaactaattaggctagaaacaaaacatgaaatatgagtttggatattaaatttacaaaattatgatttatcaaataccataaaaaatcttaatgccatgtttatttaaagggaatgaaaattaacggtatgttattgattcctatacaattgtttactaaattttagagagggagaaagtagtggggcgtacaaattatgaagaaaataaaaggaaagattctcctctcatttttatagggaatacatttcccttttctaatttaatttattttaattttaattttattaattaaaaatgaaaatgacaaatatatcctttaaaaatctataaacagaaaaataattatatgtcatactaatgacaattttgtcaaattaaaacattttgattacttttttaattatgtaaacaaaataaattttctttcgaaacagtttagtaaatagcataataaaatattatttctaattattttatattttaaaccgatttatatctctcaacaattattctgatttagttaaatataaaaaaaaaaaatactataagagaatggcaaatttaaaagtaccatatttttttaattttcttctcaaatctcatatttcatgccatttttacaatagctataactgtagaactcaaaagttgcccaagaatgtatctacaaagtccagtctattgaattaaatcaaggcccgtaaaacacatgggcctcaatgaaaagacatttatgatagaccttgaagaaaaagctcctggaggaaacatggatgtgggtgcgtatgaagcaatatattataaaaaaaaaaattacatatcaaattttaaaaaaattacaaaaatagatcaatatgaaattttttgttattaatagttattataattgtaatgagattatttttttaattactttttaatattatatttttgttatttttagatattttttttactttcgataacaaaataacaaagttaacaaaataacaaagtgtatttttataattttaaaattttacaaacttatttttgtaattaaaaattttaaatcgtaaaattataaataaaataaaaaaatatatttttaaaaaattctcccatattatatatatatatatatatatttatatatatcagtgttgaaaaaaatataaccccagccaggactggagaacatacattttggtttgggaaagaaaatggctcaagaacgaactgattttacaatctaagaaatattttacaaaaaaccaatcaagtacgcactggactaggtataattacattacattacacacaggctgatgagaagtacaaaaataaaagagggttggttagttagtgtcttagaggtataaaactaaagagcaacaaagtgttcctcctaatattcatatacaagatgagaatcgccaaaagaaactcattaatatgtaatttaaggtttttaattaggtattcttcaagtaggaaactcaatgactaaattaaccaacacatgtacagaagcataatagtactctattatctaatcaaattgtgaaattcgatgggatatatgaaaagcaccagaaaatgttcaaaaggctcctaagtcctaactcaatccgtcgttcaaagtttcaaacttcaaagataccaatgcccatgagagtgtcgcaattaatatgttcaaagcaacctattgtactttggttcatccgaaaacttgcatacatatagcttatatgagaattaaaataaacaaaaaacttcatatggttcaaagtcaacaaattcaagaattacaccaaaagaaaaagagaaaagaagaagaaactaataacatctgtaattgtctaaactttggaaagaaacaagagtgaaaaaatgccaagtaccaacagttacagcatgacttttgagctaaaccgacagttgactactgaagcaaaagtatatattggcatatatttatggataaagatttcatcaaatatataatttgtttgagaaagcctttttcccttcaaaggcctctcaccaaacacttttgcccacaacacttctcacctttttccataacaaacattactaatttccaattactcggaacgattagcgtacctctcgaccttctcatcgttgagattaatcccaaccatagcctcgcccagcccacagctcacctcagccagcacatccgggtcgctgtagtgggtcacggcctgcacaatggcacgggcacggcgggcagggtcgccactcttgaaaacccccgaacccacgaagacaccgtcgcagcccaattgcatcatgagcgcggcgtctgccggtgtggccacgcctccagcggcgaagtgaaccacgggcagcctgcccagctgcttggtctgcataactaggtcgtacggggccgatatctttttggcgaaggagaagacctcgtcgtcatccatgttcctcaaaaccctaatatcacccatgacggacctgacatgcctaaccgcctcgatgatgttcccggttccggcctcacccttggtgcggatcatggcagagccctcgcggatacggcggagggcctcaccgaggttgc

SEQ ID NO: 24522 - DNA, 2572 bp, Cannabis sativa
tatatgttcgtttgagaacaaaaaaagtattgaataagtaaaaacaatatatatattaaaaaaaaatgattgagagtgagaaagtgaaaaatatatatacatctgttttcaaataaacgtttattatagtcaaattgaattttaaaatgatatacatatataaaagataaattaatattggttggactggaagtccatgtgtgtccaacaaaatttattgtgaggaataataattgtgtgaaggttggtaagctgtagtgtagctctcctctccagttcccatcctccacccacaattttatagggtaatgtttcgttaaaacttattcatatttaaatagtcaacggatatgtagtgtctcataaatgcagcagtcatcatcatactgattcttcactctctatattcatcaatgttttcatttaggctttttctttttttaatagaaacataaaccacagatcggtggtttatatataccggtaaccggtgtgaggtgtcacctacttacttctgaatattgaaataaaaaagttcgattaataatcttttcactttatggaaatatttatgcatttatgttttatttatttactagtggtaatttgtataattatattaaattttaaatcaccatcaataagcgcccatggcctaatggataaggcgtctgacttctaatcaggcgattgtgggttcgagtcccactgggcgtgttttaaccttttaaattccgactttttccccttgcattcttctctctctctctctcttttttttttttcccccttcccactgttttgaaagttgagttttttgttttaagaaaaaaaaattaatagtttttctttttagcaaattataacaaacaacttctctaagatttaaatatttaaagaaccatagtataaacacaatacaattaaggcaagtttatttttatagcttgccttaattatttaaggtagtatgtgcgtaaaaccgtttcaatcttcaacaagatctaaggcgaagcttgatcgctgccttattaggtgaaaattaaattaaattttttgacaaataaattaattatataaagatttattgagttttttttttttttttaaaaaaaaaatatgttaatatattaaattcttattgttaagatttttattttttatattaatttcatattattcttgacatgttttattaataattattataattattttttttttcttgttaaataaacttaaatttatttataagaatctttcataaaaaaaatatagtcataaaaatgattacaagaaaataagtataattataaaaatatattataatattatagaggtgatatatatataaaatttctttaaaaatcattaattattaaatatttagattaattgaaatataatgatgacatttagtagttgatattaatgttcaaatgtattgaattgaaaatatattacccatgttatttaatattacccttaaaataatgtaggccttaaatttatcagagttttatgcttaagccaaccctgagtatggatgatacgtttccactagtcaaaaagtaacacatttggcttgatatttttaaatttttcattaatttttacttgatagaatcaagtgatagtctcataatttagtattttattaatataatactttatttgtagattgttattctaatacaattttttgtgtgtttgttttgtgatgtttcaagtagtttttcaatattacaaatcaaagttctagcccttatggtatatagtttgaggacgttatagttttattgtctaaatattcttagaggcagttttatcccatgttgctttctttcttctacagcttatagtttggcaaaatatgtttttcggttagacaatgagctatcctacttcaatagtgaatgttagcattgtatattcatttttaaagcttctttaaaaattattattcatgctatatattcggagcgtctccaatgtagatacaaatatgtgatacaaatgtaaagtatagttgagtttgtaaaaatttactccaatagtgtgtcaaattgtgatccaaatttgtcacataattagacccaaattttacatatttttaatagatggtgtaaattttgtgctaaatttaatttaaaaaatgagtcaatgttatattatttggcctaaattttacaattgtgtttcaatgcattaggggtaaaataaattttatgttaagcgaaagtgtaaaaagatcaacaaaaatactaaatttttattaaaagtatattaaatatataaataaaaatacaaaaaattattaatgtcattgatgaatggccaaaaagtaaatgaaaaagtaatttttattgtggtgtaaaatttaacacatgttatattttgtgctaaatttggcacaacttttaatatgtgctaaatttagatcacattagagtatctccaatagagagttataaacgtagtgtattgccattttttagaatattttgctaaaagtttattctaatggtgatgtaaaatgtgtgccaaatttagcctaagctaaaaattgtgt

SEQ ID NO: 24523 - DNA, 8806 bp, Cannabis sativa
  modified_base (5029)..(5033): a, c, t, g, unknown or other
  modified_base (8699)..(8712): a, c, t, g, unknown or other
cgggacttaagggggttttcccactaaaaataaagaaaagggggttaagtgttaaacaaataaaacataatggggtttggccgcaaatttctcttatatttataaaatgaatgaccgtaatttaataataataattagtatttgtttaatatgataatcaaaaataataattagtattttttgtcctttaaattttcaataataactgttaaattttttttcttaaataaataaaattaaattaaaaatgttatgtttatttaaataaatttaaatttttaaagaaaaaataaacttaatcttgttccagtaaaatttaatttttatatttaaataggtttttaagagaaaataattaaatttttaaatcactaaataaattttaaaattttaattgttttaagatttaaattattttttaaaattcatcaaaaagatattaatctttcttatattttatttggagagggagggacggagggacttaagccattatgtaggctttaagccctcactcaaatttataataaataagaaacttttatattacatatatgttaattagttttatttaaatttttgtttactataaatataaatattaagccctcacttaatttgttcctacccaattttgttaataccactaaaatttaacaccaattttgaaaaacactcaacactcttttttattctaagtacatatataacattctatttaacatgtttgttttattttatttcaatttttttttatttttttaaaataaaaataagtcatttgattcaatttacattcaagttcttgaaaaaaaaatattcaagccttcactgaatcgaaattctggctccgtcaatggggtgttcattggataattgttaaatttatatgtaaagttataaatatttaagttggtaataatatttaatttatatttctagaacttctgtaagtatttatctgttaaataataaataaattagcacatgacaatttttgattgagtcatgtcactaaatttttattttttttaaaaaaaattagtttaaatataccaataagaaaataacacataaataataatttagcatttaacagtcatgtacctttggagttttagaaatataacttagattatttacaataaatagttaaacttaggtattataccgcaaattagtgttttataaatataaaaattgagggagaatttttaaggtacgactaatcaatatataaatatatttatgaaagagaagtatgaggcggtgacatgtccttctaaaatcactctaaaactatttttctcttttctccttaattctctcaattttaatattttattaaaacataaatctacaaattaatattttactattattttaattatttttctataaaaaaaatataaatctacaaattgatattttactcttattttattaatttttctataaaaatataaatattctaaaaaaaattagaaaataaaaattaaatttcaaaaaaagtattaaaacttaaattaaatatagttaatcgtaaattttttttatatacatacataaaatatcaatcaatatatatacgtataacttaatattcttggctttgtttaaaaaaaaaaattaagatataataataataataataataatataaaaatgataactctaatgtgtacgtttttggcttttttttttttttttaaaaaaaaaaataagatataataataaaagaatcacgtgatattagaaataatatttcaattgctttttaccacatttaaattttgttaaaaaaatattaattaatttttaacaaaagcctactttatgtttttttttttaaatgataactttaatgttaagtatcacataattataactaaagagcattgttattgggcactagtggtgccaacaccttacataaatggcgttagcgatattttctaaattttattttttaaaagttatatggaacccgctacttaattacaccattaatagtatgataccaatgaaagttgccttttaacatttctcataactaaaatattacaattttttttctttttttaataaaaatatttgaaaaaataataataacttttttaaaatatattaattaataataacagaacaaactaatgaattttttctaaagtcttaaaatgttaaaaaaaaaatatttaaaatttgagatgaaatttaaaattaagatttagatttggaaaatataatagtgatgactacaagtaaattacgctaatgacaagagatgagatacagtgatgacaacgagtgggatacggtgataaaaataagtgagatacaataataataataattttgaatgattgagatataaaaataatacattatggagaacacggtaatttttttctagaccatcctatttatttatttttataaaaataatttatttaacaacaaaatttaaaatactatatataataaattttaaacttcttaataaaataattttaaataataattaataaaattatctatttaatttttaataaataaaattattaataacaatgtaaaataaaataatatatttataattttactatttttaagtaactataaattataatattgcctagttattctaataataataactgaagataaaataaaaagaaaaaggttcctaattcctaaaccctcttctctgagtctcacaaagcccgctcacccagacctccactgcctcacagaccccgacggtctgttcctctcgcgctctcctcaccacccccgatcgacgtaggcgagctgcgaactacgatcctccctcctcaagttcctctcggcagcggaagccgaggagctcgacggtcatccatcctatcgaatttccaccactttcggccaccattctaacatgtaataccatatacttagaagagattggaaagttttaattattttcaccatatgattcgaaaaccgggactaaatgctgtgtttttcaatcgtttttctttcatttataaatttctgattattgttaactgttatgtgtatcagcttatgctataagcctataacacttaccggccggcctggtctagccattcattcccgccactctgaagcatagagtttgcttgcctcgccgtttcctgcagaaagataagaaggtatgtttctgggttttctttactttgcaaatctggaaattattgaatttgccaagaaaaagaattgcctcctccacactaccactgtactttgtaaggaagactacaaattttatatctgtttttaagtttttatgtttcaaatacaaagttgagtccaagaatctctatgaataatgatcttgcagaatatgtcgctccccgggtcgacagacaatagcacgggtgatgagatggaaaaggttatgaggaacaacagtgttgaagacatcagttggctttgttctttgtctgaatccgagcttgttagcacttcgaacttttgcttttttctttttcatttatgcgtgtttgtgtgtctatatcgtaagtatagatgtatttgactcttacaaatttatcagacaacaaattaatgtagtgtgagtttaatgttggtttgcagtttttgtagtaatttattgaattggcactagagcatagtttgtgtggcttgattctcgtgggacctcctaccaagtagattgttctcatgagatttcctagcaatatgggaatcgcttaacaagattttaaagtattatactatttgttttagcgtattctatatgcttgaacagtattctgcaatccaatgattttagggtatggactagagtacgcaaatttgttttgaaatgagcgtgtattcttgatattatccgatgaataaagcatatatctacacttactttcagtactaatatgattgagtggcttgaaacatcatggcaggatatgctcattagcttgaaaatgcttgtactacaacgtgcgaaagtgcttggacatgaccaaatagctgaaaaatttgacctcaagatgcttcgagctcttggtatgctttttttcccactttatagttccagtttttttatgttacatggttaatatacattactagcatgctttatatattctctttgtttaattcatattctcattcttatacaaagaaagttctgtaaatataagatggattctgtttaaagtaactgttttcaaaaacaattctgtcaacaaaacaaaacttgtgtataaataattttaagaacagtggatactttttcattctcttcccctgcccctctcatatctccttgtaatttaataaatgctccagggtttaaacacttctcgaaagcatatgtcatcttatattatagtaattgttgctgtctagtttacattttattttaagactggtgaagagtattagtctctttctacattccatctttctgtgaatgtttcgatgtttttcaaaaaaattatcacgaatcgttcttaattttgttgttgctggagaaaggaatcccctgagtgtaaggctttgtcgtaggattcatgatttgtttattaaggttatatagattttgcataatgttctactattttctcttagtaattagttgtaatttttagattgatgttaggcatttattaaaaggtaaggtgtgaataaatgaattagtggggagtgcagatacttttcttgaaggtgagttgtagtctgtaataaaagagtgtcagtggtcttggggatgtgcaaaagactgtctagaaacaatgggtacatttaatagtgtaagatagatctaaaggggttatgtatcgaatgaaattggactgggaggggtggtctcttgaatacaccgttaagtcttctattctgagaacttgtatgctggctgtgctctctaggttgtgtgtgaatttatttgggcctttatcttgaccaaactgtgaatttttgtcatttgattgcctttacttttacatcttagaaattctctctctctctctctctnnnnntctctctctctctctcacatacatgtatgttcttgttgagttctcgtgcagggcttattttgatggaatatgtcaaaaagaaggttaatgagaagtcactggtgtcaggcttgggagaatctgttgcattcatggattcttgtaatctattgaaatgtgaagtcgaaaatattttggagagcgaggagatacaaatatctatagctgctaaattgaaaaagagacatgcaaataggtcagtggatctcactcaattcctgctttagtttggcttgtgaaatctcaggtgtgcaaatggggttattgaagaataagaaataagaaaacggatccttgttgctcttatattatgtgatgtatttctaaggataaaaagaagaaaagataatgcttcttgtttttttattctaccaggactgcctagtacttcacttttagacctgggctactgcgcttagcactgttagcttgtgtatctgtatgggttatcacattcgctagtgcatccatattgagaatccaacatgtcgatgttgcatagatacatagatacatagatattactaatttaaacactcgactgactgaatagttttagataaatgtttcttaaaaggtggagttttatatgcctagtatgctgcctgctgttctcagaatcttgttgttatgtttagttgcaagttctttaaaaatatttgcctcttctcttgaccaaattttagctcacaacttgccatggcttctttctcattagctcatactcactattgctaccatatttgtagatacatttgtgctagatatgttgagattttcatcttgtctttttatgctccaagcatatataagcaccttcatattacaaagatgcctcacaaattctaatcattttgtcttcagacttttatcctagctcacagtttcagctagttttgtgaaaatgtgaaattatttttagaacaggccattttcaattttggtgtgagatcaatgttaggcattctttaatagtttatgtgcttgtttttatttatttatcttttattcttttctatgtcagaaaacaaaaagacgccgctgaaaatcagaggaaacggaagcgtagagaagaatagcaagaagtggtaagggatctctaaattagaggaacagcctcgtcaaattttggtacagtactcaaatctcttccctaatttgagttgttattgtttttgtgcattcatttctttctacatacccttaatggagatgagttgtcaattttgctacttttgtgatcattcattgtatatgaaataaaaaaaaaaaaatcatcattttggttttacaatgtgcaaattccataatttgaatgtgtgtttactatacttggtaagctcattgttatgtaacaattatattctaacctttctattctatctctaccggctaaaaaaaagttgtattggtatgtattgtcttatgaacttttatctgcaccaatatcaactatgacaaaattgtaaatgaaatgtgttcttgtgtgatggagtgttgagtgtggacattcaagttttctggacaaatccttaaggaatatttttttatctagaatccaaacattatactgaggattagacaatgtatccaaatcccaatccctcatatcatctccaatggttacaccaatttagtgtggaatctacactaatttggtgtagaatcttttgtttttagtacttcaataactcacactaaataataaatatatcactaaataaatatattttacttaaaaagtcttacattttatatcatttacattaataacttaaaatatttaatttataatataattatatcatgactattagtaaagatttaaaattttaaaataatttaataagataaaatattttataaattaattaaacacattttttttaaaataatattgaaattttatagttgagcttattatacgcgaccatttttaaaataaacaaataaggattatcttaaaaagagcttaccaataatataaaacattttaaaaatattagattctcaaaaaatacttaagttcataaccaatgtttattttcatttatgcttgtttttttgttttataactatgttttattttatttaatattaatattttttttactgttattatgtattttcaaatatgttagtgctttaaatcaattattttgtaataaattttaacttgaggactaaaatgtaagactattttttaaaataaaataaaataagggttcgaatgtgaagaaaaagttttaaaccaaattggtgtagatttaaaattcaacactattaatggtgtagaatttagtgaacaccaatttggtgtcattggagtgaaatggtgtaaagattctataccaatttggtgaaatagtgcaccatttcaccaaagtagtgttgagttttcacactatttctcttaaatgacacaccaaattatgggaagaaaatctgttgtccccaaattagtgtgggctctctatcccaccaatgattttagtatacattatctatacatatttaacatattataaattctttaacaaactataaattaaattaatatatgtaaaataggtatagatgatgtgtcgtgaaacaattagtgggaacagggtgggcacacaaatttggggcaacaattttttttttccaaattatgcaccaaattagtgttcatcaaattctatactattaatgatgttagattttgaatctacactaattttgtgcacaatttttttttgttgcattctcacccttattttatttgatctttaaatataatcttatattttagtcctcaaattaaaatttatcacaaaaataataattaatttaaagcactaacatatttaaaaatttcaaaataacaataaaaaaataataatactaataaaataaaaataaaataacgctaagttataaaattaaaaaataaacaatatcaatgacaataaatattaagtaaaataataatttagtagttaaattgatcacttgaagatcttagccttgaaaaatatcaaaatattaattatatgaacttaaagtattttgagaatcttgatattattggtgagttcttttttgcataattattgttcggtcattttgaaaatgatcgcattattaaaggatcaactgtaatttgtaaatattcaataattcaataagtttttttttttttttcaaaaaaatacttaatgaataattgatttaatgaatattttattttactaaattattttaaaattttaaattcttactaggcatgatataattatattaaaattaggtattttgggttattactgtaaataatacaaaatgtgagaactttgaagtaaaatatatttatttggtagaatatttagtgtcaattattggagttgttgtaaaaaagtaaaaaattttgcaccaaattggtgtagattctaccccgaattggtgtaaccattggagatggtcttaggggctcatttggaactcatgattggattggattgaaaatgattggatagggatatgttgaaagtaatcttgcatttgattttagaataaattagattattttttttaaaaaaaaaattcaaatttcgttaaaattaaatggctaattagtaatttttnnnnnnnnnnnnnnacatgtactaaattgtgcccctgaatttttttggcctttaaaaatttccccttaactattgagattgttaaatttaaggaattttgtctaattt

SEQ ID NO: 24524 - DNA, 2432 bp, Cannabis sativa
  modified_base (649)..(658): a, c, t, g, unknown or other
  modified_base (849)..(852): a, c, t, g, unknown or other
tttattaaacgatctactaatatggttgttcattgttttgcaagattatcatgttcttttttagatcgaattttcaacaagagtgatgtttctattaaattacagtcttatttattacctgatttaacaaattaataaaatttcaatttgattaattcaagaaaataataaatgagatttttttgataagatattaaaaaaatatattgaatcaagataattaatgtaaaaataaattcataatatataaatttataacaattatagaataatgtaattttcctaatattaaacattaaatgaatttgctgacttttgtcaaaaaaaaaatgaatttgctgacttcattattaaaatatataaatatattaaatggtattagtaaaagaaacgatttaatccaattcgcacgattcgatctgattcaattaacaaagtgtgaatatttgcattgtgcagattaaattggattgaaaaatttaaaattcgcacttgtgcggattgagatgttgattgacatgtaaaaatgacgacccaatccaattcacacatatttataaaaaaaaaattaaaaaagttatataacaaataatattttaatgtaaagaaattagtaatttaaacgtctaatacatataatacaattatnnnnnnnnnnttaatagatcaaatgtatattccatttttatatataattttttttctatatacaatttaaaataaaataaaatattttttcatacataaaattttgtttcttcctttcaatttgttatttgttattttatttattttattttgttgttagttatatagaaaaaaaaaatatttttttcataaatattaaannnnttaatattaaaaagtaattaatctaaaataatcgattcaatctgtacttttgcgaattagattgaattagatttgagctattgtacggattggattgaatttaaaaaataaaatctatatttagtgcagatcgaatgccctataaacaaaataatacagattgaattagatcaaacaccctattaaatgagtttgttatattagtagcaactaggctacattatacattgtggtaataaataacttcattgaaaggctaagcctatgagcacatttcccaatattattttatctaaactattaaatacttccattactattgtcatatatatttaattaatgatgtttctttttaacagaaaaaaaaaaaagaaagaaaaaaaaaaaagcacgaccctctattgttaatgttaaatatcatttagaaaaatgatgaaaaataccaactgtgtaaaggaaaaataatgataactatctgctaagattattaaaattaatcatctacttaatttttcaccaaaataaataaataaatgagttttcgtcaaactttttaataaaatagttttatcattattttgttacatatcttttattattttaaaaattaagaaaatatatatattttaaatatcatgataccttccatttcaaatatatatatattttctgttattagtagtattattataagatataaatttcttttcaataatttttttttaatcagaatcgaataaaagattagtgttaatagattttgtaaaataaatagtaatatatattttttaatcagaatcgaattaaagataaaagattagtgttaatagattttgtaaaataaatagtaatatagtatcattagaattttcgaaattgattctaaaattcaagatgtttatgtatatcatcaattctgagtttttttttttaataaattctgagtgttctaagttatctttttctagccaaaagttaaggctattttcacttcttttttgcttttcaaggaattcaaagccatcctttttgacgaataatattatggtgtcaataaaaatatgattctttctttgtgtaaggtgaaccaactatctattaattattatccagggttttggattaataaagggtgcactttcaaagctcaatatcaacctaaacaagctcatttttagcacagtcaaattaataaatcaatccagtaggatcataaatctagtttatagacacgataagatcgaactactttagtccaaaaaagagtatcttggttgagaatgaaaggtccatcaggacaattccaaatactcacatgaaatattctagaacgggcaactgaagagatatctagaaacctttgaatattatcctcagtgtcaactcgagctatggacaagagggacaattgcccaattgcccaaggcccatttttttttttaaaaaaaaaagcctttttctatatatatatcttaggaataattacataagacattatttattgtaaaataattatatttttacgttcaaagaatttttttaaaattttttacggttttccaaaaaataacacgaaaaca

SEQ ID NO: 24525 - DNA, 4275 bp, Cannabis sativa
aggaatatacaatagcctataatcgagtgttgggtgttggggaaagtgccctagtcagcatcagaatagaccttgagttaaacatcattgacaaagagattgcattttgcataggccttgagttgagtagaagaagtagagtgagaaaatgacccttgacctagagagcccttcaagtattgaaggatgcattgagaaacgtgaagatgcagttactgtgactcagaaagaaattgactaacttgttaacaataaagaaaatattagatctcgttattgttaagtaaataagtttcccaattaaacttctatagctagtagggtcaaaaagtaactcccatatatcctcgcttatttgagtgttgtgttccattggggtggacgaaggtttggccccaatataacctatatcagttaaaatttgcaaagtaaaaggtctttgagagaccgaaataccattagtaaatcttccaacatctaggacaatgaagaacctcaagggaccaagatctttgagtttaaacttgaaatcaagctgtcttttaaataattcaataccatcagagttattgcttgcaatgataatgtcatcaacatatactaaaatagcaatgagagtgttagtggaggaacgtataaataaagaataagcagaagatgattgtttaaaaccatcattaatcaaggtggaacttagtttagcataccattatcgagatgcatgtttaaggccataaattcttttatgtagtttacatacgtcatataaaggaagctctctttgatgtttgtagcctggagaaagggccatgtaaacttcctcatttagatccccatggataaaatcattgttaatattaatttgatataatttccaattattaatggcagcaagagcataaaggacttttagagtgttaaactttgttattggagcaaaggtttctaggtaaccaatcccaaattgttgggagtactgtttagctactaagcgagctttaaacctttcaatttcaccttttgcattatattttattttatatacccatttacagccaatgaagtgttggccagcgggaagagagataacattccaagttttattggttgtaagtgtaatagtttcagtatctattgcttttttccatatggggaatttataggtttgggaataactgtttggttcagagaccaaatcagcacttaaaatagcagcgcaaaaattaagagaaaattttcataaaaaatgaaatttaagattggatatgtagtggattactcacaaagatagttttggagatgggttgggcgaatgaccatcctaacagattttttttttttttgtgaaattagggcaactcgtaggggctggtacagccgctggtggtggtaacaaagttgtggtcgtagtggttggaatagtcacttttgatggcagcaaaggtgtgctagtggtggctaaaacaactgcttatggtggggcactgatgatggttggaacaactacttaagaaagcagtgatggagcattgatggtggttgggatagcaacttgaggtggcagcaatggaacactggtggtggcaagaattgggaaggcgagataagggcatgagatgcaccactagttgaaacattagtgtgggaaaaaagaatcaatagtgtcatcgagaaatgtatttttaagagaaaaatgtgttcatagaagataacatctctagagtgaaatatttgatgagtttcaagatatagcaaagcatatgcgtgtatttagctggatatgcaatgaatacacaagcacgagatctcaaagagaatttgtgccttgagctctccaaagtggaggcataagcaagataaccaaagatgcaaagatgatggtaagaaggtaacctcttgtccaaaactcaaaagaagatttaaagtgaagtaaaatagacagtgtgcggttcattaagtatacaacaaaattaataaaataactccaatagccaagtgataaatgagattgaaaagcaagagaacgagcaatttttaaaatgtgttggtgctttatttcaacaatagtgttatgtcgtggccttttaacacatgagtggtaggggaaaatacctttgattgcgaaaataaaatgcaacttttctttcgcattatcacatcttttttctttaatggaggtagaaaatttatttaacacataagtataaaattgaggtataatagtttttacatcggatttacacttaagcatataaagccaagtaaatctagtatggtcatcaacaatggtgagaaaaaagtgataaccctatatgctaatggtatgaaaaggatcctaaatatctaaatgaattaactcaaaagcagttgaagccatattattaaccgaattaaatgatagtttcttttgtttagctaaatgacttacatgacatggtaacaaagaagaatcttaataaaaaacttaagagttttattcaaggattcggtaatctagaaagaaggatgtccaagacgtaaatgaaatctttgaatttaattacaagacttattagaatgaacataaccacttgatggaagattttattgttagagaaaaaaaataagatatccaatacgattagcaatctcaatctgtaatgagattaggggttcaaagggacacaaatgaagtttacacaacaatgaggttcagaagggttcaaagtttcctttggcgtttatgttggatgatagtggaaaataccttcgaaagggatggaaatggctcaatgatcgacacttgatcatgaattgcttggtaagattttttgagcccaatgaggaaggaaaaaaccttttcatgatttcaaaacttaatgttgtcagcgaaggttcaaaaagtgtaagggagacgaggtcgaagctcattgatctcgtcccatatggcccaaagcttggtgaagtaagcagtggcaaatttgtcaccttagagtaaatctgtgagagattcttggagctcaaaaagacgaggaccattcccttgactgaagggattaatgaattcagtccacatctcgattgcagtgtcaagaaacattatgcaactcttaatatctagagaaacatagtgaatgatctaagaaattactattttgttgcaacgaatccaagaatggaaaagatggctagttggagcaggttgtggtagagtgccatcaataaaccctgtcttatttttatccctacgtcgttgctggaagttatgatctgagagaggtagagtaacgaggatcagattgggatgatcgtcagagccaaaaagatatggattatcttcgttggcatgccgatcatgagcaatcatatgtgacgaagaaggaccagcaagattggatataaagccaccaatttaagatctgagattgttaagatggactggatcgacagtaatagacggatcaatcagaggagcggatcttaaaataactgacggagcagccactggtgtagtgtcgatcagatgtggagcagttgaaaaagaactagcaacttaaggaatgagcggagcggagtgcaaaatggcagaggcttcaacagtaaagtcgatcagagcatcaacggtagggacaactagttcttgaacgattagaagcaccacgggaacggtggtgattgaagggatatctggagcagcatcactgacgatagatgcagatgcagagagaggaacaaaagaagagatggtcggtgtagcagtggcacgtggtgcagatggaggaaggggagcgttgcgcgtgcatgccattgagtttggcaagaaaaatgaatatgaacgaaaaaccagagcaggcacaagaattgtggatctggtctaggtgagagtgtctaataccatatgaattagaacaatatctcctttattgaataaaatgaaatcaattaacctataataaatgtaaactatataagtaatccaacataaataatataaaccaaacaaggataacttaatttctatacccaaacactagataagataatctaatatttagtagtctaacttaaaattatttatcattatacttaaacatatatcattataatttttttttgaaaaaataatgttagattttttatttgggcttacattaaactttattggttttattaaaattagggttgatttgttacattaaactatattgttggtgatcaattgttaatggacttagcatctgtgtgtaaagtctaggtgaagcaaaagtgtgggcttttctaattaactgaagcctt

SEQ ID NO: 24526 - DNA, 1150 bp, Cannabis sativa
ttgccaacacattccaagtaaattctattttaccagcggaataccaacttttgccaacacaaaaatatactaacaaaagtgacatttcttgtagtgtttatgtgcaaacacaaataactaagatataatagcaaattaataaacaactcatataatcaaacattgaaggatgcattgttagagactcattaattattgtaaatattttagtgatatttcttttaaacatattatcctaagcttgccaatagtatattgtacactctttaataaaattaactttatctttgaatgatcattgtgttggtaatctagatttccagattatattacatttattatcgatgtactgactgatatttgattaatgatatctcttgacatgttttttgttctgaggattttttcaaatttagtactcttgaagttttaattaatgatgtcatactatacttttttttaaaagaaaaacttatcatcaagtaattaagatattagattttggttatatatcttgtaattatatatgtaggaattttattcctaatatatcctacacacagcaaggaattagtcaaagaaatggtcaaatctgacctttaaaatccagtcaaaccacctttgttgactcagcctttaaaaccaaaacgacagctcactaatctttgagctacaaatcgtttatcccaataaaccctaaaagcaaatatcaagtatatatatatactatctttatatcatttaaacacactcatccgcctccactaagaaaaccctagcagaagaaaagtctcacacggctacagatccaaaaccaaacaaatagttgtcttctttgttattcttctctgaagaataatgatgaacaacccttaacaaacccagttactaaacccagaaatcacctctgcccagttccaataaatcccaaaccgagccaccttcttcgatgttcttctctgaagaacacgaagaaaatacaacccagaaaataaaaatgaaaccccagaaaaataaatcccttaaaccaatttaaaactcaacccagaagtcatatacacacataaacacaatatagagaaaaatgcagaaaattaaaggaaagaatgcaccagagattttatagaggttccccaatgaaatctgggta

SEQ ID NO: 24527 - DNA, 3892 bp, Cannabis sativa
tcacatttagttacaaaaaaaattatgttgtgactaaaaaattggcactaaaaatagtaattttttgtagtgtctaccaaaattctcttttttttcatcttaatttctttactttgctaaaggtaagaaccaaataaaaatgataaggatatgaatattgttattaattaagtatgaggtgctgtcttgttaataatattttttaataattattaaattaaaatatataagattgatataatatttagttgcaccaacgatattcaacgtacaatttctagaatattaaacattattaatactttttaattagcattatacacaaaatttatgtatagattgaatttagtaaggctgcacatttctactcgaacccatgaaaccggactaacctctcttgtacccgaaaaaattgaacaataataaaaagggtcgggtgcgggtgttacccaattataataatcacgggtgggtccggataatacttgggtttcgggtacctataccacccgaggtaattaaaaaaaaatagattttattttatacttggaaatcagattacaccaacttatatatataaataaatatattattgataagaaaaattataattgataaatgataagttatgtatataacaggggattttaaatagagtaggtcagttaacttaatatctaatgatgatatatataaggttattgaatacatcttaattaggtattatatattataaatatatatataattaaattgcactagcaaataagctatatcccttctctcaaacctccaaattccaaaaccaaatcattgcatgcactagaatttgggagagaaacataatgcattaattgaactagaaactgtgatataaccatctacgtacacatgcaaataagtcatttgagagtattattattatgtgtggtcatatatataattaataatcatatatagaagctgctacttacataaatacatatatattgagccccaaatgatcagtatgaggtgttacataaggatatacttgatgaaacaagatgagaacatgtatacataggtggtccaatattatcaatttacttgaaccaattcatatactataatatatatttatactcttagctagctaccataacatataatgattattgaacactcaactatgtgccatttgtcatggcattgtcatcttatgctgacatgtcatattatatatgttatttgacttgactttataatatataatttatataaatatatatgcttgttgagttgtcatagataaatgccataatttcagcttaatcccggtttaactatatatcaatcaaaccagccctaatgaatctaagcagtgactcttttggattcttctccattcaaaatcatacacattattattaataattaaattataaattttgttctattaatcacaccataaccctagctagagtaaataaaaagaaaacaaaaggatataattgtaattagatcaattcaattatttaggcacctgtgtaccaccaaacacccctataaaaaccttattgatttcatttgtgacaccttaccaaactaagcaaaataatcatcaatcaaagtatacccttctctctcaaaacccttctaaaccatatgatctaatatggaaaatcccatgaaattctacaaacccaataataaagaatattattattataattattataattacaataagttgggtaataaaggcatggtgtctttttttgcatctattttgtcagtgtttatttacacttcaatattttattacactttcaatctctctatttccactctctttcataattccaagttttggtttctcatttccaacactctcatcatcatcatagctgttgattacggcgcgttctcctcctcctcatcattgaacgacaacacacaacatccacacgacgagtactactactacaacaaaacaacaaggcaaggatcgccgtttttagtagagaaacaacatgatgatgatgatgatgaccgagtaactcatcatcatcatcatcatgacctaataacgcgaggaaagaaagaagagaagaagaatcttcaaatggtactagcaaaaaatgacataattttcaatgacactactcgaaaagaagaagaagatattcaagagaaatcgattgttgtttgtcatgatattgaagataagaaacaacaagaaggtagaagaactagtcatcattacaaacgaagtaagtcagaaaaagcgaaaagagtagtaatgaaattggacgatgataataataatatgaaaaagaagagtcatgttttgaagagatcggagactgaaaatatgaaccataatgaaataaattattatcatcatgatcatgttcatgttgataatgataatgagttttattcaactttgtcagatgaagaattgaataaaagagttgaggagttcattcagaggttcaataagcaaattcggcttcaagctagggtttataataataataattagaaaattttaataatgtaaattttgatcgaaaagttttgttgttttttctttttcttgatgtactttttttaagagtcttttcaactttgttattaccctatgatattagtgtaaaaaattaatgctttggacgtactatatagtaattaatgattaataatatatatagtaaattaaagtaaataaaaagctgcttttactaaattataaaacctttattatctctttctctctatcttttatggttttgactatagtttctagatggggtcttgtcaattaattaattcacatttcacactatgattgatagatcattttaacgtattttcaatattggttttaataaattggtatgatgatgctttttttcctttgaaataataagagaaagatatggatgttatttacttttatttttttttaaatcaaagttcttcattcaaagaaaaggaggttattaaactagttagatgtggatgttagaatttgagataagatgaatgaggtttcatctcaaaattaattggttatgagaggagtaacccattcattttatttatcataatttattctacacattagcaatatgagactaactcttaatataccctcctcacgtttgggcttggaaagtgtgggtataatcagtgacggatgcacatgtatcaatgtgggggctatagcccccactaacaaaaatattatcttttaaaattttaaatgtaatttttttaatttgatatttatagattaaaatagtagaaaagcccccacaaaattaaataaatataataagaatgattataatataggtataaatatttttcattgataattaagcccccacaaaataaaaattttgggtccgtcactgggtataatgaatgacctttaagaaaccgcaggaccgaacatgacatttgaaagaatcctacaaggctaaatatcaagaaatttgtgggtgtacacgtcgggaaatttgtgaattttgaaacaggtcaaagactttaacactggaaattggcacacaatggaggttcaagtatctgtttggaccggcagtataagtggctctgataccatgttagattttgggataaaatggatgaggttccatcttagctatgggaggagtagcccattcatcttatataacataatttatttccacacattaataatgtgagactaattgttaatagtaaataagtggattaatatattatatgtatgtatgtgtgtatataaatattatacacgtatattattattattaacttttaatttaagtgcataataacattttcctttatttattatgaaattccgtattttaatattcccagtttgattatttaa

SEQ ID NO: 24528 - DNA, 4200 bp, Cannabis sativa
cagtatttgagatcaagatcttcaagttgtatccatattggaatgaccttgacatccttcttcttaaaatttgtattagggtcccatgacttcataataacaggtcgcctgttgaagaagatgtaacttccattcaagacagagtctctatcatcaatagagttaaacctgatattgaaaatactataggcaagcattcgaaccttatccactttatctttccagattctctttgtaaaaccctctaagatatgcaatggggggttcgatcccagaacataacatacaatagaaggcttccataagttcacttcctcctctatgtcttccagctcaatttttactttgctacccttactagaacatttaaaagagttctccaggttacgaagtacagaagcagaatgaagaattgggggagtcgagttcataacttgggcaagtgcactgttacattgctcattagctcggatgaacatcttgaagtcttgttgtgcatcctttttagaaacaagtaaaatactcaaagaaataaattccacggtattaactatagtgcctaaaataaaatgtcctaatattgttaagaattttagactaatagcttgttctaatgttgtttacaaagttgcaactaagcttttgtgttctagaatcaaggctattttacctggtttagtctcccagaaccagggggattcatcaaagggagatttattggacataacattatgatatgctaagatctagttagacactatagtaagaagtctaacaaagctagttgcatgattaagctcgaccttcaaaaagcttatgacactattgagtgggatttcattgaagaaatgcttcatggcttataatttcttagtgctttcattaatctggtgatgaattgtgttcgcactcctaaattctcacttatgttcaatggagctttacatgaattttttgaatctaaaaggggccttaggtaaggggatcccatgtcccctttgctctttattttaggcatgaaatatctctcaagaataatggggaaaattggagagaaacaaggctttaaattccatgacagatgtgttggaatcaagctcaatcatcttgcctttgtagatgatgtgctcttgttttgcaatggagatttcaaaagtgcttattacatattgcaaggccttaaattattctcattaacttctagtttgcagcctaatccatccaaatccgccatatatagcagcaacatgtctaggactgaacttgacaggattgttgctgcctctagtttttatgttcaacagatgctatttacctaccttgggatacctatatgcccaaagagaatttcagggaaagagtgtgctatttcggctgacaaaatgacagtcacgatcaaggtttggagctataaaaacctatcatttactggcagggttgtactcatcaacttagtgttgatgtccttccatgactattggagtcaaatcatcattttgccaaaaaaagtgattcagaacatagaggctatttgcaggaattatctatggaatagtcaagtagtatattaagggccaagggctattgcatgggaagatattagtcagcctaagtcagctggaggtataggtttcaaaaaaattacagcttagaacaaggctgcaatagggaaatacatatggttatggaaaacaaagaagatagtctgtggttgagatggatcaataatgtctatctacagaatgaggactagtggaattacaaagtgacaagtcaagttagctggtattggggttgtctagttaagctcaacgactaatctaaagctactctgaatggcaacatggttctgcagaaaaaatacaatgtatctcatggatacaagctgttttgtccatgccaaacaaaggctcactggagtaaataggtatgggggagattaacacaccaaagcacagtttcttgtttttgttggctatacaataaaaatttaaaataagagataggttattcatgatggggattataaatgatcagactgtctgttgtgcagctcacatagtgaatctgctacacttatttttcgaatgtgcaatatccagcagtgcttgcaaaatattaaagactggcttcattggaatgctggaagtatctctctgtctggtcttgttcgatggattggaagagcgaaattgagcagctttaggaaactggttcttgctgctgctatggcaagtctagtttaccatctttgcggaatgaggaatagatgtctttgggacaaagagctacaaaatacatcttatgtgtgtaaagaaatcaaggctggagttattctaagagttgaattattttggccaaaaaatattaagaatgatgataaagcttggttttttaccttgtaattcagcattataattttcatattgtacagaatacaaatgtgtagttacataatttaggcccgaaattgggtgcttttaggatgtaacaagtttgtgagctaatacactttcttaattcatcaaaaaaaaaaaaaaaatcttacagtagatatcttaattgatatttataatattttaaaatttaaattcaaataaaatttatataataaattttgttgttataaatatttttaatttagtgttagtacatcttgcaaaataaattcatgatcacaacaaattaatttaaatatttaagtttgacattattaatttattaaaaaaaattattaaggattgatacataatttagtaatagttattttactttttctccttttataataataaaaattgaaattaatagatatattagtttttatttatgtatttattaatgtatatatataacgaagagacataagtaataaaacaaaattagtagaaattatcattcatgaattacaaaatattaaactcaaataagaatttagattaacatacacggctaaattaaactaaagaattatacacacttattaaaaatttgttcataaaaaaatatttattacggtgtactttcttacttttgttacaactttgttatataacataaatgctagaaaaattatttataatttagttaataaccgctatcgatagttctccctacaacatcaaaagattatttttctgacaaatttgtcctcaccaaacatagttctttcctaattggctccatctactaacaacatgtctttgttttctttgaattgcatgcatgagaatgtgaaaaataatattaacaatatcatggcatatatacataagagttactaagaaattttttaataaaaaaatactacttagatcacgaattgaaactttaacagtgcattcttaaatataacctctcatgttaaattatatttttatttagggcacaaagcccaacaattaggggttcaatttttgtttgagtttggttcaattgaagattatagagtgattatatgtgaatattggatgtttgccacaattgggaaaagtttagtgtgcaagaacattatagtcaaatttttggatttttgtgcgcatcgagtgttcgataaaaagcctcaacaaaatttggttggaatttgggagtgaattttagttggaaagccttgagagttattattggggttgtgtaagtctttgtttagggtgtattgttgaaagaaatactgaaattaaaccattccatgatattgaagcgaagtagaaaagataaaaggtcatcatcttcccaaccctcctatgatgctagtattttcaattcagaagaggattttaaaagctatcagaatgccatcgctcgggataggaagatgaatgcagaacgaggatttgattatgacaatctttcaacttccttcttccaatttacaacaattattagtgatcgagattggtttaaattttgtactcagcccgatgctgcagttattcccgtggtcatggagttttatgccagtgttgtcaaccatgttaaccatgaagtaaaagttcagggcaaacaggtatttttttcaagctgggagatcaacaagttctatggcctcaaagacattgaggatgatgattatgcgaagatagttcaagagcctgattatgatcttatcatcaaaagcctttgcaaatcgatcgctcaatgggttcaaactgaagatgggaaattacggtactttcatcagagtgacatggagtgtgaagg

SEQ ID NO: 24529 - DNA, 4254 bp, Cannabis sativa
aacaaacacattaaatcttgtaattgctccggctttccaaacacaccctaatgaacaatcatgaaattttttagatagatttcaagattctaccttcaacattttgtaaataaaaaaaaatcattgtgtcatcatagtgataaatgatcaataatcagtggaatttcagatataaaactatgtagctgttgaatcaattgttgtggaaaggaaaggaaaacaattcttctgtatccgaggttgttgtttgtgttcagacaattgagaataatttcatagagtagggactgaactgagtttaagttattctatctttatttttcagttagggccttacagtcacttaagacagcattggggcttccagttcgacttggatggaatggcgatccatgcgttccaccacaacacccatggagtggaacagattgtctatttaacaaatctaccagtaaatgggccattgatggactgtactttctatatcttttctcttttagtttagtattatttcatcattattagtgtaaatggtcttaacatatcatttttttctacttgtgtcttgcatattgttgctttgcttcaactgaatgtttcttcgtttttttctttgatgtgaattagctccagggcataaaatagtgatataaatatatacatcctcggtctacatcatcattatatagtcaatttttttagcaattatatgaataagattaattacacaaaatagttggtaacttttgtcaataaattaggagtgggccaatcgttagtcatataataaataacacaagaacttccaaagaaagtgtttgattagatcgccaaatatctttgatgattttgtcaccttgagactattgcaacatatagcttttgggtcatataagtaggttctgaattatctacttacatttcaattatgtttaaagaaatgaaaactgaaaatcaatgctttaacaactttaactgttatattctctgattttttcttacccatttaggtggcccttgtttacccattcaattgtttgctttggtctatatgttacatcatttatatctaagttaatatccatgcaacccaatctgcatatgttctagcttcattttccattggcctcaagtttatacattgtgtagttttgcacaaataagtcttgttagatctatcatgtctaagagtcaattaacgcctgaagaaagaggaaaaatataacccagacaagtgtaatttaatattgcttgtgcaaatttgcttggtatttttaacgcaagtgtaagaaagatccgatgcatctggaatcagatttaatggcgcttctctaccaagacatgaacatctaatacccattactaataaaaaagagatatttttaataagaatatataggatttttgtccctgaactatgacccttgtagagttttgctctccaaatttttttctcttgcgaaaattccctctaaactatgcaaattgttgcaaatatccacctccaattacattttgctcattttttaaaacaattttcttatgtgattatgagttataggtataattgtagttcaatgacctattaataactttaaactacttgaaattcaatttattgacattaaacatacaaatagtagctctaagaatccacatacatattctcattattcattattagactgctatttatgcctttattttttgtctggactcttgaactgtgctagactaacgatacgttagtgctatatcaacaatttatttaaagaattgagcaaaatgcaactgcaggagaatatttgtaacaatttttatagtttaggataaatttttgcaactgagaaaagttcaatggacaaaagtctataatggtcgtagttggtgttgagaaacacctatgatcacctgcacacacacacagcaaaggatctctaaagagtatacacgaatgattaggcttatcttttatgcttatttttgtaattcttccattatcaagttagtgcttttagtaattatgtattcacccttcctcccagtggtcttgacaaccagggtctcaaaggctttctgcctaatgacatatccaaacttcaacatctgcagaccatgtaagtttactgggcgtcattttgaattattatttataagaaaattttccttttcatagtttctatacaaagattattatccgatgttaaaatctcaatattgtaaaaaaaaatgacattagtttattagtctaatccagtttaacttaacctattgctcttacatttggatcaaggcatttaaagcaacttctcattctttttttgtttacatttttcagcaacctgagcggaaatagcattcatgggcccataccatcctcccttggaacaattacaagcttagaagtattgtaagttattatttctttcttgataactgcttacaatactttcagcatgataatttattgtatattgattttactaatcagtgcataaacaaaatgcatcttctaaatgcccttaagtcaaattatatatatgtattaaaagaaagtcaaattatatgtaatatttccttatgttaaaactaaatagctaggacttccttcagttctgtcaaggagaaagaaataaggtaaaaaaccaagtaaaggaagccacttgatgatggcataattgttaggagatcgtacaaagaaatatagaattgggacatcccaacatgtataaagaaaaaaaaaagtttctgaactttattttgttcccaggtgaacattagacctagatttcttctcatggtggatacttatcttcaatcttcttctcttcaacattgtaataattgaacacatttgaactcctataacagggacctctcatacaatttcttcaatggttcagttcctgaaagtcttgggcagttgacactattgcaaagactgtaagctataataatcatctcattaatttgtgaaaattgaaatcttacaccgtttactcaagcttagattatcaatgaattcatgatgcaggagtctgaacagcaatgctctctccgggaaagtccctgctgctttggggggtagacttttgcacagagctagcttcaagtatgttttacacttagttgagtaaataagtgtatgtttttcattgtgttaatctttatataattggggcctcaaaaagaagacccaaaagtccaagaattagcagtacctgataaacacattcagtctacataccgagctatgtttacatgattaattattctatctggtgcagttttactgataatcatggcctttgtggtctacctggactcccatcatgtgggccacatctcactactggtgccaaaattggtattgcattgggtactttggcactgttcttgctgattgtaatatgttcagtatgttgttggaaaaggcggcagaatatcctccgagcacaacaaattgcaggtatatatatgtgatttatattttgttaagacttggaacttaaaattcccatagaaacacagatcacagcacagcacagcaccgcaccatcttatgctagaaacaaaggctgggaacagtagtttctactctttacatgtatgtgagggttatggagagacccatcctcttaataaataatattttgatgctcaaccattttctttgcagcaagagatgctccatacgcgaaaaaaaggactaatttgtcacgtgacatccagatgaccaggcatcataatcagggcaatgctcggactgcagctgaaaacggtccaagtttgctttcgtgatcataacttatctgtccagtcgaaactcgtaaaattaaacttgctgggttttaatgcatggatttctcattgtttgcttcaatgtgctagtaagcaatgctaaaacgtaggcaagggaaggacttctggaagttcaagttattatatcaaatattgggagtcccatacactggaaagcaagcgaaaaaaggaaaaagaaaaaaatgtacattactacaatttattctttccaatctttgaaacaaaaattgtatcaccgaaaaaagagtatgatagaagtcaaacgttttcccaaacttccagctattattttgcgaatggggtttggaatgtaaagtaacgtgtttctgtaggccctattaggctttggcatatgattgcaataagagagttaaattagtatgttccaaatgtgttcttcattcatcataatttataggttaattaactttt

SEQ ID NO: 24530 - DNA, 1357 bp, Cannabis sativa
tatagattagggcgttacactttctctctctagaaattgtgaagtgaagctaaaattagtcattttttgttgaattctcttgtaaggaaagtaacttcttttgataataaaagctctcagtggacgtagctccattacctttgcgtcaaggggaatgaactactaaaattatggtgttctcttttttactttttattcatacattcattgggtgctaccacttatcagacggtatagagttgatcgcttttcaacgtcaataattctaattattttaaatgtggtaatgtaactattttaagcgactgcactactatagcaaagaatttgatgatatatacaaaataattctagctctgcgtttgcattatctattcataattaggtattttcatcatttatgagtcaattctaatatgaaataaataaaagaataattagcatttttgctctcttaacattttatattactaaagttgtgccttgtatggtatacgacttgaaaataatacccccctttcatagcattgggcctaagccctcacaattttattttttgagcaccttcctaaaaggtcttataccgatggatattttttccatccttatataccaatgatccttcccatttctagccaatctgggactttgattgcaagtcaaacaatcctcccctcaaacaaaggagtacattgtctccccttaaacgatcttccatctatccactctccaccaactagtatacttccctccaatgtattggggcacatgccttatatggagcaccaccactacctaaagcgattttgctggctaactacttgagagcacaccacctgtctaactgagcacatccacagattttgttgtgataggattttgttttttgggcacctttccaaaagttctcataccaatggagatattatccattcttatatactcatgatcctttccatttctagtcaatgtggaactttggttgcacacccaacataattttatcatggaatgagtgaagtggtggattatagttgataaacagatgcaaattaaatattatttatctttttttcgttaatgaataatagaataaaagactttatgtttttttttttataataaatcatattttcaattttagttttttaatcgttaaagtgaaaaagatgaaaggtatgtaatttgtaaccatttatcaactattatttattgtgtcacttattatacgataaaattgaataaaatatgatgaaaagattcattactgtaaaaattatatttcaaggggtaaaaatattattttggactatgtgttttgtaaaagttaccaattaaactctgtattttgttaaat

SEQ ID NO: 24531 - DNA, 2849 bp, Cannabis sativa
tgctggtaatgaggttgttggttataagcggcggccgccatgtaatgctgtgggtacatcatcatctgttgttgcatcataaccatggccgccgccgggtactgcatagccatccattgttgctgctgctgctgctgttgttgttgttgctgagcccactgttgttgtggctgttgttgttgttgttgttgttgcggcggctggtggcgagtcagatccccagtagcagcgttaggtgtaggctgctgcgccatgaatattgtagctatgtgtgttcctctggtctgtgaatcgcgttgaggagggtagtttttggtaaattcactatggtgggctctgtttggagagagagaaagtgaaagagaaagagaaagaggctgagtgagtttaagatgggttataaaggaggaggaggcgagcgaggtatctatcgagaaagagaaagagaaaagagttgtattttgtagatcttcgatttggggtttgtttgctttgtgtgtttaaatatatacattataatatatctatataatataatagtttttctttttctttttttttttaattaattatattaaaaataaaatctaattaggatttttgtgtaccaaatcatattttatgaatttttagttcgttaaaatttttttctaaactatggttagatttaaggatttttattcaagttcattcaattttactaatatggagattgtctatatattaaattttgctcctcgaattttaatatttactaaatcataactatgaactttcaaaagtataaaagtgtgtcttctaaattttcatccacgtcggactttgtttagtaaaatttgacaaaagtccttaaatttaacaatcttaaaccagttcgggagaatttttaacgacttaaaaaaattcaaggagcatgattcagtacatgtcaatgtttaggagacaaaaaattaaactagactaaaataaatttccctaattttgattcttattaaattttgtcatctaaattactttcattgtaaaaaatttcctttgaataataaaaataaaactatttaagattattgtccccgaattatgaattatgcactattctgccactcgttaaaatggtcattgaactatttgtagtattataaattagtcattcggtcaagttttgtcacatgacaaacaaaataataacataactgcttaataagttgtcatgacaataacgtaatactttgtaattaatttaaaaaaaaataataataattttaagtaattttcttagttattaattaattttaacttattttttaaaaatacataatttttatttcttaaatgtaaaattataggcggtgatgtgccacgtgtgaccaaacttgacagagaactaattcataataccgtgaatagcttaaggactatttgtaacgagctaaaaagttcagggacacaataatacatatgtaataattcggaagacaaaagtactaaatagcctaaaactcatcattgtaaatattctctacagttatagtctctttaattcttttaagaatgtagcactaacataatgttaatgatgcagtttaaaaatctataaatatatgaattatagtaataaattatgtgaatataaatatatattcttaaagttaatgttggtatgtttaatatcaataaagtatcttcttttgtttgggtcaaggtttgaatctcgttacaaaaagattatgcttagtctttttacaggctagcttattgtagcggtgtcatccttaataggatgagaaccctcgagatagaagtgacaattcaggtcaagacccgtgggtttgacacgaacatatgactcaagattttacgagttcagcacgacagcaaaattattcggctcatgtttgtgttcgtgttttataaattttttgtgtcacgaatcgtgttcgtgtcaactatgtaaaataaatttaggaactctacacgatatgattacactaaaaacaactatttaacttacaatctgccaatacaacacgagattttgcaggttcgacatgacacaaaatttattctggtcatattcgtgttcgtgttttacaaatttttcgtatcacgaatttgttcgggtctagttttttaataaatttaagttactgaaagagtgagaaaaagatatccaccaagtgattttttagttttaaaaaagaaaaaaaaaaaaaaactcaaagttattatataaactctcatagtgtgactatgtttgtgacccataatcgtatgaataaattatttaaaaattaagggacaaatttgcgaaggacttttatggtttggaataatttttgcaattaaacaaaattaagggacaaaatataagaatgtgctatttattcttaataggacctcgtttattacgtcgtcgtattacgtaataagaagagagaacacgttagccgtccgtgactttgtgggacccactcccatccctcttggcttggcttggctgctgagtcagctcatcatccacttgcaaacttaaacaatattttatttatatttatttatttatttcctaacaactaaactcactttaaactttaaagaaaatagttagcctataaattctcgaagtttcgagtttgttatacttaaactctttttttcagtattaatacttaaatgttttttttgttaaataataatgttcttacttttattcagttaaattttgattcactgaatacgtgttagttcgttatattcaaattattgttttctatttttttttaggaaattctttaaaaatagtttacataacattagttttttaaaaaaattctacaatatattttttt

SEQ ID NO: 24532 - DNA, 6737 bp, Cannabis sativa
  modified_base (3738)..(3744): a, c, t, g, unknown or other
  modified_base (5333)..(5333): a, c, t, g, unknown or other
  modified_base (5859)..(5861): a, c, t, g, unknown or other
tgacataatctaagaacatacctcgcccctggtggtgcaaggtccaatgcagagcttgcatccgtactcagtctcaagagcctacatcaataaatagttagttaggcaataaaaacccgaaaccatacaataaaattgacctcaaaacgacgcaaaattcaaacctggccgagaatgtgagcactagaatgccagaaagtatcgcgaccttcatcggtatcgaaagtgaaaagcttgagctcacaatcaccttctaaaggcctggtcatgtcccacaaaactccattgacctgagaaatcaaagcattattggccaaactcttcgaaatctccttggcaacatcaaatggcgaagtcacccacatcttcccatccttcactgtcccatccggcaatgtaatcctaaaaccacaaaacaaacaagtcaatcagtaagaaatacacacaatcacaaccacaaagacgtaaaaacttccaccgaagatgaattagggatcactttatgggatcggaaggaagagattcaagattagcacgttgctgagctttgatggactcaaagagcttgatacgcttaggaataacagactccagatacgcttcgtccttgaacttcgccaccgccatggccgttgttgttgacggtaacggaggagcaacggcggaggaggcgaatagacggagagaggaggaagagaaggagtaacggcgcaatgcgaaagagaagagagtgagagctcgtctggagttgcgcaaggacgatagtaacatatgggcttttcctcaagcttcgtttgtctgaaatggttttactaagcctaattcccgggccaaaggttttaggtttagttcgtttttgggctttttaaattttaaatgggcccaacttttggagaaacatattgggctgagtcgtatgatatagcaacgagaaaattacacttacatacttaaatttgggataattacaccacatacttaaattttcagtattttcttttatactatgagtaggaatttttttcaaaaatattgtgtaagttttatactgtaactgtgttaagttttcactgttattctactgttgttttttagttgttctactgttgtttttagttgttctgttttgtgtttcactgttgtttaataaaaacactgtatattttaaaaaaaaaatcgtgtgacagtatttttgtaaaaattaactgaaattctagtattttttgtaaatttccctttaatttttaccctatctttcaaaatctcttatatttatctctttttcaattattttataaattttgcctttatcactttacgatagtttttattcttctctaatcaaaatttgcctcaactttcccacaaacctacacatctatctacaaagaacacaaatctattatgtttgaaattatatcttagttatgtgagtgtgttaggataatttaagtacaatagtcataaaaataagtatatttgaattaaattttatttagaagtaaatttagttaatgtattaaaaaaaaaagaaaaaaaaaagtattcttcaacttctcccatgtagcaacaggttctagcccaatgtttcttgtgggaattactcctgttcttaacatttttcatgggtttgtcataaacaaagggatattttcataaatgctataaattaaaaagaaattataaaaaaaatacaattttagatttttttcaatattttttatgaaatcaaatttttcttttataaaatacttttctgtaaatatgtaactaaaaaaatcattttaggtaccttttgtaaagatctcaaaaagaaaaaacttattattattataataataataataaattacaattgttattatcttttaagaaaggtttatattagttttatgaaactaggcaggtaagaataaggttaaagaatacctccttaagtacctcaatatgaactatgtggtatttgccactaaattataaaaataacaagtcatgttctaacttgctcaacaatgttaggagaaaaaaatgagtaaataccattttagattatattttgtaaaaattataaattagattttttattttgttaaatgagattttgaatcttttattttttaaaatggtataaaataataccttaaattgatttttcgttaaaataaaatttaataataatatcatcctgaaaccgttatgactagattagtgatatttttttgcttttatttgtactgaaatcttgcttggagttggttatatattataaaaattgagtttgtagtattattttataccattttaaattatacataatttaatttgttatttaattaaatagatggcttttgttcaaaaatattctagcatttttaattttcttacataataagagtgttattgattaaaaaataaaagaaacttattaatgaatagtgctatgtatccactaaagccagtctaagtttgagagctaacgacaatgtctaaagcctttctgctttgggcttaagctaactttcaaagtttgctttaataaaagtacattactaaatttaaactaaaaaattacttaaataaaaataaataaataaaactaggaaattgaccattaattacttaaaaactagggatgatttcaaaaataataaaaaaaaattacaaatatacggttatatggattttaaacattttaaagtttttaaaattttatttacagaaaatacactttttttttattcttttatgttatttttataaaatatcttaaaaatatatataaaaaaatcaacgtaaaagtgtaaaattttactaaaaataatttttatgtaaatttctctaaaaactatatgtgaaatatttgtccacaactcttctaatatttcattattattggaatggctaattaggaattttgtcctctgaactttgacatgtattaaatctttcctcatgaacttttaaggtcgttaaaaataccccttgaactattgagattgttggatttaaggattttttttccaattttaataaaaaagtctaatatggatgaaagttcaggggacataatttagtacatgtcaagttcgaggggaatgatttggtagatatcaaagtctgtggagcatggtttagtacataaataattactgaaatagtaaaattgaataaaattagacaaacgtccttaaatccaacaatctcaatagttcagagggcatttataacgaccttaaaagttcaagagacataatttgatacatatcaaagttcaggggccaaaaattataattagaatagggaccttccatctatgaatgctgctattgtagagtgtagtttttctaattcttttcctcgtttttgagaattttttttttaaatgtaaaatttaaagttataaatcatcataactttttaattcactttttttccgcctttttgttttttaaggctttcaattaaatattaaagaataatagtggtttgtaatatctcaataagaaaatatttaacaaaaattaaactcaaaatactaatttatattatttttaaaaatataaaatttaaattattatttaataaaataaaaaatccgatcaataactttttggtaaaagataattcaaaataatatttatctttaaaaattattaggatttttacccccgaaactttaatatgtaccaagtcatgcctcctaaacttttaaggttgttaaaaatgccccctgaactnnnnnnnttgttgaatttaaagacttttattcaattttagtaaaaaaagtctaacatggatgaaagttcaaaggtacatgtaaaagttcaagggagtatgatttggtagatatcaaagtttgcggtagtacataaacaatcactaaaatagtaaaattgaatgaaattaaataaaaaattcttaaatctaacaatttcaatagttcgggggaaaatttttaacgacttaaaaagttcaaagagtataatttagtacatgtccaagtttaaggaagaaaaattcaaattagcatttaaaaaatccacaaaggagtttaaaaaaaaaaaaaaggaatccaaaaagaggtggtaaaataggagagaagtagggtgagatctatggtggggtgggccgtgggcccagtagtagggtagtgggcctgagtgagaaaattgaacggaggtagacatgtgcattcatgtgcgttccgtttccaccactccctccactccacctaataatactactactactactactactactacttcttctttatatatacatcattcattttttaactaattttatcaatttctgtaaacttttatacatcattatagtttgtttgttggtattttctttgttgtcctcaaagaaaataccaacaaactataataatatatgcattaatatatagtatagaattagattccaaaattttcacgtgaagatatataactctctgcttctataaaagtataccagtttctgatcacactgccctggctactacgattttgtacattgcacataataatctcattttactttaattaaatgattaaaaatgtttaattaaaagtctcttccaagtgttaatattgagatattaattgggattccaagtgaaaaagaaaaaataagtgttatatataccattaaattatatatacactagcaaaataaagtatgtatacactagtaattaatagtgtaattaatttggtggaatagtgtaatcaagctaccttaaattatttataaataatacatgcacttcgatcacattaattatgtagatatataaatagttatattcttatatatccataatatatccataaattcttatttttttaaaaaaaaaaaaattatctctagtattaattaatcttttggtcattactaatgattgattacttgtgtgctgggaatttataagtgtgtaattactaaatagtataatttatactctatttaaaaaataaattatgtttggatatatgaaatgagaattatttataaatttttaatgtattgcttgacaaaataattaataattaaaaaagaaaacaataatttgtaatatttaatattttaaatagaaagattatattaattaaaccccaattctcatatatgagaatttgagagtgtaatttaaacatatcaattatatccaattatataattatattataattaggtagtgaataatgaacatataaaaatatacaattactttcaattacactcaattataatttttttttttcgcttttcaaatgcgcaatatatgatgtttttgccaaaaaaaatatatatatatatanatatatatatatttatatatggtgtggttgcagctagccaatagtgtaatttaatatctatatattttaatctaataataaatattagtagaaaaaattattaactatttataagacacctctcgtacttaataataatacacaacaaattttatcattattatatttgtttgctgaacaaatatataactttacaaaaaatgttggtgtcatacaatcattattacaagtattgaactttacatagtttaatttaatatttattatgataaattattaattattttgtggttattttcgacacaactaattgctaaaatcataccgtaataaaattgattatatatatttttattagagtaatttgtggtataaatatttaagtttaatttttagttgtaaataaatactaaactttattttttgacaataatctaagttatatttttagaactttgtaggtacataaccttattatccacgtgtcatttttttattggtatatttaaattatttttttttaaannnataaaaatttaatgacttagatcaatcaggatttgacacgtggcaatttacttaatacttaggtacctacaacagttctagaattataacttaggtattattaccgtaaaaaattaaacttagatatttatttacgagagttgtatttatgccgcaaattactctttttattattaataaaatatgtgaagggatatcttaatgtatcacgtatcatgtggcatgctattgatttaacaaaaaaaaatgtagcatgctattattattacaatttagtattaaatttgacgtattttaatttgataaatatataatatagaaaacagctaataacaaatacaacgcactatatatcgatatacaatattatatgagacgttggataccttaaggtgcctaagtgcatctctagtggggacatctaaaaggagtcgcaaaacgtattattgtatcgtattcgtctcatgttttattaatttaatctgcttttatatatttcgtgttaagcgtgttgattcgtttttcacctgagtttaattttttcaactctaatacgagtcgtaaaaaattatatcgtgtttgtgataacttattttaattcattttgccattagtgaaactggagttgaaaatgataaatttagtattcattagaaaaattatgaatatttatttatatataatttttttatatgtatatataataaaaatttaaaattttaatatattttcaatttatgtttaaaaataaatctaaaatttgttattgaataattaatatatatattttttataattatattattattaattataataacaaccaataaaattaagaattgttttcgaaaagtatatatttattgagttggtccc

SEQ ID NO: 24533 - DNA, 2427 bp, Cannabis sativa
ttgttcacttgatcttactggtcagagaaaagagaagaagaaagatgaagatagtgaacagagtaaagaccctgttagtgttcagaaaagggctgaagaagaaggtaagaatagtcagagtaaggttactctttctgggcttttgaatttcattgatgggatttggtcagcttgtggtggtgagaggcttattgtgtttactactaactatgttgacaaacttgatcctgctcttattcggagaggaagaatggacaagcacatagagctttcctattgtggttttgaagcatttaaggttcttgccaagaactacttagatgttgagtcacatgatttgttttccaaaattgaacgtttgttgggtgaaattgatactactcctgctgatgttgctgagaatttgatgccgaaatccgatgaggaagatgctgataagtgcttgaagaatttgattgaagctcttgagaatgctaaggaggaagctataagaaaaaaggctgaggatgaagcaaagttacaagctgcagaggaagaaaagttggaagaagaaagtgatcccaaatctggtaaagaagatgtgaaatgtaaatgtggtaatggagcattggataaggaagtgaaggagaatggatcagttaacaaataaattgtatgtcttttgatgatgatcaattatctgtgtctggattgttggttatttattccattatgtatgttctttgcttcctcattaaaattcatgatattgaagctcttaatgtactaaagttatatgctatttagtttggatgtgtagtgagtaagctatacattaaagaacttgtgcaatactagccaattttcggatcaagtttcagtacacagtgcaagaaacaatatacatcaatacaatacaacaatggtaactgaagcaagattagtgagttagctggctaagcaagttgggttaatcttagttaagtggttgctaatctaattagtaatgagtcttttactctctaactgttagtgtaagtttaggctcagtataaattagtgttgtaatctcttgctattcaacacatccaagttaatcaataaaagttcagttcatattctcttgtttctcttcttctttggatcacgggttgagtgtccttgcacagaaaattgattgtatttgtattgtactggttcgttacaacttgatcaatacccgtcagtacaagtataataaatgtgagcattactatttaacactttaagagctagtttggtacattgtattgtattgtattgtattgcattgtgttataatatattagtattatttatacaatactatatttggtattgatacaaaatgttatgtaaagttataatatattttcaatgaactcgactccaacaccgactccacgttgggtttggatttggtctgggttcgggatccaagttcgggtttggggtccaggtctagattcgagtctgggttcgggtccaggtctgggtccaggtccgagttcgggtctaagtctgtcttcggggttcgcgtccgagttcgagtcctggggtccgacccaagtcttggccgtctgggtctatgtcctaagtttgggttcgggtcagaggttgaggttgaccttggatcagtaagcattaattatgttgcgtctcgttcttccaccatgttggattgtcacctcaccttaacactcatattagtatgatattgtctattttagcctaagccttcaaaattttgtttttggacaccttaccaaaaaaattcatactaatgagtaggtggaacactaattatatgtcggatttgtgttgatacctaataatcctcctctcagatcaaagactacatattagtacgtggcatctcctccagcgaaacaacatactgtacgctttaggctcaatttcttagttttgtttttgagcactttattaaaatactttataataatagagtaagtaaaacacttataaaactcaatattttcaaaaaaaaaaaaaaaaagaaataaaaccagaaatattaaactctaaggatgacttgtacaatcaaatcaattttgataatataatgtcttcgccagcatgtgtatcgcaactccacgtgatttaacccccaaaataaggttctttgtcactctatcacatgtatgtgagtgatattttagacctgaattacttcaaattccgaactagtcattaaaataatctttatccaaatctctttcaaatgaattaaaactaacatttttggtttcgagtgtgtgaccacttgatcatgtataatattttgagtattgctagaggcttactataagagaatattggcacaattgtacgtgtccctataattaacaatattttaaagagaatcttctttaataaaagaaaaaacaaatgagacccgttaactatatt

SEQ ID NO: 24534 - DNA, 5108 bp, Cannabis sativa
  modified_base (2261)..(2261): a, c, t, g, unknown or other
  modified_base (4139)..(4142): a, c, t, g, unknown or other
ttaaagaagtcttttattgtctttatcttaaatggttttaaacggactagctagtgtgacgtctcgggaaatcggggcgttacaaaccctttggaccgccacaacaacccaacaacaacaataaatatgccaccacagcaacccatcgtaccaccaaaagcacatcaaaccaccaccatcccaccggaccaccaccactgtctgcaaaaaaaaaatcagagaaagagaactcgaacgagaaagagagaaattggagctagagttgggcgtgcaagatggagaacgagaagtctcacctttcaaaactccattttcacgaggaagagagggcgagggtggcggagatggtctcgtgctccatcatggccgatgatgagctccaacgccacttgcaaaaaaaatgagaaagagagagttagagtttgagaggttcatgctttatgttgggttgagaagaaaggaagaagatgaaggtgatgatgggtgaagagtgggaattaggttagagagagatagatgagagaggggtggttgagaagaaaattagggtttgaagttagattattttagggttagatttttttttaaaaatgggttgaagcccataactgatttttttaatacctttttgcatctgttgtacaccgacgccaatagtgtatataatgactttttatgtcagttgtagactgacgctaatagtgttgtaatacataatattttttttttatatttcatcttttcctttggtttttgttttagcattggatagataaccgatgctaattaataattatttgcgtcgatggataactgaagcaaaagggttgacttttgcattggtcaacaagtttgattagacacattgaccaacacaaaatccctttttgtagtagtgcacccttgctaatgcttacttgagaccacatatcttgctcttgcactgttaatggccatgtacaaaattcaaatccatggactctctagagaataactctcaattctcataagaggcggtaccacctctaacccatataggtggagttttagtgtctcaccactctttagacacttcttaagcttaaatgagttttcttaagcttaaatgagctttcttaagcttaagctcaattaaaaaaaaatcgattttaatcctcaattttcaccgcatgtactcatccatatatgggacaattgagtaccacattcaatctattaacttgttattacctatagaacttaagactaaatttttactagtgttaagataggttaccattaatgagtaaaacactaaggattaggtcccatttctcgaaaattcatgctttaatcttgtacagattaagtgacttgttataacttttcactattgattccatgtgaatcatgcatgccaaaatattgtgttcactttgtgatcacttttttttcttaagtacttaagctttaaaaatttaaacataaaaaactacttttcacacaactcaaatttcactaattttgataccaagcatatcaaaattaaacactaatttagacactaaacatgtctaaattacactttattataagacaccaagcatgtcttaaattcccatattggagtattactcctacactttcacatcaagatagaattttatatcttgttttagatctcttaaatttaatttccttcttaaaattattttcacaaaaaattgacaccaaatatgtcaatattttcacataatgcacataatcaaacttgatttaaaatttgaattcaaaattaaataaattaatcaacaatgtttcaacatattttgattaaatttgtggctcaccccccacatttttaaaataaagtgaaatttttataagaatcactttttaccaatattagttatctaatattctccacatttttttaaacaactttgatttaattatttttctaaaatgcctcttagagattattattagaaaaacatcatttgtcattcttagttttctcaacaaaactaaaatatcaaactcacatcaccacttacaaaataatgtgattatttttacctattattttaaagttatctcctcaatgagattaacctaaataatacagcaaagttaacaaaaattttatcaattttattcaccactttagttatttaagatttcaaattgcttctctaattttattatcttttcaccatttttgaatccacattaattcactttatttgagtctaaaattgctcttccaatttatgactcanttcacaagtttggatccacttttgatctatttgttcttattatgataagacaattctcataagtgtaactctcatagttcacttttcttatctcataaaatgatatatttattaattttaattcctaatggatgtaacttcttaaaagttacaattttttttttctcaaaatcactattggaaaataaattctaaattctctttattcacaatatagataataataatctctacatcaatagtaataaacaaaattattatatttttttttgatgaatcagagaattatattgcacaagaccaatttacaacctaagagcactcccaaattaggagcctcaagttttaaatctatacatactttgtatttacatccttacaattcataaaaccaatctctatctttacaactaattttctagggcaaaaacatgttgattcgagttttgattctccatttcaagttctctagcactcgactgcagttagcttgttccccttgccaaatcattctattccaagtctcccaaatgcagtacactaaaccagcaatcattgcagcaagaacatttttcctaaacctgctcaccttagctcttcttatccatctaaggatttggggcaggtcagtagatgttgttctccaaaccagccaattcttagctgcttgtaagcattggacagcaaaggaacacttaaaaaataagtgttgtgtgttctcctttcgtgtgttacacaacttgcagcaatcctccattcgcatttcaaatttaactagcctttcctttgtctttaacctattcaacatagccaaccatagaattacactatgctttggaattttcaatcttgcccacacttcttggctccatgacatatgattttgactaggtttgaacaatgaataccctactgaaatgcaatatttcatgctcttggaatgcagcatgatcatgtattgttttgagaacaatattattatattactatcaatatattattatcatcctacaaaattcatatttttttttgaataaatataactcatatattaatataacatgtatggtactaatcatcttatatatgtatatagttagtgactcgcttaaatttgtagaggttattagggtttatttttttttttatttatttaagataagaacataatatttaatatttatatctttttattttctgctaagtagggaggtgttgagattgttttctcaaataaataaataaattacctaaaaaaagaataaatattatattacatatattttataaggaaaaaaatattatatttagtatatttttattttagaaattactttaatatattataaataaatcaaagaaaaaataactaacgagaatattataaattaaaaagttaatgacaatattataataaataataatattataacttaaataaaaaatatatttattaattattatgtgtcttcattaaatttatacaattgtcaacataaataccaaaaattgacaaaattttttgacataatatatatttctttacaaaagtgctaacatatatattacttcaatagagatattattatagttaaattttactttagattaacttatgcaacgagaaaaattatttgttatatgggaataaaagaattaaggtggcatttagttggatgtaataaaatagaatggaatggaaatgatacaatttttattccattcttttgcttggttgcatattaaagcattggaataccattccaacagaataacttttccaccattttggtagaatgactatttcattttgaaatggaaggaaagaccattccaatgcatgatgaaaaaaaatttaataatttttttatgcatttnnnnttttattccattccattcatattcatattcctatttccattcttattcttatttttacgttttcattcctttaaaccaaacgccacctaaaattaatatgtcaaaaattaaataatatttattttaaatttttataaataaaaatctcattttaaatttcgtcttaagtctcttaacactttgagacgacctcacatgtctggctcttgactaagacatactaagtgagtgccttaagtccaccaaaattctaaggcccaaaaattagagaaaattacactctatatcctttttatattgttcttttttatttttaccttcgttatcaatgttaaaaaacaatgaacattctcattaaaaaaaattataataaaaaaacctaaattagactgtcctactgtaaaatattccattatgagtgtcttatcataatcagccagtatagttattatttggttttgttaatgatcgggtcccaaaaatttggatgtacatactaaagtaactaaaattgggaagaacgaggaatgaattaaattgaaactaatgagtgataatataattaacaagtaactatgattcaatcatcacaatccacattttctaaatatcaaggattgattttcatgcaaacaaagtatgaaaccaaagtatgtctagtaagcaactcatcgccttgtgtacatggcaaatgttaactttttgtgttgagaaatgatataggtgaactctaaagttgaaatgaaaaggagggaacaggagagaagggtaaggaattaaagtttgctaaagcagccatagccactatctctatccttacaaaagtcaaaataatgatctttttttttttttttgcatggacagtaaaagtcaagcgttggtcatttctgccgtcacaaacggctatattaaatattgcttttgtccttttccactatcattaaaaaataaaaaacatctttacaa

SEQ ID NO: 24535 - DNA, 2585 bp, Cannabis sativa
tgagccatatatgagaacatgggctactccactcattaccaattagttttgagatggaaccccatgattctcaacaatttacattatactaaaagtaaaataagaagagttttaattggtactgataaagaagggattgatcatgtttctactagtaaatgtcactctcataatcaagtctcactcttctgatctttttcaatcttcacccttatcgtttcatatatctaaattttctattttactttcttagaaaatttagtttttgctagtgtggttgaactgttgaagaaattcaatgcttgtctatgattttatcacacttatttttaaatatgtttaatacaaggacccttattaataactaagaattaattcaacacatcaattgttagtatttttagtaatttatttggattcatttttgcccacttaatttttttttatttctttcctattttctttttattaaataattataaaaaatattaaattccttaaagaaatctattcatactgaaatgaaacatgaagcttggtaattgtttttaatttaaatatatgaaaaagctatattaatttgaacaaataaaaattgtagcttttcataaaagattattacaacaaacacacattaaaaaaatttgagaatagtatttgttttacataacatatcaaacaacaacatatatactaagttcaagtcaactttaaacaatagcttattttcaataattttatatcataatactcttctaggcttgaccacttgacacagaatctccaccgttcattatcttgacaatgcaaaatcctttgtcaaaaccaaagataaccctgaaagaaaaagtaatgttagtacatagacgatgggagcataaaagtaagaagatgaataatgggaaatttttaaaaataagcaaataagcttactgatttcctttgatggatccaacggcccaaactcttccaagatcataattaaaagtattttcaagcctacaaatcaattaaaattacgagagtgagaattacataaatatatatatatgtacatctttatataaatgtatattaatagcttacttataagtgaaagtatgccatagacgagcagttccatcctcagaggcagtgattactatagaaagctcaggaagaacacaaagtgctgagacattatgcaaatgaccttccagagtttgaacacatgtttgtgtttcacaatcccaaatctgttttcacatatatattttatgattagtttcactacatacatacattattttattatctaaaaaaaaaaaaaacagtctataacaaaagagtatgtgatgtataatataaagtaccttagcagtaaagtcatcagagccacttagcaaataagttttatcaccagaattaaagtacactatgcaattcactcctttcaaatggccattcaaggtaaattttggagtaggtgagccaatattccatgtctatatcaaaatgagccacaaattaaccattattatatacattatggtttaccaaccaataaaaatacttttgaagtttaagaaattcaaaagtagtttttagaagccggaccaaccaggaccattaatatcttctaacaaaattattacataatgaaaaaatattaaagtaatatacataccataatggttccatcaagtgaggcagaggtgaaaatattagagtcatttggattgaaaaccacttgcatcacataatgagaatgtccctcaaagatttgagtgcatatccaacccttttcccaatcccaaagctttatagatttgtcatcagatgatgataccaagtatgggagatttggatggacaacaacacatctaatgaagtctttgtgtgcttcaacttctatgactttctccattgtttcataattgtaaacacgaataaatccgtcgtcagagccagtcacaatccaatttttgctagctatgaactttgctgatctcactaaagaaaaaagaaaagttttattaaaactcatcacttggtttggaatgtgtattaatgagtgttatgtacctggtgagtttgtgacttcgaaagatttttctaatttctgaaacaatgtgagcaaacaatgttattaattagaggaatgtttcaaatgaaggaaattattacataagtttaaaaattagagtagtgtccatttttgggttcttacttgggattggtggttccatatagtaacagttccactatataaacttgtgagaatcctagatgaattgaaaagcaatataattaattacccaataattagtacatatcatttagttttaatttcaaagataagtaaatttagatgattcaattgtagttaccatggatgagttggatgcacatctactgatttgactctctcagagttttgattaaattccatctaattaaaagtataagaagaatcaataaataaattttaaaaaatatttagtttatagaatgaaaatataaaacaactgtggcaccacctcaattttcaatgcttgttgattttcctgaaaaccaaatatgacaatcacaatttgttagttcca

SEQ ID NO: 24536 - DNA, 2045 bp, Cannabis sativa
caataagtttttttgtggaagtaccaatatagtagtgggatatggggagtgtagaagaggaaacactagttcagatggtgtatgattttatagaatcagactcaactacagcggtaccactattgaaatctcatcactactccaacgtctctgctcctcttaataatcagccccagtatttcactttacaggtatatccatctattaataattaattttctccggcctcttaaatcttatattatatatatgtggtttatacaagataattgttttctagtaataaattaacacataatttttattattatttaggagattcttgggcgtagaacaaaaagagaagttgagattgtggagagagtgttaaagtacatgagtgagaaaaaggaaggtgctaaattttctagtcagaagaaattccttgtaatgaggcttcaaatggatggttacaacgcttcactttgccatacttcttggcctacttctttcggttgtccagcaggtacatatatatatatataatattcccataattagttctaatttgtctctattattagtaacccccactttgtcttaaacttacaaaaacaaaactaaatcatgttaaatctattagctcttattcccttccaaagacctacccagctagctatagacatcatatatatatatataaagatacatgaacttgtaaccttttacaacacctacacctttcccctatatatattaagcagaagggtaaaaaaagcacataataatttccaaacaccacccattttaccccctttttggtctatgtttatatcaggccaccagcttatgaaaggttatgttggcgcgtgtgtggacgcgccctttgagtcaagcaagctttcacactaaatctaaatgaaaagaaaaatgataaggggaggtatgatattggtgtaaactgctaatcgtttacagtaacatgggtgtggtgttagacacaacaacaatgctttgaaaatgggggtttaaacttgaaaggattattaacaataaattaatttgaatcgcggtgtagttgtgactaataaattttttgttttaattcgaatttacaggtgattacgagtacattgagatatgtataaaggagggtgagaagtacatgaacaaaagaaatggtaaaagggagagagttttggtagacatagatttcaagtcacagttcgaattggcaaggcccacttcagcttacaaacagctcacaaacgcactacctcaaatctttgtggggagtgaggagaaactcatccagattatcacactcctctgctccgcagccaaacagtcccttagagagagaggactccatgtaccaccttggaggaccgccgcttacatgcagtccaaatggctatctccaggcaaacaacaaactatttctattgccaacgatacaaacttggccggtgataataataatagtaataacttcattaccaattgggcacccccaattgttgtaaaacccaccagcagaagagattctggtttgtctagtcaattttctaacatgagaataaattgttgtgctaaaattaattaatcaatataaataaactcatttttaaaaaaaaaaatcaatataaataaactcttttatttttttaaatatattaaatattatttagatggaaattaatctctttcttaatcctagctagatttaggtccctttttctttctttttcttttttggcccgctcaatgttttgccgagtaattggctatgattgtttagtttgcattgtcagcattgacggttagtatatgtgatgtgagtagttctacttttagaaattatatatgtaactatttttctttaagcagtttgctaatatatcgttaattatatattgttttcatccccatcattctctaaattaagttcgaattatatatcatatatcgatatatatatatatatatactagcaaaaattacgtgcgaggcacgtatattaaactttatgctagttttttctatgttatttgaaagtgatacaa

SEQ ID NO: 24537 - DNA, 2786 bp, Cannabis sativa
  modified_base (29)..(45): a, c, t, g, unknown or other
taaaagtgaatgaaattagacaaaagtcnnnnnnnnnnnnnnnnncaatagtttagggggcatttttaatgactttaaaaatttagggggcaaaaatcctatggaataaaagatactttttatctcacttttcttaataaaaaaagataaaaagtgaccttttatcctactattttcaaataggtttccagacttttttttaaaaaaatttattacatttcattcaatttttcaagacttctccaatcatatgctttaaatttacttttatccaatttgaaaatagccctaaaacatgattgacttttacgatcgcaaaaaagtgccggtaaagtttgtaagattgcacccacaatcgtgttttagggcttaatttgtgtcgacaaaaatatttttttttacgatgaattcattttttgtgccgtcaaaaatatactataacaatatcaaaattcaactcccagaaattaattatctaataatctaattagaaaatatctttagacaaaataagtgtacctaccataaatttattttataatatatataatttaattaattattcactataatctttttacaatttcaataaaaaaattggaggaggaggcgattctaacttggaaacaataaaattgaattttgtgtgattgagtagtgaatggtcttactcatttagagattttagtaagcccgacccacatggtctttagggatccaagcatcttcccgaattcgaactctatctcccttcccaaccaaccatcgaactcctttgggacagttagagtcccatgattcgaaagagaaagacgggagttgaacaatcccacattgccaagagatggtcaagtgtgatgactatgagattgtgtaggtatgaggctatacagttgaaaatgacttaaatatattaattgctactacctatataaataaggtgcatttgttttttggtagtttattaagaaaaaacttcatagttaaacgtgcttgagcagggataatttcaagatgggtgacctcctaccaatgacgaacctagaaaattattttagatgggacaaattaatatttactactaattaaaagaatgtatatatctgtgaaatttgtgcttaaaaagaaagaagaaatacagatataaaaaataaaatattctaaaataatatttaagcttaagtaaatgtattcaattatttttttattttgcattattttaattttaaatcataaatgctttttttatatatatagaagataatgcttttattaatattattttctttcgaaagaaattactaaaatattttttcaaatatatttataatactttgtaaaattaactcaattcaaccattttaataaaataatttatgcaatggttttcaatacaataaagaagaaattaatatttttgaaataataaaaattattattatactattaccttaaaatttaaacacaaatagttctatatatatatatcatcataaattatgatattagatatatgtatataattaaatatgacaatacatttataaataatatagtgtattagtattattattcttttacgttattaaattttgttttatggtattcaaaatacatatattttttaaaaaaattgaggtgaggcaacccaccttttcgtctttgcctggaaagtttctttttaaaaaacatactagttatggcaaaatatgttgaaaacacttgtgttgatctgtaaactagtattatcagtctataggaagcaaatagaatacgtactcgtgtataaaagctattaatccataaaaaaaaagtacaatagaagcttaaagcggagacgttacattctttcttctataaatcacggctccaaaaaatactttttcataaaaattattagatttccaaattcatagcatatatatatatatatatttaatttgcattaacatatatatatataatatatttatataattgtaaaaaagaaaattaataatcgcagcttaaagattgaggttaataatcctcatcccattaaagtactaaattacaattagcatatgacaaatttcacaataataaattagagaagcaacttaatcatgataagactcctctagaagacacaatgatcactttttttcaatattaatagtgatcaattaatatggatttatttaacattattgacaagaagtcaaattataccaaaaaaaagaaggcatatatgtacaactttaattaattattattcaagagtaattaatatgataattttctttaattttgtgtcgtgatttgtaaaaattattaattgaactttttattttgttaaatgataaattaaatcttatatattttttgaaattgtacaaaatataatacatgagctgatttttttttataaaaatataaaacttaataataactctatctagatgtgttataaaaaaattggttcgtgctaaaaattatcttcaagttaaatatattaaaaaaattgttaaaaattgagtttacgctactattttagaaaatataaaccctaatttattattaaacaacaaaaaatatttacgattaattgaaaattgtattaattattatgattaattcagtgtcggcacatcttataaactttcacaatataattaaacaatacatattaatctctctcataatgtgttttctatataattattgtatggacacaaagtgttaaactatgcaatcaaatcaatcataaatattgtgatcttgtgattgattttatacgtggacgt

SEQ ID NO: 24538 - DNA, 4434 bp, Cannabis sativa
  modified_base (46)..(47): a, c, t, g, unknown or other
cataaaattagtatacgtgcttcgtaactttttactagtatatatnnatatatatatatatatacattcaaggaaattattggctaattgaacaattgaaactaactttagttaatgaattatttgtactcatactatataatagtctatagactaagctaataaacaaactataatactggttttgaacatacataaattcgaaaccttattctctaatattaacgttgtggagctagaaatccctttccaaacctagatcaattactagaaaattaagaaaatcctaactggggttttcttgtgctgtgaacaaacttgaaccattgccttgaagggtcgcacgaactatcttcactcacgcaataacaagggttcaatacaatctcattctcagagttaacgtctaggcaaacgatgtcgtttttggcagttttagtggatagttgcaagttggattctgacatgggcttccatttggaatcaaagtcagtgcaatctttgctaagttgggctggttggcctgtttctgctgctcttaagcaaaagtgtgttcctctaatcatcaatgtcttcttgttacgtgaaaaatgccatgcatctgagcttgagcaagggcctaatgccaatggaccagattgggatttccttacaatacattgaccagttgcagggtggaaaataactttgtgtggaagacctgttgatattcctggccctgcaaatttcatatatgtgttgtattttgttaacatagccattcaaatttcaatatatatatgcataccaatttttattagaaaagagaaaaggttttagcataaatatactcagccttagtttttcattgttgttagtttagtctcttgagagaataaaaaaaggggggaatttttcatttttatggttttttttagcaaagtttacgaaaataaagtttgttaatttttttcttaaaagtaaattatgggaaaaattcaaataaaaatataggaaaaacagtttagattagagtaacaaattacatctttagtgtaaccaattatcttatactacttttttatattatttattaataaaataatttttttgaaaataaaattgaaaaaaaaatcacatgcttacacaaattgtataaaaactcataaaatatataattttcacataaaaaaaattggaaatttaataaaattcatgagttttaaaaaagtgacaatcgagactttttagttattttaaatttgatcagttaacatttttctaaatattataagttactttatatacttctgtacatcatattgaactatccaaaacattccttcaaaaactaaaaaaaaatgttttaaaaaagtaaagatctagctaattgctaattaagaaaaaaaaaaaaaaaagagcaagcatgtatatactagatagagatttcacaacattatcacatgagatggtactgtatataaatagccaaatagggttattagaatgaaatttgtaacataccttgaaaagggtatcgaattgaagtcatcttgtttagcatagtttgatttcgaactccatcaaaatcatagttcaaaactgagtaaacctcatccaacccaacaatacctgatttgtagtagtaactaccagccaaagtccacaaagcccaatccaagtcaagttcagctgctacagctaaaatgcaatttaagcacctgttgtcattctctttgagtcccctttggtccactccaaactcactcaaaaacagaggaaatcctctctcaaccaaaaaaacctgattgtctcttcatgttagcagccaacacaccacacactttgtttgcattctgatttgcccatgcatctttgtccgaaaaggaataccagtgagcttcgaatactagtttcccagaaaatgttagtgcaaatggtcggtcgtgtaagaatgagaggtgagtatcgaaatttaaaccagagataataacaagaactcttgggtttgctttatgaactgcctcggctcctctttgcatgtacctataataattaataatttcattagtagttagtactattaattttttatttaatttgttggttttatttttatttttaaattatgtttacataaatgtatcaacaaatcaaatactttctctctttttttaatatattaattatttgtttcaaaattggagatttttttttaagaaataaaataaaattaaatttgatttctacaaggaaagagaaaaaatagataaataattttaaattaattattctactaacattttgaattataaactgttattagtataaaataataaaataataaataactaaatattggattatatgatccagtgtttaaaaataatatttaaaggaccctaaaataaaaatatatagttaataaaagataagattaaatttgtagaattatatatacaaattataaagtaagattttcataagaaaatcactttttctttccacatcactattttttcacttccaaacaacaaataatatttgtatttttctcaagatttttcagtaaaaaagtttaataatatttttcataattaaactataataattaatatagctaggttgaattaatgaattatacttacttgtaccaatcgtcttcattctgcttgaggccacggagctcgttccttaagctcatgccgatgacattgtgatcatgcttgaagagcttggccattcgagtaagccctttgatccacatctctgcgtcgaagtacttctccccaaagaacccattcccatctgtttgattgttgcaacaccaactcggtttgcttacatgattgtccagtatcaccatcactttcccttttctaagcgcaccaaccactacctataacatatataaacatgactttaattattatgcataacaatattctataatgaatatttaatcataagtttaattagtacgtacctggtaggctttgatgagaggaagatcgatgattgaaggattattggcctcaataccagcaatatcatcataaagaccatatctttgaaaggactgacgaacagtgagagaagcaagtgagttattggtggccaagtagactggccaagtgagacgaacacagttaaaacccaatgacgagatttggcctacaatggaatctaaaggctgcttgttgagtccttcggccagtacaggctctagatgagaaacccaattcacacaggtgagtttcactctctttccgctcatctcgtccacaatccatctagaatttgtggtcagtgtccgaccagtcaccggcacgggttgggatacgaggaagaagaatgcgatgagtgttaaaactgagagaagagaatatgttgctatcttcatgtttttctttgcttttactttgcgttaattattaactattgagaaagagagctgagtatggattgaaagtcttgtacacattgttatatatagtgaaaaaaagatagggagagatatttaaatcatgagtattattcggcttttttatctaacagctatttttaatattatctgttcaacgtatttgaaaatataatagctatttacatgtttagtttaataataattactatcccattatatctttttttatttaaagcaattaccattccattataaattaaaaataattattaatttaattttttatatatcttttctaaataatatatttagtgtaaattggaaaccaaaaaaaagataaagtttttttttttcttagacgaaacgtaatttaaaactattatatatttaaatttgttgtatggtgtaattttgatattttgttttgataattaattttaataaattaaataaaaagataacataatagatttactattaatttttttaaaatcaatttagtattaaatttaaaatctttctttatctttatcattatttaaaatttttatttatctttatcaatttaatatttatctaacagatttttttgctttaacattttttgttattatttgaacttttttaaataacactgttaacttgctgaaattacccttcattataagatgagttcagggccgtcttaaggtgttgaatggcttagagcgaaatttgaaatgaggccttttttataaaaaattaaaataaatatatttttttaatttttgctctaagatattattatttattgaaattttgacacaatataattcactattttatctccatataataaataatttttctaacacataacctaacttaaggtaatatttaattatagttaatagcatctttattgaagttttatatattttaagacttatataaaaaaataatattatttcaaaaatttgttaattttttttaatatatgttataagtttttataaatttaagaagataaataataattaataaatgta

SEQ ID NO: 24539 - DNA, 2316 bp, Cannabis sativa
  modified_base (777)..(777): a, c, t, g, unknown or other
  modified_base (870)..(872): a, c, t, g, unknown or other
ttccgtgaaaccgtatttttgttattttttttgttgtttttgtgcatttgtgaaattaacccatatatatatatatataagtatataacaacgaaaattaaagtacgtacgtagaagaaaccatagtggtgacaggcactagagaggtaattgagtgctttgggttgtatattaggatcggtagagaagaggagagagtagtcaatggtgggaagttcatcaacattacttatttcagtttgggcattaatattactataaaatttattaggagtattggtattggtgtctgtgatctcatgattaatttcattattagaaaaattgggtgcataaccttggggagaaagagaatcaattgatgatgcagtttccattttagagttaagctagagaaagctaactaggctaagtaataagcttgtttctcctgtcattatatagaggcccagtgggaatattgtatagttacgtagcatgtatgtcaaaactacaacttgtttgtttttaattattgtagagaaattttatttacaccctaaaattttttaaacgcactctattttaataattttaatttaatataaaatttatatctttagttatgttaaattttttcaacttttttctttcaattcataaactaaaaaaatatacctatcaaataaaattaaattatattttaaatattatgacaaaaaaattaaaataattttttttatgaaattttctaagtaaaaaataataaaaagatatacatgagttagaaaaaattangaaaataaaatcaaaataagtatattaaaattaacataaaataatgtgagaaaaaaaattaaaaaaatatcaagagtaatttttaaaaattannnaagtttatattttttttaataatggagtgtatttataatttagtggggtgtaaataaaagtccccttattatattatagatccaatatcaaaactcataaatttataccataaaatgatatataatatatatctttaattgttgagaattcttattaaacaacattaactgttatgtcgtattgagattagttagtaggtttttacattatttattaaatcaaattataaaagactctaataatttatactattagaaagtgtggaatccttttaaattttcgcaccataaagtctcttagcatttttgttaagagtcttcgattacaattttttatttaacttttacatgtgaaattacatgttagaatatattttttaatttttttgtaatagtatctgttataattacagtattatctctgtaaatttttaaaaattttcaaatagtttatagtactaaattttttttttttttaatatttaaatttatgtatgtttaaaaatttttaaatatttcttttttattaaataaattattcgaaattttttaaaaatttaatggaataattttgtaaatataatgaataataaaaaaatattttaacatgtattttcaaacacaaaaattaattagaaaagttataataaaagattgatgaatttctcttctcttacttatattcaaagtattttgttttagtcaagatgtgggtcagaaaaagaggacaataaagaggtggaagactgcagtgggacccatggggttgttttgggcagtggggccccttcggaaattacttattatttatacacatatattattacaaaaaaaatatataaatacacaccactcacaataattgttctgctttatttttcaaaataactcgctaaaattttattttttttattttacctcacacttatatattatactatacattcacttctatatatttttatctacatcattaaaataatatgtttttaatacattaataatatataaattcataaaaatattatattatacattatatataattataaaaagttaataaatttaaataaagtagtaataaaataaataaaaaaaatttagctcactctctcttatagctacatgtcgagatgcattttattgaaatttatgtaaatttattatagctaaactataaagatgatattaaaaggataaaaataagttttgaacgaaaaattttaactttcagctattataaagacactgataggagtgcttttaataaaaaaattcacccttccactaaatttaaacataaacatagtttttttatttattttttttgtttgaaaccatataaacataatttagtattcagggacggacccattaagattgatgtggagactatagcctccactaacaaaaatattgccttttaaaaaaattaaatgtaaat

SEQ ID NO: 24540 - DNA, 3408 bp, Cannabis sativa
cttcaaatcatattacctgaaaagtatccttttctacgatagtatatatagagaaaattaaagggaaactctatgagtccaaatcaattatcacacttaatttgttgaaatggaaagtggacgacaatgaccaaaattcttcctctagtaaatgaaaaggtattgaaaggaaaaggggaagagagagagagaagaagtaagtagggtttaattttagctaggggatataggccaactatatatttgaccataattaatctctatccaattcatgatcagaacctctattttatgcctctaaaacagccaacaagtcacgttggaaaaaatgggcaagctttcaaatgttaagttaggttgaacctggtaaccccacaatattaatatgataatactaaatcatgatctgttcgatacatacgaatcatataatggcaacatccaaaaaaaaaaaaaaaacaactccatgtacgaaattgtgtgccataacaatgtatatgagtatacgtattaatctttggatattttcttaaatactaaaaaataataacaaaaaatacaaatttacagatgtagaattttttttttaatatttttatggatttaaatttgaaaaattatctcatatactatttttaactttgtttttctacatttacggtttgaattgctcttgtggtttccacgtgagttgctatatatgtaaatttttgttgtaatgtaggttactccgttagttgttatgttaatttttatgtaaaaatacaaaaaaaaaaaaataaatgaataaataaaattaataacaagaggaatttttcactcgttatttataacaaatatcattaatctcaattacataacccatgaaatgaaaggaagaaaaaaaaaattggccatttactattgaccaataatatcaaaggaaggatattaggtttttgtataagcataacacatcgatgcaccgtttcatttaaataagcgaattataaactagagcaatcaatacacggagcaaagattttccgcacatggcattagaaagtggaataagtatattttcttataaataccacacatcttattccatttgaggccttgagggattagattattataattattttggttactttaagtaaatttggacatgagtgacttcgtgcaaagaaatgtgatttcgttttccaataccgtattagaaagagattcaactatacaaaatgttcaagttgggcgagcacattctacataaattgttatttggaggaatttacacaccccagcagtatatatataaatatatatgtacatttttaatagatggggatgatgacgtttttgggttttcagtgtgaaaggaagaaaggcaagtgcaaatcgagagggtgaccaaggctggcacgtgtgaatacgagattatggccaatgggacccacccgatctccaaaagcgaatcctgggaatagaatctggatggtgacttcaccataggtcggggtggccctccttaactcttccaaaacccactgtgggcctccaacctcattgcttctatttctattccaacattatgcaagtcaagccacccttatttgaaaattaaattatttttttattcatttaagcaggataaggataatatatatattttatatacatatatgtgtgagtcgctttcttttcccttttcggcctgcgaattattgcccatgttttcaatagagattttcttaaaaaatagaaacagcgttggaatcaggatgcaagttgaggatggttttggctgaatttagacaatttagctagggtgaggccttattctagacccgaatttagaaggggtgtgtgtgtggactgttttgaaagagcttaacttgatagtacatcgtagtagtagtaaccacatactactacttaggctagacgctagctgtgaattgataggctctttggaagttagattcaattattagtatccagttgtcaaaagaatttaaaattgagatggctttggattggagaggtcatggtttggctaaaattccactatactattcaattaaattatgcaagagttaattaatattccaggacaaaaaggcaatgaatacacttggtgtcgaaatgttactgtaaaaaataactaacatcactcaacacaaccccaccaagacaccaaccattcaaaacgaaatggtctctgctctgcctctcatttttgttaaaatttaaacaaaagtactataattatatataagcatatattagattattatttgggattaactttgaataaaaaaatttagcaatctgcccaacgtaactagtattttattcataatccggccattaaaatgacaagtatttggtattgtcagaaatatttgcacacaaaatgtctaattaatttattttattagtcatgcagagagtcaaagatttgagcagatgtctaaacaaatatgacggtatggattgtttggtctaaagatttgagtaagaactattaaaaattctttagagagtgtaattggtattaaaagctactaattaaaggtaaattgtatggaagaaggatgtggggaataatttatttctttttttttccttcttttttatatgttcctttcactttttccgttatttcagttttgtctttttattaagatattttatttagggagacatgtttcatatatattttaggaaaaatccataatagccgttttttttttttttttttaattaagagtatttttgtatttatataagagccttttaaactattcttttttactatcttaattatatgtattttttaataatttataatatcaaaaataataattaaaaattttgttagactttttagttttatacttatagtaatgatagtataaattatttagaatttttaaaaaaattacaaataatcacgtatataattatgaaaaaataaaataataaactctactgcaaatgaaaacaaatacaaccaaaacattgttgtagtacgatattgatttaccttatttattttttgaaaaaaatttacataaaatatctaaaattttaatttcttttatggaatcttttctttttatacattttcatcgattttcttaatttacaaaataatattgttttcacattacaaaaacatccacgcccgaaaatacttattggaatatttttttaattttttttttcacgggggtgtttggtatgcttacaatatcaatcttgtaaatttttaaaaattttcgaatagcttacagtgctgaaaatacctttgaagttttttgaacgcgcctagtaaattggaatatcaggaactctattttcggtactgttaactattgagaatttttcaaaaatttatagggatgatactgtaactataac

SEQ ID NO: 24541 - DNA, 2020 bp, Cannabis sativa
atgtaatataccaaataaaaataaagctgtcactgatttttgcaatgcttgttgtttaggcaaaattcacagatttccttttcctcaatctgagactgtgtatactaagctattacagttgatacacacagatctttggggtccctcccccatgctttcttcctctggttatagatattatgttcactttatagatgccttttctcggtatacttgggtttttcttttaaaagctaagtctgaagctcttcccaccttcattaattttagaactcaagttgaaaaggaatttaatacacctataatatctgttcaatctgattgggggtgaatttcaagctcttgaaccttatcttctcactaatggaatcactcatcgtgtgtcttgtcctactactcaccaacaaaatggtgtagctgaacggaaacatagacaccttgttgagagtgctctcactttacttgctcaagcctcaatgcctctttcttattgggatgaggctgttcgagcatcctgttatatcattaatagactccctactcgtgtccttaataatgacactcctctcaacaaacttttcaacaaacaacctgattatagcactttaaaagtctttggttgcacttgttttccaaacactaggccttataataaaaataagcttgaattcaggtctgttaaatgcacatttcttggttacagtttgaagcacaaagggtataaatgtcttgctagctctggaagaatctatatttctagagatgttttatttgatgaatttcaatttccctaatcaatctgtgccttcttcttcttctcattctgttggcccttcatccattatttccaccactggtcatgtcactaatcaccccactactggtgctgcaacctctgaggcttcgaatacttccaccagcatcttggttcctgctgctgctgcctctaatgttgcaccagtcactgcttctacttccccatctcaaagcacctctgctactgctcctggtccaacaaataatacacagcaacatcccttagttcttgatgttccagcacccacgactgccattccttcctcagcttcagtcaataatcacccaatggtaactcgttctaaggttggcacttacaaacccaaggtctacatgatttccaaggaacctctaagtctggcagctgctcttaagtctcctcattggaatggtgctatgcatgatgagatcagtgcccttaaaaagaatggaacatatgtacttgtaccattgcctgctgatcgaaaactcatagggtgcaaatgggtatatagagagaaagaggacaaggatggctctgtcattaagtacaaagcaaggcttgttgctaaaggtttcttacaagaatatggctatgactacactgaaacctttagccctgtcatcaatccaactaccataagagtaatcttgacaattgctttgacaaacaagtggccaattcgacagctggatgttaacaatgcttttctaaatggagacctaatagaagaagtttacatggttcaacctcctggttttgtggacaaagagcatcctacctatgtttgcaagttacaaaaggcactgtatgggctcaaacaggctccaagagcctggtttgacaagttaagggctgctcttaccaagtttgggtttctttctgccaaatcttatcagtctctctttctaagacttacatcatcacatacaaccttcatcttggtttatgtagatgacattattattactggcagttcttcctctgaggtttctcttcttatttccaacttgaatgccctatttgcacttaaagatctcgggccattggattattttcttggcattcaagtgcaatacttagatgatggaattcatctttgccaaagaaaatacatcatggatcttttgtgtagagccaaaatggatttagctaacccacttcccaaccctatgactggaggagaacaattatcacgtgttgggagtgatccagtggctgatc

SEQ ID NO: 24542 - DNA, 3845 bp, Cannabis sativa
  modified_base (2622)..(2625): a, c, t, g, unknown or other
ttaagtattattaccaccaaaaattaaatttaggtatttatttacaatcagaagttaaacttagatatttatgccacaaattactcgaacgaatatcgttattgagtgttagtggtgtcttgtacattttagacgtgtcgagttgcgattggttagcgatacttcttaaaaaattattacattaaactatagagaaatgttaaatagcactcacagtatctagtatccttatgaggtttaatatagttattgatgcacaatattgaggtcttacttattttaatttaatgaaaattatagaaatcgataatcaattataagacgtcatgtcatatggatgctagacaccttggtatcccatggtaatgctctaaattatatggacctaatacataattgcaccaataacaatattgacatgtaatagggggttagacaccactggtgcctttaccatttctattacatttttttaaaatatatatattaaataatgaaaaatttacataatatagattaaaatattaaataaaactataaaaatacgtcaatatgaaaaaatatatatatatatttttactctttgaacttttttattacgaaaatatctctttagtaaaataataaatcatttttttaattttatagttgtattatatttgtcatgagattattttttagttgttttatagtttatttatagttgtcgtaaggttgatttctcgttgttttcttactttttcactgaaaaaatatatttatgtaattttaaaactttacaatcgtatttttataataaaaatttagattgtaaaattgtaaataaaacattaaatggtatatttgaaagttttccttaaataattttgttagagcattgttattgggcaccaatgatgttagagctagcgctctacgattggttaactaaatttcctaaaagcctgatacttgattgaagcgttgttatcattaggcgttgttattccctaaaagttgctattttaagctatataggacctcatattttattgcaccaatagcaatatgacaccgagaagggtgctagacactattgatatcttttagcattgagcattgctattaggcaccttaaggtgcccagcaccatactgatgcgatatgagttattagcaattttttatactatttattaaattaaaattgcaataattgagaaaatattgttaatttttgtaaaaacaaaaaaaaaaaatataggatcgatacatctttttctattatttctaaccttcaataattttattcttaattttatatatataataatacagaatatagttatttgacacattatataaaattttaaaaaaaatcaaaataatttatagtaaagtttttcacgttttctttaataaattttttttttcaaacaagtccaaaaaaaaatgtagttaaagtttcctcaaactacatcaccacaataaacccctcaaactatggtaattatagataacaagtcaaacatttgattttgattttttcttttttaagataattgagattttcaccccctaaactttaacaaattaaatcatatccttaaacttttaaggtcgtaaaatatctctactgaattattgagattgttgaatattttaggaattttttttttcaattttagttagaacagtctaacatatataaaagttcaggcgcttgatttggtacatgtcaaagttcgagggacatgatttggtaaatatcaaagtttaggagcatgatttagtacatggacaatcacagaattagtaaaatcgaatgaaattagaaaaatatttttaaatctaaaaatcttaatagttcaggaattttttttaataattaaaatagtttaagagacatgatttagaacatgtcaaagttcaaaaaacaaaaattacaattaactttttttaaaaagaaaataacaaaattttttaatatatatataatttattgcatacaattttagtatggcaatataacgaggaatatataccatttcgagacaagcattacaacaataatgaatctacgaaacatgctcaagcattacaacaaatgcttgagcgatatacttgcttgaaaaatatgcaagtgtagttaagaatagtacgtactcgaatgttgtaaaacactttgaaaaacgtattgttcggcatcctcgaatgttgtaaaatactttgaaaaacgtattgttcggcgtcacaagcaaatgctcaagcaagagtagttgagaatagtgcttgaatgttgtaatgcttgagccctacacttgcttgaaaaacatggtcggtgtcacaatcaaatgcatgctcaggcgagagtagtgctcgtatagaaagattgaatctttaaaagattgagactcgagagaattaattgcataattgattaatcttttaacactaataatcaaccataattcaagtctaattaatcaaattgctacttaaaaaataaaaacaataataaaaataaatactattttaaactttgtatttggtaaaaattactgattatacaccatctgttgacgaaaaaactctatattttttaaaatggtacaaattagatcctgaactgattttttgtcannnnaaaatttaataataacttgatttagaagtattatgacaaaattgattacattttctacatttgttcctattaagttttatcttcaagttgtttatattaaaaaaatgttgaaaattgagctcagggtcctatttttatcattttcaaaaatacataactcattttgttatttaataaaacagaaaatttaatcgataacttttacaaaatacatagtctaaaaataatatttatcctaaacaaaaaataccttttatttgtaatatcttataagtatcttcttattttttgttctttacgaaagttagcattggcataattatttaaaaatcttctatatattttctttctctatttgaaatgtagccacaaaaaagaaaaagggtattaggatatcattttggaaaacacactattatgcttttataaaagtaaatagaacaagaaaagaaaatattaagaaaatacatagtcaatattggaagataataaaaggctagggcatatgttttcatatatattttttaaaaaagttcaatattatttttagcaaatattatatgattcttttttcttcatttatttggattcattatcatctaagcaaatattaaattaaaaaaaaggcaataattcatttgaacttttagtgtatggttgtctatcaatgtctcctatgtttgtgagtgtttagctaaaaattcatttctatatgtttcatttcattattatttttatttatataattgttttgtcatcccaaaatagattatttattttctttaaaaaaaaaaatcttaacatcaaataggccatgggtacatacatgtatgccccacccaaaaaaaaaaaaaaacatgtattacatgtagaatggtagttcataaataaagaaggtatatttgtgggccaatttaattctttattatttacaattgttacaattacaaatatgattataataaagaaaaaaataacagtaaaaatactttattttataattttattgcagtcgtattcttttgacaattaaatactagtaccaactcaaaaatatatagaaacatattattaaattacgtattaaataatgtaccctattttataattaaaaatatacaaatttcctttaattaaacaaatacataataactaaaaaagtatgactgtaataaaattgtaaaatatataagatttttttactatatttttttattaaa

SEQ ID NO: 24543 - DNA, 1603 bp, Cannabis sativa
cgggatgggaagataaggagagagcagttgattggtctttctttgttgcttgttccagttagccaaacgatggccacatctattaatacgagtcacaaattgttctgctatcaaggaggaatcctcctctatccaacaattctgcaccagctatttacagtcttctttgtcatgccaggtatgctcataataaaattaggagaaccattgagttttagcattcgtgttgtgaggcacaaaattgtagctaagcaagaggggacagtgatcagagttcatctgggggagatgtttaaccaaagcaaccaggaacatgtcatgccattccatattccccataacacgatcaatacgctcaaagataaggttcctgaagcgcccattacaccaagtaaattggcttccttcgaaagggatatcgcgaaaaaaataatcatttacgacttgttggaaattacaaataagattcagaggtttaggtcggccacccttcttctcatgggaacccaagatctcgttgaaatctcctccacaaaccaatggccccgtataccgatcttgcaacctacaaagaagattccaggagtgcatccgttgattagggtcgggattcccatagaaacgagtgaagtgccaagtcatatccacctcattagacaccaaggagtcaatataaaaccttgtataagacagaacccgaacatcagtaggagaacgccagagaaaagcaagcctaccactcttaccaatcgaatccacacaaaaacaccctgaaaaaccgaggcgcacccgcacccactccatttgaaatgaagaagcctttgtctcaaacagaaaaaacacactgggattgtagtcatgaacgagggaaaggagggagttcatagtctaagggttccccagcctttaaacattcgaaaaaagggaaatcatggctcttggcgaccctaccccgcaaggttcgccgctaaaaattcatcaacagagattgaatccatcaaactagaaacttctccttgaggaacctggccgtccatagtaacatctcccagacccaacacattcgatacaatatcagtaggggcctcgccaaattttttcttttttttcctccacattgagccacaaattttgttgcacttagtaggaccaggatcattaattgtcagcctcaaaacatcaccaaaagatatggggacatcaatcagagaagaagattgtggcaactcatcaccaacattggagaaagtagtagaggagccaaaaaagtcctccggcaacacaggagcttctttccttttagcaatgggaggaacatcattaaccccaggacatggttgggccgagaatcagattggatgccggggctacgggcaggcatttgatggggcgtaaaatgaccccctaaaaaacccaattacttaaattgagaagatgagttaagctcaagccaagtcccgtaagcacgagttaaattaccataaccatcctgaacatagccacaggagcatggcaattcttgctcgcatatcccacaattccatagttaaagcacatgtatggcaaacgattatattgaaaaggaaaccaaatcttaccattc

SEQ ID NO: 24544 - DNA, 1674 bp, Cannabis sativa
ctgagtttctatgttatgggcctcaaaaagaggttggaaaagaagggaaacatttgcttaggaaaagcaaagatgggaatattacagagtggaatgttgaaactgatgactctctttgtacactccaagaagcttttgaacaagtggaaccatctttggggtttaacatagaattgaaatttgatgacagtgttttgtatcaacaagactatcttattcatgttcttcaagctattttagatgtggtttttggctatgccaaagacagatctataatcttctcaagtttccaacctgatgcagctcttttggtcaagaaattacaagacaaatatccggtaaaaaaaatcatatttttgaaaattaaaacatgggttttggttttggtttagttttttaaagtggggatgtttaagaatttactaattatctttttgttatatttcaggtctattttttgaccaatggaggaactgagattttccttgatgttaggagaaattccttagaagaagccatgaaattgtgcttggaaggtggtttaaatgggattgtctcagaagttaaaggggttttcagaaatccaggggctgtgcccaaaatcaaggaccataatctttcactcctaacatatggaaaattaaagtaagagtctatagtctaatttttctacaccaaatatcttgacttttgttctaattggtaactatatattaaccttttctttttatttgatgtattaatgcagtaatgtaaatgatgaagctgtgtacattcaacacctaatgggaatagatggagtgattgtagatttggtacaagaaattagtctttgatttaatgaaaccaacaacaaataacattgaagaagagagcctttctcaaggtgatgatgagaacataaagctcaaaacaaagccacaattttctcagaaagagctttcttttctcttgaagctcatccctcagttgatacagatttaatacaatattttaaccttttgttttttttacttatattgttccactttgttttgtggtgaaaagagagttggattagaggagtttgacacgccaatatactcgtaatgatgtacataaatttatcgtagtcagtttcctctattaaatctatacataaaagttatgtgttgctaacttcttatttttcttttgaatactattttgtttttggtttcacttttgctcttatgtcactaatgatttcatctttattattttcttttaaattgttcttaaaaatacagagtatatgtcaaagaatatattggtcgcgtggcactttcatttttacggattttaagttaatgtttttaggaatatgtggtgtatgaattgcattatgtacatgatacgcacttttcgaaaaattatgataatgttttttaataataataataataataaaaaatactattaacagaagaagatctttactggtgaaattttttagggtgcaaaaatcactagtcacttaaaaaatattatttatctttcatattatttttaacactttttttaaaaatatttcaatggtaagacagctttaagaaggttgcatgatgtaatatttctccacttcattttgtagcttaaatttgccgtgtgactacagtgccacgatatccaattttttttattttttatatatat

SEQ ID NO: 24545 - DNA, 4982 bp, Cannabis sativa
  modified_base (2529)..(2536): a, c, t, g, unknown or other
acatccgtggtgtgactgcatcattttacatggagaaatcttgatgatttgattgtaagtttgcaacattttgcagggcaaaaaatgatggtggagaagaggctgctgtcccctcttagtaaatgcaagcgtgtttagaactttctgatctgtgctggtcataacttatgactcgtgtgctttacagctgatacttaaaaaaaggcaggaagctttaacaaaaaacaatcatgcgcatgctacatagtgccctttttcacttctatattttttgtgtatggaattattttaatagctaatggaatgtaagggtgacaatccccagagttctaatttctggacctctatattctttcattttgccatttttgtagcctagccgtttctaagcttaatttaaaaggtttgattagtgatttaaatgcaaggattcaaggaacaactttatgtgaatttcttcattgtataaataaaatgtaaccatagtactgtgttctctctctctctctctcgtataatttatatatatagtgattattcaaagggcatgcagaatataatgctctttatttttgaagggaaataggttttcctctgaattatatagtgttgtcctctgaatttttttgccaagtaaaaatctttcgaatcataacaactcttaatatagtacaccatcttagttgaattatccatttttctatctccatctgtggtattcttctagcattgtcataaaatgcaatggtgtctaacacttattatcattggtgtaagtgtagtagatttcatataatttgagttaaataaatttaaaaatataattatgggagatttattaatacacaaaaaacgatacaggatgttgcacaccctagtgtagtgtgcacttggcagctcctcatgttggtttacattattgaaccaaattgtaattcttttttacaacaaaggtaccattaaaaaagaaaatgattttacttataaaagtatcactaaaaaaaaagaagaattacagcctcgagacgagaatgaaatggggatgtttttaggaatctagaagggtggggaaaatatttggagtcccttgttttgttattaccattattattattttcaattttcatcatgtacttttaaaataatctattaaaggcttgtgtagtgagccactcgtggcatgaacaataaataagctttatatacatggcttggcttgattggctgctgtaaaatgatacgtgttttagagttttaaatgacataatcgtctgcgtagtaaagctcgagtttgcttccacaacttatgtgcttcggattcatcattggctagaggtgagcagctactctcgttgcaatctacaaagtactttccacttacaccttctgtttgaggactcaaagcaacatagcaagtagttgatgcaccctgcagcaccatataattacacccctttaaaccactacacaaaactactagtacatatagtgttatgtttgtgtgattgtacatacctgagatactgattttaacagctttgaagccatgaaaaatacagaatctgcattaaggaaaagttgaaagaagttaagagtaatgactaaataggacacccaaatattttattaagagtttggaatcaaatgtacttgccagtgataaaactcttgtgagctcttataatcccagtcttcactattccggggtgtactgcattgatggttactcttgcatttcttgtctataaaatttacaagaaacatatctcaaattaataataacttataaaagatgtaatgtacaataaccgagctttatattaccttaagctgtcttgctatttccttggcatgtaatatggaagctaactttgattgtgaatatgcacgagttccattgtaactgcataagttaacaacaataataattgttacgcatggttgtaagaagaagaagaagaagaaaaatggtgactagtttagtttgtacctttttggagtaagcaagtcattgaaacgaaaatgctctttcttaacccagctgtggattacagatgagacatttattattcttccttggacaccagtttgagctgctgtttccaccatcttttctagtaacatttctgttaatagataatgtcctacaacaaatataaatgtttaattagaaacaatgattgcacttaaatttctatatttaatatatcatcacataataagataataaagggtcaatactattttggaccttgaattttacaaaatttattaattggattttctgttttgttaaataataaaataaactctgtatttttcaaaatagtacaaataggactctgagctatcaatttttgacaatgttattttttttttaatataatcaacttgaagataatttataacacatacagatacaaaaaatgtaaccagtttcgccataacatctctagatcgaattataattaagttttattttgataaaaaattagttctatttgtatcattttgaaaaatatagggtcnnnnnnnncatttaacaaaataaaaaatctaagtagtaacttttacaaaatacagaatcttaaataatatttacccgataataaatacggtcattacactaaataaataatcttctaaatgtttttttttttaatatattttatttaagttttagtcaaaagttataaaatcattattcttaataacatagaccaattagaccccaccaaaagtcctaatgttttggaagaaccaagaccactttgtaaagagatctagttgggcctgggtctagggtctcggcctgggcctgggcctgtttggaatttcaggctacagatgagcccaaagttgagacgcgttgtatagtgagtcttcttacccttttcaccaacccaccgtcataatcatattcgaatccgcgttaaggcaactaactaaggtgtatagtcagtcacatgtgagcagaattgtgccaacaaaaagaaaatcttagttacctctctatggattttagtcctaaagttatatgatgaccaaaaatatcagatatcattatatcttactctcatcattctgattggactcttttacaaaaatgaaaaaaaaaaaaaaaattcttcaaacttaagtgttgtttctatatggaccacatgaatagtaagagaagaaaattttactactttatttcttcttttctttcattagcttaattggtttctcttttactaataatatataattaaatatgaggtgataaggcgcactagaagtaatgatataaatatgttgaaagtgttagtaatagtagtaaaaagattagaatattaaggctttgtttggatctttatttttcttaaacaacatttttattaaacttatggtatctaagaagagatttctcaattttttgtttaaatccaaacaagagaaattgaaattctactttctttttgtttttccctctcaaaatccaggattcaaacacaagctaaagaggattatttttattttttatttatttattttttaaattaaaaaagaagaatatatacccaagtagtttgtagcaaatgtcatctcaattttgtcttcagagtattccagtgtttgagagaaaatcccagcattatttctgtacaaaaataatggaatagttataattaataaaaacttaatatatgtatatatatataagaacccattgtaatgataacaatggtactatagtaattagtaatgataaactcacatgagaatattgagtggtaatcctagagcaaggaagtcagagcaaaatctcttcacagaagcaaaagagctaagatcaatctccaaaactataacctcagcctttggattctctctttcaattccctctttcacttcagctgccctaatcaaatccctggctggaatcactactctcactcctctctttgccaaaactctagctgtctcagctccaataccagatgtcccacctttaattaagtaattaataatgattagtacaattatttaattaactactaattattttcatagcaaattaattactgaaaatcttgttcaaaaggggtattattgatcatcaattttgtttgtcttttattgagttaatttagatagacaggagtagtagcaattcatgtgatctatactctggaccaataaattaaagaatgtaattcagtgatatgtatattatgatatatatcaaaagagacaaaataatatcttactactgccaaaaagagccactgaattaatatatataaataatgtaactagatatatatatatatagacagaatatatcacaataataagtgcaggtagcctttgaagaaaaacaaaataactatactatatattaatagttgtccccagaaatgcctttatgaattaaaaaaaatatatattatgaaaaagtcctggaacaaacttggttggaaataaagaatcgaaacatctatttatgctatcctgattcctcagcatatatttatattccacagaatatattataatccgaaaattcagggaaattcaccactaattgttgagagagagaaaaagcaagaagaagagagaacagtgatgaagaaaaataaaacaagtaagcgttatcattttatgttatatatatatataaatatatatatatattcatccagaaagaataatctaacaacaatcctaaacagccaaacatagatactcaaaaactcgcttgatgatcagaaagaaaaaaggggtatataattttgtagagacaatattctcatatcatcagagcccttagctttcaccaagaataactgaggaaaaaataaataattattaacatggaattgttatcttcatcttgtgatgatatacgtactatataataataatatagttttgttatttatatggtaattaattaatattattaatagtactactaaccagtgattatggctgtt

SEQ ID NO: 24546 - DNA, 1289 bp, Cannabis sativa
attatcacaaggctttaggataaagtctgaattttgaaagatcctttgtcaatttttctcccaacacttcccctcagtgcaagcaagactttattagtgatctagggataacccttttgttggaaaatattttgattttctccaatctaaaaactactttagaaagctttctttttccttttttagacaaaattaagacccatcttagctgcttagattaacaaattctattcaagagctagaaaagaggtgcttcttaagattgttgtacaagacattccttttgcaatattgcctactaatttttgtagtagaaattcttaaggtaaaattgtagtggaaacagttcacttcagaagtactctgaaatccattggaagaattggaacttggtttaactctatgttttgtgggaggtcttggattcagatctttcagtcattttagtcaaactatgcttgctaagaaaacttggcgtatttccttagaccctagctctcttcttgcctagctccttacaagattacaagaatgcctaacttctaagaatagaagctcaagtctacaactgtccccttggtcaggatgtctgggaactaccggaaataggagctctaaagctaattataaagacaaattcaagatattacgaaccagcgttgcgagcttagttagccctattttaaggtgtcctagcccaataatcctataagtgcaagcgagagttgagatggactcctataagtgttacccaacagatcataactctctttgttcaagatctacctaacctttcaagtattattagagacatttgatttttgttgtctttattcttttggtgttaattaatttatgatatgtttctaggaatacaaacacagtggcacataataatttacctaaattagcatgggattgggaagtagataataaaacagtatggaatggcaatattcttttcatacttctttttcaagttttgtaaccttgatattaaacactttcactttcaatgataaattttacatatttcaacaaagaaaaaaaattaaaaaaaaaaaggaagaaaaatattgaaactatgaaagaaaaacatctgcaaaaggtgttgaatttatagttaggtaatttattaaatgagtacatatataccaaaattctttcaataatttctatttctatttttattgctcacgtggatgaataagaatcatcaattgttccttttcttaaaatagatcataaattgttccatgcaataatactttcataagatatttttagct

SEQ ID NO: 24547 - DNA, 3340 bp, Cannabis sativa
ctctctctctctctctctatgattaccttaaggagaggtaattagttatcctaaaatgttgcattttctgtggcgtgctctttcgggcactcttgctacgaagactcactaaacatgtaccagttgatttggtgtgtccaatgtgcaaccaagaggaggaaaatatcttacacctgctagttgtttactcttttgctaaaagttgctagcacaggtcctcggttagtgcaataagttctttgggtggggattatactagctggtttgaatccctattgcaatttgatactgcagaaggtcgtgaggaagcggtgatggtatgttgggccatttggaacgctcgtaatgctttaacatggaaaggtaagagctcttcagcatcgaaggttgtattgtccgctagagtcaatcttaatcaatggaaaactgctcaatcaaaaaagaatggtcctttgttcattctgactggtgcgaatgaaggacgggagaagtggtctaaaccggtttcaaacaagattaaggtcaatgtggacggtgctatttttgcttcagagggctggtatgctgctggtggggtggcccgtgattgtcatggtcatcttgttgaagctttttttattagtaaaccaggatgtttggaggctgctgaggtggaggcttttggcataaaggaggctcttagttggataaagggtaagaattgggaagtgcaacttgaaactgattgtcttcttactgtacaagccttacatagttcgatccatatgatatctccttttggtttattgattcaggaatgtaaggcttaacttgattctttaaaatctgttgagattcaatttgtacaacgtttgctaacaaggctgcacattgtatgactcgtagctcttgtttcaaaactttcaaatattgtaatagttgatgctatttgctaataaagtcccaattttcattcaaaaatgtaataataaatatgttgagcaaatctattaataacaacctcccacgtgaaagttataactttccaaccaacaaaattgaggcaccatcctttaagctgataatttaattgtatagaaggatcagcgtccaattaatctaattatttttttaacccaatttaataattagattgaattagtttttcaattaaattttaatttgacgacttccaatatatattaactaaaaaaatattttagaaaaaaatatatatagaaactaaactatatacaagttcttaagatttttttagggtttgatcaagagtaataagttctataataaagtaataaacaacaactaaaattaaattttaaacattattttaccatatattaataaatacgtacaataattgttttaatatatattatatattatatattttgattggtttttaattaatttttaacacaattatcgactcaatttaattaaaattcaactattcatattcaatttataactgtttgtaattgggttggaatatttgattggattggaaaatataatttgatatatatcaaattgaaatgttgtggcttgtaaattaaaaccatttctttcttttatttttttaatttttattttaattattattattattgcatggaaaagtaggtattaagtaagtatattcccaactaaaaaggatattaataaacaatatggaaaccatcaaattattaatcacatggtgctgattataatccatgcatgtcaagttgttttgtagtagtgacatgtttattgatttatatatatatatatatattgatttatatatatatatataatatatatatatatatttatatggcccatatgatcaccaagtcagaaaaagtcttcaaatttgtgtgtacttttgagaacaaaatattaattattgtggtccatctatttattaagtttttgtatttctatatcatgttctataatactatattataatataatcttaattgtattttaatttgttcttgactaaggtgagtcatcatcaagtccaaacaaaggacaatatatcttagtctaataatttagggctcttatatatccaaaagagtctcatacgtacatgacaaaatttatttataaaaataacttcttagagtataatattgaaaaataccacagtttctttttattaagaaaaaggcctcataatttagtttcacctaaggctcattttttcttagggcatgcatcacttatttagtaaaattatatataaaattggaagttgaattttagtgtgaaaagaaaaaaataagaaaaatgtaaaaaataaataaataaataagtatggagaacaaaaaaaaaaaaaatcaatatttcatatttaaaatataaattttgttgaattgagtgttttttatacattttttattttcataccaaatataataattttttatttattttttttacttttttttctatatttaccctaccagtttctttcactaaaatccaactttcaaacataacctaaatagatactatgcaacacataatccgtcttaaaatttgtgtaacttgataaaatttgtgtgacttaatatactattatactacaaaaggctttaattgttgtgtatgcgttgattttgtttgaagccaaaagcttgagatttaagaatttaaaacttggtcttcaatggtagaacttaccttatgtatgattatatgttttaagctgctaaataggttttaaactcattgttatattattctgaaagttctggtattatttggaagaaattgggtagaatttaaatttgagagtttgaatttttagaattctgcaacaaactgggctatcagttgggaatcgtgttaccaattgctgcccaaaattccaggcactcgaatttgacatcaagtggctcgaattcctgggtgtgtcccaatttttcgtgtttgcttgagatagggtattgccaccctatttatcgaaatggaacttgagattatgaatttaagtctcttaaaagtattttagcaagacacttaccagtttattgttaatgtgcttagggcctttgatcgtcgagtagtttttttactctggttgaccgacccacttaattttaaaattgaggtaagataggtgttcaaatgcacatatgcacatatttagtatacatgtatattgtattgtcatgtaactaacatatcagaaatagcggtattggtgtatatagagttgcaccgggataccgaaaaatatatgttagacaatattgaaaagtacaaattaacgctaccaacactagtatgattagagtactaaggtggtgtttggttcacatgaatgagcattggaatggac

SEQ ID NO: 24548 - DNA, 1032 bp, Cannabis sativa
tgggctccatagctttgcttattttgcctactatatggggtctgccaattatgatccataggtgacttgccactagtggtgatattgggtctccattttgggtaccttgtgtttgtgtctggtcatcttgcatgacataaatgaggattgttctttctgatcaagaactaaatgtccaactttaagtacttgcactcattggtatcatggccaaaattgttgtgaaattggaaaatttagaggtgttcctcttactcatttctttccttatgggaggaggcttcttgtatggaagtatggactatgtagccacacagagtgttttaagagtttctgttaggagggtgaagcatgtaaagctcctttccttctcttttgagtcttgtggcatgggagaattattaaatctctcctttggccttttgcttggccagaattattgttgacatgcttgcctctattattttgacctttggagggctggccgcctatgctggcaggtgtgttgggcagaactgagggttgtccaccactcaagactggtctagcacttgcatgtctcccacttggggcttgtcaaacaacttcctcaagcttgacaaagccttctgcctgatcaaggaaatcagccatgttttgagttgagtgttggtggatctccttccacaactcactcaaaggtagaataccactcatgatggttgtgtaccttcctccgtacatcagattcttgaccttggtagctcagttatgaatttttggagatagtctttcagaggttcccctagcctctgtttgacctccaataagtcttctagcctataaagtatttgtctggaagacaagaactgtgtgtaaaactctcttgtgaaagagttctacaaatcgaactttccagcaacaagtttgaaaaaccactgttgttcagtttcaaacaaggttgccgggaagatttggcaatggtatcaacctcaacattttacaaatccatctggatttcaaactatatgatgtgagccaagggatcttttt

SEQ ID NO: 24549 - DNA, 1778 bp, Cannabis sativa
attcagagtaatttactacttgttacatgtacaaaaaaatataataaaaagaaaactaagccaatagttatatactttaaaataaaaatataaatataaataccatttatataagattgaataatctaaaaattagctaagatcaatgttacaatgaaaagtaacaaaactgtctcaatgtttccaccggccattggcgagtgttgttcccacatggtcttgcagctccttactaacccaaccaataccatgtgctctaataaatacttgccataaaaaagaagtctccaatcatatttacatttatatgtaccctcttccaattttttaaatcatatattaatacacattaatagacacatcgatttgttaaaaaattagaagaaataaactaatttaaaagaataaataaacatatttgtgtttggatgagcaaggtttatatggatattcttttagtttaatatattatttgattattatatcaaccttatattagtcgatcgattcaaacaattggtccttctttctcgaatagacatctttatatattacagaaatgttagtgcttatatatggatattcttagtgtaatataattggccaagtgaactagctttaagtggttaaaatcattcgatagacattaatatgtgtcaaataaaataatatgcaataatcttatttgaaaatttgatttttttttattgtcacatacttataaaactaaaattatataagttgacgcattagagtaatatattaattttaattacaaatatcattacttaaatagataaaactacaaacatgtaatatgtaatatatcaatggtatattatcaaattataaataatttctcatcgttattatgatttttaattcagtataaattaatggaacaaaataaaagatttgaaagtatccccattttaatattaaataatatcaaataaatccatattttaaataattgtgaaaatccataattaactaataaacatgaaatattgtgactactttttaattccaaaatattgagaatgagaaaaatactatttcacactaacttatatatctttttttaattctgttcactgagctccgtaattaggcgagagattagtacaaaaatagcgttcatgtattcctacccttgtaacaaatttagattattctttggctacaaattggtacaattcctctaccttagctctatctttaacctttttttttaaaggtatatattttttccaccacagcttttagggaaggagatgtcagtacgtgaggtcatatagcagtgggacattggtcgagcttatctgtttcttagtacatatgtttttcactaaatcatctgtacccttgtagcttaagcttaagccacatgtaatgaagttcttttattaaaaaagctaaatattaccaattatatggtactaattatagcattatatattatgattgcaatattaatatatatttgtatgatatatatgatcaaatcatcatggtataaattaaattgcaatgagccagaattatgacatgataatcataattataagtggggtcctaagatttgactgtaataccgcgttatgtgatatgatgagtgagagttatatacactgtctcaccacagttccctatttaataattaagtacaaagacacacacatatatacatcgatcgatccctatcgatcatcactttcattatcagcatcaataatcaatccccatcttccaatagacatgcgtctttatgcagt

SEQ ID NO: 24550 - DNA, 2217 bp, Cannabis sativa
agagccatggaattaattaccagcttttaattcttttagttattaactactactttgctaaggagactttttaaggagacttttttttttttttttcttttctctttttctttttaatccagtgaaatgctttcatgtttgacataataattaaaaaattattttttgtttttaaaaacaaaaaattattttttttgttaaacaattaggatggtttagtcttgttttttgaaaacatattttagaaaataaaattacaaaaaataagaattttaggaataataaaatgttgtttttttgttttaaacaattcactttttcaatattgcttttagaaaacattaatcaaatgtgacttatgttttgaaaattttaaaaattaatttttgttttcatttttaaaaacattttttatgaaaacaaaaaagaaaaaacaatatcaaatatacccgtaatgttttaagctatatttagatatggaaaatgtaaaggcacttgagctgccaaacatcacaaacatcacaaagtgacgtattgttatttgtgtattttaatatgaggtttcacacataatttttttaatgaaaaatatgaaaaaacactaaccaattataatgagacacagtggccgatctagatttaagttaaggggagcaatactttttttttttttttttgtaagtgaggggacgtctttgtttcctacattgtataacatattaaaaattaatgtaaatttatattttagtattaaatgtagtataaaataaataaaaataacaataaaagtattgtattcaataattaagacaccaaatacaagtttttattagtagatgttcaaaaaataaaattcaaatgcttaagtaaatataattttattgggattagaactcataacctctatgtggatgaaatagctttaccattatgtcaaagcttgtgttatattaataaatattactttatttataaatatacattgtaactagctaaaatgcatatatatttttttttcagattatttatttatttatttatttttcaattttaagttacctaatactcttttgggtatagttataattaggtttatttatactgcatgccctaaactatataggttttggctagttagtcctcaaactttattttttgacaaattggttctcaaactatatacattttggcaagtttatcgccaaactttattttttggtaaattaatctacaaacttttattttattagcaatattaagtccttactcttagatattgatatttttatttattttacttactttaatttattttttttgtgttagatttaaataattttatttttttaattttaatactttgataaaataattatattaatatattcatttattattttatttttttaagtattgatataatatttcattttttaccaaaatatttaaaatgtgctttatttatatattatttaaattttacatcaacgctggtaaaattttatgagtttcccagtgagtataagttaaaaataaattttataatataatttacttggtagtttataaaaaaaaatattttggtcacaaaataatattttgctacatatgtaaatagatttcatattaaattcttttatatatttaagaaatgatcctcctctaatagtaggaaaaacaattagagaatttaaatatttttattgacttatttgtagttgtgtagctatttgatgagaaggaatatttgcttgaagtggaaatgaattatttggtactagaaatattttgtgcaagtgttgttcataaaaagataaattattggttcacatgtttatatagttttgtaatattcaaaatatatcttgatttgttttttaatcttattttggcatattttaaaaaaaatatatataattaaaaaatatgtagtttttttttttaattttataaggtgtatcaatataaaaaatttataaatatttaaaattaatacgaaactaactaaacaaataaaataccaacaattaagagtgagaattttatatgttttgaagaaaataaaagtttgggaactaatttaccaaaaaataaaatttaggaaccaacttgcgaaaacttatatattttatacaaataaaccttatgttatacccatttacttttttatgtgggaaataaatatttcaattgggcaaaatagagtgaaatagtaaa

SEQ ID NO: 24551 - DNA, 2345 bp, Cannabis sativa
attaagtatagttaattaccaactctccataagaaccttatcctggttcatgagacaaagaggagcaatggagactccatcttcattcttcgtcagatatttactcaccggagccaacccataaagcctctccaccttcccttcctcttccgccgtctcacgctcacgcagcgagtacgtcaccacgttgtagctagccaacagtctcagcatccggtccagcatcaccggggcgtctgggttctgagtcggaagctgttgagctatgtcggaaggtgagagaaacgcgcctggaccggccttggctatgatctccaagaggtcgagctccaaagctgctttgagaaccatgggtaagactgaggcactggctaattgcatggcgaagagattggcttcttcgtcggatatttgggttggggtcatttgggtctctattcctgttgaacccatttttatcttattattattatttcaatttcagatctctatatatatatatatgtatatagaaaaatggagaagaagaagaagaaaggtaaagttaagagtgtggtgtggtttagaattgggcattatatatatagtggaattatttttgtgttgtagttgataatgatgatgatcatcattattgtcaaatttgattttgattggctatatgggatgtggacccactcttatatatatatatataggtgtatttatatctcagcatttggaccctgtgcccactgccttatgataagtataataatgtatctaataattttttacgtgttaatattgctattggtttacttaagtatcggatttcatataatttaatataataatttttaaaagagtatcgttagtcaatcccaacgcgatatgtcgagaaagtaataggtaccactagtgtctaatagcaatgttcgtataataatttgtaattactaattagttactaatattttttaaaaagtatttttttagattatgtagaatttaatatttaattatattaataatcataagatagatagaaatgtgtttttaacaattgagggtgtatgtatatgtatggttggacactacattttgtttggtggtgtcactcttctttgtattattggttatcttattatctttaaatcattactctattgtcttcaagaacaattgttttaggttttaatgactattaattattaaatgtttttgagtaagtctttctacctcctatttagatatttatttgctttttattgtttttataattaggtatgttgtagttatttaggattatttttaaattttttaaatagtctataatactaaaaataaggtttaaattaatttattagagatataattattttatcttatatgtattactgtaaattatttgaaatttttttaaaacaaatgatcataaaaaactacaatataaacaattacatatatttgaaaaactctaacttaaaaatcgaaacaaataaaaatgtactgaaatatttgttttagaatactataaatatatatatataaattaattttcttaatatataaatttttaattattagttggtagtattttataataatattttagtggtttgaaaagatcatgattgatttttgtttatctcttgtatttgtttatttaagtgatgattaacaataataacaagaggaattgttgggggttaggatcaccttcacaaagagatgaagagggagaaaattaaattagcatatatgaagaaattctagaatataatattatattttgtgcttgagaaattatatgtatatatatgtgtactagaaattctagaatatattatattttgtgattggtcacatagtataaaaattattatatatataatcttaatacttatttatcaaaagatcgatcaaccaccatacaaaaatcaactttaaattataatcaaaacaaaatgacaaaaataaatatatatatccttcttgtaagtttgaattgtgatttgtaattaataaagaaagaaaaatcatatgtatatatatgtgattaaatgtcataattttcttcttcttcatgaacttcaactatatttagtgatattattatagctttagctaacgtctttttttgacttatatagcataatcatactcatgcatacacacccatgaaaatgacctatgtaatatatgtaacacatatattagtgtttagtgactacttttcttataagttatagctcattatacaattattttgttatgataaaaaaatgtaattagctctatatgtacttttctttaaaaatatttttgaaaaattttacaatggacccattaaaagagaagca

SEQ ID NO: 24552 - DNA, 2963 bp, Cannabis sativa
accatagaattcaatctaaaagctaatgtgagaaaatggttgttgaacagtaaattttcaccggaaattctgtggaatttttgtcctagtaaaagagtaggtggtatgatggcatgttttgatgcatgaattgagttgcttgtgttgtttcaaagccactacattatttatgatgtctaatattttaaattatatagttttatttgattttgcttttgtgtattatcttgtagatactgttcaccctatgtctcctaaaggatccgaaaaaaactcagaggtatgtattgttttccttttcctattaaattatgctaagtgctatgcgtatttatgatttcaagatgtctatgagacaaaaaatgaatttgtctttagaggcatcttggcaatgggattgaagcctgcatttttccttgttttatcttgtggggaagggatttttcattttttgtcagtgtgtgtgtggaactttagtattatgttgttgggttctgtaattgtatttatttctttttcgccaagagggatacccgtgctaaaatcaatctataagattaattattttgtattttgttggttaaatcttttatgcattcaagctacagctctatgtttatgtttatggtattcctaagtttttgtttgtagtaaagctaatgtcagaaaacttgctctgtttttctttccttttgctcgttatatgggcatatgtatacagtaaggaatgtgttttcttctggttttcttgtgcctttctccaatcacctggccactgttttcgcccatttcttttctttgccttctggctatgatctaactttttagtggctctgtacttttcagaaccgaataagaggctaatcgggtcatcttttattactcaggctctcaggctcctaacatggctcatcaatatgcccttgctccatgtttctttttatcttgtaggaatatcacctactctgtctttatcaccttgggtgtctatgttgtaagtcagcttttagaaatcattttaaaaatattccatgcaaagtcattactgttgcattcttgtcaaaaacctcggggccactgcgaggtctcccagttgaactcccacggccaaaaattcaaacataaaaaaaaaaagaaaaaatattgttgtagtcttgtttgtcttcttgccaaccatgttgagcatgatttgttccacttattgtacttgagtggtaagccactaatgttataaaaatttatctggacaatggtttagccgatgatgcatatgatatgggttaagaatttttataaacatgttgaaattagttggagagacacgagtaagttcagtaacactggtattaaattattaatttaacatttccaatccacatggcaagtttgtttacctgtatctaatgtgaatatttctctcggtgacatgtatgtataaaatcaaggttttggtttcttgtctgttgtgattatctctcattttagttggagtgatgattcaagcttacaaagtttagctgcattttccacatgaaatatgtatgctttgtttattactttttcttttccctggctaattacaaatacgtaacgtgtctaaagtattgatatttgttctctctccctttaatagttgtctactgacaagtttcaagacgtcaatactaaagttcacgaggagtatcatattggtgagtccactacacttactgatttgcagatagaaagttagttttgttgcatcgatttacaaataaaagctttctttgcccccattttgtagatactacacttactgataaagcttgcaactttgattatggaaactgcaaagaaatgggaactggtggagtagaaaaccaattccaaggtttccatagaagcggctctggtaataagatggtggacttatcctctacaaatactcctgttttagaatatggaaacaaccatcattcttctttgcttgaccaaggcagagccaaagaattacacgatacctataacatgtctggacgagaaccatttatggaaaagagttggccgaagaaagataacttgtatgatttttcagactatgcggagttggatagtagtatgaaccttgtgaaagttgaggcaacttctaatgtaaatgaaggcgaaactacattctcatcccttgtcgtgtactctggaagtgtcactggccatgtaacaagactgttgcatgacgaaaggagttcagaaaaccagcaaatgaagaggaagagggtagatggctgtgaatctttgaagacctccacttctgcagttaaagttgaaatgtgttccttagacgaaggagatcaagcaggacttctagtctcaccaaagagagcaagaaagccacctaagagatatattgaggaatctctgaattacgattcaagatctcatcatagaaaatgtgggataggcagaaagttgaaggataggattctgcatgatgggtatcaaaagtacaagtggcatcagaaggaatttcatgcagaagtatttgaagatgattctttcaatggagggtgcattcaagttcctttcggtcttccgatggaaaaagagcactcgaagaaaaataaatacattctggtatgtacaactataatttcttgtaaggttcttgtgttgagttgtatgtagagatatccaacatcacaaagccacaatttgaatatcctagcctcaaaatggtcatttgtacaataaattcagtagcttttactagaactatttctcatgccgcactctccctttaatctcttttctttgcaaatgccgtggatttcttgtatgctgtgttaataggctattggtatttaggttacaaggatctgttttccaagtgctatagttgttcagttgttactgtatcgaatgtttttttttctgttagtattaaatgccttttttgctctaaactctaattgttgctccagggctct

SEQ ID NO: 24553 - DNA, 3060 bp, Cannabis sativa
ataaagtccaaattccttgagcccgtggacaccaaaaattgcatgtgaatttgaatcactctcataaccacaaatagtatagttgttatgaggaacaaccttacgccgaaataagccaccattcgagggtagaatctcatggaaatctcgccatgcaaaataaagaattttccgcgaaatttttaaaccccaaaattttctccaccatattgagaacacctcactagaagaccttacttgccaaccaacttgagcaagatatttaattctactcaatgataagtttgagaaagggatataactctattcaacgctcaaaacttaagcaagagatttcgaaactccataaaagtttcaaattaaagcaagagataaactctactctgaattaaaaaaaacttaagcaaaaagttttagaccttgtaaaagtcccaaaatcgagcaagagacataactttactcgagtaccgcatgagatattagatataactcaacttacattctagggagaagccatgtgctttaaaaactccacatatataagtccaaggacattcttcatgccctgcacacctcttcacaacaattaatgatattgttcgtgctaatgcacacatctctaaagagaagtaacattcatgcactccgcaaaaaagtattttttgtgcaagcctaggaaaaagtgcaaaagtattgcttgaaggcttacaagtaaatacttttgggggcaaatattattcccaatttttgcaaaaaaataagatgaccactcttgcacaggggcccacaagccaagagtaccttgaagacactcaagtcaaccaagcaactttgactaagatttacaaaggctaaataagttaagatatcctatttgagggtcccatgacacctctaggaaacttatgagaatattaactaaccatttggtgctgggaccacacccaagtgtgcccaacctagggtttatggacttgcgcaaggattttcatcctaaagaccccaatccgacaaggaaactaataaggacataatttattttggcataaaaggctagatgttgagcataaagtcaagattgcacaaggaggccactccacaatgcatgaccgacctatgccatcttttggcacaaaaagatggcacatgtctctactctcaaaccaccaaaagaaacttgtcaaatgtagtccttcaacaccaaggagtataacacaagtgaaagaaactatttttcactcaataatcaagctagccaacctatgccatctttgtgcacaaacaagtggcacaggtcgaccacaccaaatgggaaagatattcttttccaaaagtactttttcatcattaagacatcaaaaccaagtaagggaggccaccaggtggtgtagaaaccacctagctgacatgtgctatctttgtgcactagaaagtggcacaattcgaccacatcaaatggggaagagtttttttggccaaagtatatttccaacataaaggtaccaaaacacaagtgagaaaagtcaccaagaggtgtaaaacacctatggtcgacttgtgccatctttgtgacttaaaagatggcacaggtctctcccaccaattggccaagaactaatgtgaacaaagtggttttctagcatccatatgaccaaactaagcaagaaataccatcaaaggcttctcataagacctgactgacgtgtgccatcttttggcacgaaaagatggcacaagtctctcaatagggtttcagacgttgacatgaggttgtgggatcctataacccccaaaaatatgaatcaccataaaaaataagtaaaaacacacccaaagttgttcaacaacatgcatggctgacctgtgccataatgaggtggcataactcgcaatgacatggcactagtgagatttagagctaaaatgtacttacaacccttcagtaggcataactcactcaatttttatccaaatgacttggttcaaatttatttgaaagatatttttaagaagggtctaagtatttctcatagtgatagcatatataattatgaagttatcaggctcaaaatgggctacaagacaggcgggcacactttactcgggaattaattagtttttctaagtgtggaccgcaaggggttgatgagagagctatgtcacaacacttgtgactctctacttttcttatccaaggtgtgtcatcccatggtaacttttctccaattttgtcattcccaaagcacaacgccacacaagtgatttcaagagacaagggaaatgaccactttcacaacaatcccaatgattgtggatatttgcctatgagtatgggatatttccatatatctttatttatttatattttgtattcattattttggagtcagatacgagatttaaagcaagatacctcgacttgtaggggatcactaacaaaccctaagcctatatatagattatgataggctagggtttagggaccgcttctgagacttctaatttacttggccacattatcacttgttcctcaaaacctttttctctcttcatctttttcttggtattcttcatattggtacgacatcaagtctttattattatatcacccttgaaatatacatttaccaagaagaagagatcgttttctattcttgtctttattggcttattgttcttaaaaaaattacaaccaccattattatcaaattatgggtattgggtagccctattaccatagcaacatgggagtgagctactataaatctctggtgttctttcttattttttgcgattttatttagctaaattaattcaacatagtctttttattttatacaatcttttcagatcagttaacaaaaaaaaaaaaaaatacgtcaacaccatactttgttttaacacctttgccactacttgtatgtctcctacatctagattttacatagttaaattggaattgcaatgtgaacactatcaacattaatgcatgtttacttaaaaggaatgagaattcttagagaaaaaaaaaatgagaattaattgtatatattaattttc

SEQ ID NO: 24554 - DNA, 2053 bp, Cannabis sativa
ttaaaaatcctcaatggttcaagtctatgcaacattaatttgcttctttgaaaaaggtagacacgtggactcttgggccctacacttctggaatggcagtaattgggaacaaatggctacataaggtgaaacttaatgctgatggcaatttggatagactcaaatctcgtcttgttgctaaaggttacttgcaaacacttggcatagactatgaagaaatattctctccagttgtcgagcctgcaactgtaagagttatacttactctagatgtgtcccttaacttaactggatagttgaacagttagataaaagtaatacttttctaaataaaacattaatgagagagtgtttatgaagcaaccagaagggtttgtggatgcttccaagcctaatcatatttctttattacataaagctctatatggcctaaaatatactcgtagggcctggaatcaaactctcaaagacacttacattcaatggggattttgtgcatcatagtcaaatacctctctattcacttgcagaaggtgaacctcctaaagataaaacattatacatagttagttgcacattgggagcattgtaatatcttactctaaccaaacctgatgttgcattcatcatcaataagttcagccagttcatccatggtcccacttctggacattgggaggcttacaaacgattaataaggtatctcaaaggaacaattcagtgtggtcttcatttttctcgagtttccagcttaactcttgaaggctattttgatgcagattgagcatcataaaagaagtgctagtggctatgtaatgtttggaggcaatcttgtctcatgatctgtaaagaaacaacaagtagtgacatgatctagctcagaaagtgaattcagggcacttgctaatgctaatgcagaaattaaatgacttgtatctcttcaatctgcatttcacattcacccaattcaatgtccaatcttgtgggtggacaatcaaagtgttgctgctactgcagctaatctagtgttccatgctcgatcaaacatattgagattgactcgcattttgttcaagaccttcaactgtccaaggagttgtctatccaatatgtacctgctttttgaccaagttacaaatgcacttaccaaatcacttttgacagaaagatacacttatttcaggtccaaactcaagatgtctactacatcattttgtttgaggggatatgctaaccaacttctagtgtaactaacaaattagttagattgttctattagttagttagattgggtagtgttttgttattttctttcgtttcttgattgtacttggtctcagtttatgaataaaggcctatacttactcagtcgagtaatgcattcattcatagctctgtttcttcttcatttctcttctttgctttctagcacaacttagattcttttactttacaatattcaaaacaaactagtcaattctatctaaaaaaaacaagcaaacaaactaactaactaatgagttgtattttattagggtttagttaaatatttattttgagtatccataaagaagggaggaatagaaattctagattggatgtacgttcactaaacagtcatcataatcaaaataaattaataaaaaaaatatagtaaaataaatgagatataatcgaaattaatatttataatatgttgtctattaaaatagtttgaagacaaattataattatcaataaatattattaaaatacttaaattcaccaaattatctttttaaatataatataaaataattgtttgtaagatatatttgaaaaaataaaattgtcatttgatatttttactttaaaaaataaattaaaataaattgaagtgaggtgactatccttatggcattctttaaaaaaaatcgagagagagattcttttagccttaagccactaaggctaggcctaggggtgggcatccgatccaatccaaccttttttccctcatccgatccaatccaattagtaattggatttggaaaatcatcatccgatccaatcc

SEQ ID NO: 24555 - DNA, 2320 bp, Cannabis sativa
ctccaaatcggtcagacccacgcagattaaatgggtcaaaatgacccaatttgctagagaagatgacgtgacacgtcgtttccaatattgttccatccatacgactttttgttttagggaatggtgtatattttgttgggcaaacgaatcgtcgttttctaagagcagattttcaaataataataataataataatatgttaaattaaattctcttaatttaccctacagacaattatgtggatttaatttaatatttttatgataaagtataaaattttgaaacttttataaaataatgaaatgtttaacacatttcattgaaataaaaatattaaacgtgaaggttttttataaactgtttaataaaatttattataatctacatctaaatctaatcttattaaattaaaactttaattaacaagtaatttttgtttaataatttctacaatacaagtataaattttcaaaatttattataaggattactaaatgatgtataaatttttattgtacaattgagaaaaataaaccacattttattaccactaataaattttcaatttgttttgaatgacttcattctaatatagttaatatatattatttacaatagtaaattattttaaattgttattctacattcataatttcttggtatacaaataaacttaaagaagtcaccttgagcaaatcttatccacagacaaaatgatgatcccacatttagaaacttcagaaacaaccaatatagtagtgattttattttaaaattatcaaatatgctcacacacatatttaaaggtctttacaacattaatttgtaaaataatgtcattcataaaaagcatgggttcattgccaaatacatacgcatggcacactcaaataatggtgtgtgacaggtttaagaaactaaaaattattagacataaggtggagcctactaaactccaaatttttctaaatctttgtcggttgatacgtttcaacggtagtttttaaatataaagttatttctcaaacatattttgagttgtgataaagttggaaaccgactatatgacatgtacaaattttaaatatacgtgtatatatacaattagagtacaattgtaaaagaaaatatctgggccctgtaggaatttcttggtgtgaatttccaagtttgccctacaccaactcaagcaacttgttaaaacgacagggacaaagcaacttcttcaaaagtaccatatgcatcataaatatcatcagcaattgaggaaaaagctatgattttggctaaaatatttcttgccaaagagtattggggttcataatagactcctaacatccaaagatagagctccacaattctatctcttgcaaaagggaatttttgtacaaagtttgattctttccaccacctaataattacatatatatatatataaattaataaaaataaaatttatactcctcaactatatacttgtaggattttgctcgatcaattaattattatttttatttttttgttcgaactatggaggtaattgcaaattttctctttcgattctattttgctcatttttaagataatttattaatgtacatcgagctacatgtataattatagtacaaggatttattcaactaatttaagctagctaaaatcagttataataattttaaatattgaaacattaactggataagattatgaattaatacaaccccagatttgataattagattagtactatgatctatgcaattattattttttttttctaagctttcaaattacattaaattagctttggatcactggtcttattacatcagaaaaatgtgtggcaaaatgagctaaatgcaaacgaaaggcgcaaatttgtaattatgatagaaaaatcatataagtgtcataatttgagaagtaaaaattctatttatttttaattaaaaaaaatatgcttaattagaattaaaatatatattatatatacctgctgatttcactaagctcctctttgtgcatggattgtaatagattgaaatctagctttgcaagttgtagcaatactttattatgtgaggcatctttttcatacgtcgaaataaaatgcttagcatgaagatttactagggtctttcttaagggtctctctagggcttgagatatttcttttgacaagaaatcatcgtcatcatagtgatcttttgtctttgccaaaaactcaatcaagtgtgttgttgtgaaagcaagtgcttcatcaagtatattttctacaacacaactcaaatgtgaagcttcatataggctaagcaaacca

SEQ ID NO: 24556 - DNA, 2063 bp, Cannabis sativa
cataaaccaagaatttcagttatatagacacactttatttagaatagatatatattaattcaagtgttatttattttattattgtctatatttttgtaatgtagctcagccttgtttttaagtaagatagcttcaactatatagctattttctgctatggaataccaacaatcaaacatagttccattgccaaacccaaatggatgctaattaattagctcttgcttttgtttttatgattcgtataaatataagtgtttaatttctttcaggtatctttttaagtatatttttgggttaacctttttttagttgttgttgcataaaattgactcttaaataattgtgctgattagcaaaatcttcaacttacttatgttattatcttttacctatatttggtgaaatcaccaccacatgttgatcttcagaaattattttgtaagtaattggtattaggtaaactaaaggtgttgaacaccacgacacatgaaaaacgtaattattttaattattaaaaaagtaattgcactaacacttttatttactagacactcgcactttagattccttttctcacacacttgaattctcttgctcaaacttacatcttaagtacacacttcacttctatttataagctacaaataatgtatttaaatatttctagattttgcttatttactgactatttaattacaactcctcttcataaaactctaaaaccatatccagaagttatagtcaaacacttgtcttcatcttcttttcataattaatgcacctgttaatctctcacacaaataataaaatcaaaatcagatggccataattaaagatcatcaccaacaaaatgtgcagacattttgctagaaaccaccctttgaaacaaaatttatgttttatacaaaaaaaaaattattgccagttctccaagatgagatctccaaaaatgaatctgcaaatacataagaagattaaacacattaaggatcaatattttaataataattatacttatattttgtaataaaaaagaagacaaaatttactaaccatctagctttgaaggtatgtcttcaatttagaaattctaatgttaatcaccacataaaccaatctccaaattgattaaaacaccccaaacacaagcaagcatccaataagaatgagtttcgatacaaagctccacaaactccaataaaaccgagagcaattccaacttcgattccaacgtaaaaccatgacatgtcaaaccatctttgatcatcaaaatctaaatcatgagggtcatcacccttgaaaactggacgaactagttcgcattcagccaaaagaggaagtccacataatttatcgtttccaacatatgaagaagcatcgaaactttgtaattgagtacctgtggggatacttcctgacaaatgattatacgaaaggtccaagtattgcaagaaagatacttcccccaagccaataggaattttgccagtaaaactgttgtgggagaaatcaagtgcttctagtttacttaagttgccaatattctctggtatgcatccactcaaattattccttgacaagttcaattgaactaattccacaagatttgtaagctccatgggaatatctccaatcaatctattactcgaaaggtcaatgattctcaataatcccaaatattcttggaatgtatattcctttcctttccaagttaccaatgcattaattaaatatcgaagtgaagagagaaggtcattatgatagattactgcattgacgaaatgagaaattacagataattcgaccatagttcatgtatattattatgggacatatctaatatttgtataggctgaagatgacatagagttgatggtattgatccatggaaattgtaggatttttcttggtgaaattccaagtttaacctacaccaactcaaattcacagtcaaaaacgacaaggacaaaattgtcctagaaaaatcaattagaacaattaattcacacgacaaagaaaactcagtcgttttcacttgcacgacaatggaacttgtcgtt

SEQ ID NO: 24557 - DNA, 4418 bp, Cannabis sativa
ttttcaccttttttttttttttttgtctgagaagagcgcgtaatggaaaatggtggttaccacttactatagaaataccctttttccatctatatatactttcactccctacttagtacttttttattttattacagaggaaatggttgatgaacatccgcgctaacaggtgtgtcctatataattttgttttgatattattttttctatttaggagttaattttatatacgatcaactacatagaatcataagaatacttttttgtcttttttcgtttgatatgagagatgacatgctgaattaaccaaagtttacttctagcttcctatatataccattgcagcactacaacttgtaggctgaaatcaattcaaatcaagttacattagctacatttttatgtcaggtacaatcagatatgtacaaaccattcacaaatagctttgctcaaaatattttccatcttcacaaataaaatgttctcatttaaatatttaaataggtacatattagtgatcacaaaaatatttttgctgtttttagacatatacaaaaaaagtcaatcatccttttcatagacaaacaggatagtagtctctcctattttttaacattttcacacaaaaaggtgaggggaggggagagaaaaagttatttcatatcatctcctttcaattcattattaaatatatttgcttaagaagagttgtagaagagagcatataggagaactattattgtggaggacccaagttttataatttctttaagttttgatttaaggtgtgtatgacttttctatttgtcaaagtttgtatatagagagacagtgagagaaaggtttgagttatctatttagcaaaaaatttaataaagagacagatttgttaatttttttttctatgtttgtttacatagtatagctttatatatatatatatatataagaattaagatttagttaaagtaggtcaaaagtttacatgttttaatttttctggtagctcttctaatattactatttactgtttttgtcacttcttttactttgtatgtatctttactctttagtgatgatcattatgaatgcctagatcaatatttcattgtaagtactcttcatcatcaaacaatttgaatttttttttttttttgttgattaaagattttattttagatatactttagtcaattcccctatagaattcttgtccattcggcaaaggaagttgatacaaaaggtcttttatctctttcaaatttattgtggtcttttttgattatatagtttgtttcttagttgctcttcttatatatttgtggctatgagttactattttctatggcaaaaatatcatgtcctctaaatatatgattttagaatgaagcaaattatataagttactaaatagttattttttttattcaaaatctgaacagttatggatccatatatgtgatatagattggcatcacaagattgtagtgaataatatagagatatattgacaaatgacaatagtgagaagaaaactcgaggtcctacacaaatgcgtgaaatctggggaaaccgtgatggtaggaagataaaaatcacatgtaatgatttaggacagccccatgacaaaaatgcagacatgctttcaagctttatttcattagtaagagatggaaaaaatgctccaattaattataaaaattggcataaggtacccgttaaatacaaatgtggaatgtgaaaaatcttacacgtattaatcattatttaattagaagtttaaattacacatttatctatttttcaatatgtatcatcttttatcattacttaaatttgttaataatcaatgttttattgttgtaggaaaaatttgagattcctctcgatgctaagatttgaactttcagaatgtttggtaagaaacttagagagtggaaatgtttcttaaaaacacttattatttggagcacttatcatttgaggagcaaaaaaagtataaagataagagtgtatgatgatcaataggaagaactgatcaagtattgagctacagaaaaagcaaaggtacttttttgttcaaatttaaattaacttgcactggtgtactatcttttcacaaaaaaaaattattaattatattgtaccttttaataatgttctagagcaaaagtgcttaaaaaaagagtagtcgtgcaacaaaacaatataatcatacaactggcagaaagagtttcacacaacttaaaacattacaggtaaaatttaaaaagtattttaacaatagtagttgaatattgtttcacattaggtatgatttggttgtttttctaattaagtaattttttgtagaaagcgggtggtgcgagtacaccaacacgtgtaactatgttcaaaatttgttatgcaaaaagaaagaagagtgttataaacgagaagacaaaagaggctatggtatgatcatccaaatatttttaaattatgtattatttcatgctagctagtttaatcttattttaattgatatgtttacaatgttaaattaatgatagttacaattacaagaaaaagaagaactgaatgaagatgcatcgaaagaaaaaagtatgaatgatacgttttctgaagtgatgggcagagaaaaacatggatcagtgcgcatgtttggattcggtgtttgcccatccgatgtgtggaaggataaatcaacttggaaaagaagtcaaaataagtatgtagatgctctagagtcaaaagtaaatgatttagaatctcaagttgaaaatcttaaagctatgttgaacaaccaaagcaatgacaatgacatacctactgcacaggttagaatactaattttttaataaattcaaatattaacccataatatgtactaactaaaattacttttatgtgtgcaggccttacaatttggtgacaatgccacatcttcaaatctggtttagttttattttattttgttattttttaatttactaacctatcaattatatatttattttgtgaatttattctatatataggacataaatgctattacctcacttaataaagaaactcgacgccaacttttgttttcatcttcagcatatgatactcctgtggttgaggtaattacttgctcggttcatataatgtatataaattttttctagctagcaaaagtattttagcaagtgatattttcatatgggttgcaagttgtaggaatgtaatgagattagtaaagcacatacttcatccactttcagcattcttccttaactaataatcagtgatttataattatctttatgcaggttggagaagtagtcaatattaagagtattactagtgagcctgaactaattgctattggtatcattcgtagcaaagattcatctaaaaaagttggaggggaagaacttggatcttttttgtgtgaagttactattacagttcccatcaagcctaatgaattgttgtttaaaccatatggaccttttaaaacaattagtgaagctgttggaaaatccattgcatggccaatagcatttgtggtaagttcaacatgagtttatcacttttgaataatattctattcattaaatatcattttaaatgtgtaaaaatatttacatgtttgctaatctcttgcagatttcacatgaatcagatactcaatttcatgactcaatgttgtaattttcttgctatatatactgctgtttgtatttcatgactcactttagaatttgttattggtgtttattttactctttgtaattgatgttgcacaatactgctgtttgtattttttttagtgtttattgaacaatactgttatactattgttgtttaagaactattaagactttattttgagatatgtattatttacaatatttattattagaatatatttgtttatcattatactagtataatatttgaaatgaatttttatatataatatttaaccaaaaatacaatgacgttaatttgaaaaaatgacataaaagaaaccagtaatatatttttaattatatataaaataataaataaatgacatttttgtaaatgtgagtaatataattgagaggcaattaaaattaattaaatatatatataaaaatattttagtgacatttttataattgtgagtaataatagttaattattttttaaatcactaaaatttattttaaatattttaaaattaataaaaaatatttattagtcacattttcaagtgtcattaaaattaaactatttagcaacatttaactttacctcacaactatttaataacatttgactttacctcacatgggcatatcccacatttcttacaaatgttacaaaatgtataaatgttactaaaattataaaatcgtgacatttttaagtgttattaaaac

SEQ ID NO: 24558 - DNA, 4509 bp, Cannabis sativa
tgaggagaagcaacttcgaaacgatgaggttaggaagtggctgttcaagcttcaagatgtcatctatcaagctgatgacttgctcgataggattgactatgaagctctaagatccgagctcgaagatgatcatcagtctagcagcagtagtgccagcaacgtacttagccagctgaaatctttgtcatttttcatgtctgaatttgataaatctgttaagcttgattccatggagatccttcggaagctgaagattctggttgatcaaaaggatgctcttggactaagagaattaggtgcactcaacaaaccttcaccaaggccgcttgctcctctggtggaggaatctgatgtttatgggagggatgctgaaaaacaactcattgttgatttgttactaacggatgatgttgatggtggtaataagatttctgtgatcccgattgtcgggatgggtggtgtgggcaaaaccactcttgcacaacttgtttatgatgatgaaagagttcaaagtcattttgaggtaaaagtatgggttactgtatcagatgagtttgagatttcaaagataacgaaagagatctatgaaggggtcactggcaacaaatgtgatactcagagctcagacgaattgattagaaggagattgaaggaagtattgaaggggaagaagtttctggtttgttcacgatgatgtgtggaacgagtcttattctttgtgggacagtttgaagagttcttttgagtctggagcaaatggaagtaagattcttgtgactacccgaagcaaaattgtggcctctactatggccactggacatattcatcatatacaaactttgttggatgatgattgttggcacttatttgtcaaacatgcatttggtaataattttgatgagaacaactttgaagagttgcaagcggttggaaaaaaagtagtgggcaagtgcaaaggtcttcccttggcaataaaatgccttggtggatttttgcgtggtgaacgaaatgctgaaaaatggaagaacgtactcaatagcgacacatggaacaatctgtacaaaaaggagggttccattcttccagctttatggttgagctatcgtcacttacctacacatctcaagcagtgctttgcatattgttccatatttcctaaagattatgaatttgaaaaagaaaatttgattttgttatggatggctgaaggttttcttccaatggatacaaaaagtaaaaagatggaggactttggaaaggaataccttgaagatctcttatcacggtccttctttcaacattcaagtagtaagacgaatggaccccgtctccaaatgcatgacctcgtacatgatttagccatacttgtatcaggtgacttttgttacagattagacttgagccgtgatttacttggcttttcaacaaatgttcgtcatgtgtcatgtcaggggagcaataacaaccttactagtttgagtaaagcttgttgtctgcgtacctttatagcattgtcattgcggacaccacttggacaagtctctccaaactactcggtcctctttgagatgttgcttacaaagggaagttgtttaagagtgctttctttgagcaatacttctttcgagaagttacctgattcaattggcaatctgatacatttaaggtatttggatttgtcttatactgacattgaagagttatctgattcgatttgtagtttgttcaatttacaaactttattgttgacatggtgtggaaacctttatcaattaccaaagagtatgagaaaattgaccaagttgcgttacttagatattgaaggtgtacctttgaaagagatgccacaaggaatcaatgagatgaaatacttgcaaatcttaccaaaggtattattgagtgtcaagcataatgatgatgggtttaaaattacagagttagcaaatgctgaacatctacgtggagagcttaagatttctggtctggaaaatattaatgatgcgaaggaggcttcaaaagctaatttaaagggtaagaaggaccttaagcaactaactttgagttgggacaatgatgttgatggggttgatagttcggaagaagaattagatgtacttgacgcacttcgaccccatacaaacatggaggatcttgtgattataaactatagaggcacaacattctcgaactggattagtgattgtgcattttctaatttagtatcaatctgtttgaaagattgtaaaagctgctggtttttgccaccactcggacgactaccttctctgaaagatctcacaattaaaggatgtgatagtgtgctgtcaataggtgattctgagatgcatcacagcagttatcctctattcatttgtttagaaagtttatttattcaagatatgttgatgtggaaagaatggtcatttggtaataaagccattcttgaggaaggtcaagtattacctcttctaaaatcgctttatgtgaataattgtcccaagcttaatgttgggttaccttgttatcttccatccttggagtatctccatattgagaattgtgaagaaatggaggttttggttccgagaactactcaacagactgtcacagcttcaccctttcttatggagatacatatatggtattgtccagtgttggagtcacttctagattggggatcacactccgaagtagagagtatttggttagggtacacagaagcactttttgagaaccttagtaaatgggatctgcagaaactctcatgtttgaaatccctatacatcattgggtgggaagatgaatcgtttcctgaggaaggggtccttcctatcactcttgaggaacttgacatcagtttttgtagcaaccttgagaccctaaacgggaaggcctttcaacaactcacatcccttcagacattggatatttataattgtccaaggctgcggtgtttgccagaagaagggctgcctacatctcttactcgtttagatatagaccattgtcctttggtagagcaacggtgtgagaaagagaaaggagaagattggtctaaaattcaacacatcccacgagtgttcgtatgattaaaattatcaattaaatggtatgtttaggtaatttgtaaacaataagggtacattaaaatcacttttatttatggtcacactaatcatcaatgatcaaattcattattttcagttttctaactgagtgcatgtgcagagttgatgatgatcgaagccaaaactttctttctaaaatccattgatgaattgtatgctggcttcaacagtgcaaattttatcaggtatcactcacaccactgatccatatatgatttaaattaaataatttatggaaatctcatatctctaatagtatttattctgttcttatctacgtaccttttgtttactctgattaatattaatatgtatatcaaacgggaaactattttaattagcaaatcttctatatatgtaaaagtattttcaaatggtagtaaaaaaataaaatgactatctttttttttttgagtacttgtaaaagaaagttgactactgtgtgtatcaaactaatacaaatttcatttaaataaaaaaaaaaaaactaatattggtttctaatttttaaaatattaattaatcattttgtataaacaaaacatgatgattaatataatatggtgccaacacattggagcagctcttggagtttcttgattcccaaagccaactccaaagcctctcttttccgttgcaaacgccttatagcttatgacactttataaagggcgctaggcaccataaatgctatttaacattttattataaaaatagataattattccacttaaattttatttctgacttcgccgctgatcataatcttttaatccgaaaatgttgtttgttatgtataattatagggtgatcaagttaagaaagatgtgaatttgtgggtggaaaaagagactaaaggttgatcaaacaaattttgtgcgagagagaaagattaggaacactactctgtgttgcaaatgcattatatttcaaaggagcatggcaagtttatttcaaggcctccaacactatagagcatgagttttaccttctcaacggaaaaacaacccgactacctttcatgaatgctcatcatgtttaccactcctactcctccaacgatcgtttcaaggctctcaaactcgaatatcaaagagacaagaaacagccagtaggagacctcttaataagcctcctccgctgcctaccgttgaaaccaatcatccatttatgtttatgatgattgttgaagagtcgtctcagcttgttgtctgcactggaccacttgttcatccagaaagctaataattgaaaacccttttgctcttcttattatgattattattattataaacagaatttgtagtgtcgtttgtgtcattactgattgttaagggtatatgttctgtactgttaatgacagttattgtcgttagttgtt

SEQ ID NO: 24559 - DNA, 3559 bp, Cannabis sativa
  modified_base (757)..(763): a, c, t, g, unknown or other
ttgtaattggatattggatatccaacttttaataattgttgtaattgaattggattggatcggttcgattcaattgaatggggttggattataaatccagtaaaacacataatttagagagagagaggagacaaatcttttttttttatatatatatttttaattttacatctacattttatggcatctataataatagcgggattagtggataatgatggtggtagaaatttaattatgaatgataatgacaatatattatattcatatataataaacccaaatcactatggtgtattcatgtttcctattcctctagcagaagtaataaaagattatgggagagacctcttttctttctaccaatgtgcatttggggacaagacacctttataaattcgatcatttatttatttatttatttattcataatgatcaaagaagatatgttttgacaataatattaaaataataaaaagaataaccagaaaggcctagagttccagctgtcttgtgtatgaggtgtctccacatttgaaaataatataatataaacctaaaaaaaaaagtattgtggtgcatataatgtgatttaatgtgataaataagtaaatttgacaagattatctcctatatttaatagatattaaattatatttagaataaaaaataattttatgatatttttatattaatttttattattatgctttattatataattataaattttttaataatttattaaaaaatatannnnnnnaataatacaaaaataaatataaaatttaataataataataatgtaaattatttaatacaaaagagcatgttaattaaaatttaataataaaatattaaaaatgacataatataaatataaaaatataacatttattgtgatgtaaattttatatcatgttatattgtgatctaaatttaaattactttttgttatgtgacatatttacatcacaatttggcataccattagagtaaattttaacaaagtgaactatattttacatttgcattttcattaaagatgctctaacatcatctaaattttatatcataatgaatattactttataatttactattttacccctaattaatattattaataattttttatatttttctttatacattgatgtagtttttatatataaaaatctaacgtttttgttgattttacacttttatattaaaataaaatttattttactcttaatatatttgtgcacaatcataaaagggaaatttacaacaatatatacattataaaactttattacattatatgtgcaaatttttttattaaattgtacattttctgaactatgagaaacatactcttatatttatatataaatttatatatactaatttaatttaatagcattgttattaattgactatcttctcataattgtatcatatatttaatgatataagtatcacaattttattttattgtgttattaatagattaattttggtaattattgttcaattataaattcaatctctctcggaatggctccagcagaattatgaaattgtctggcaagtaccattgggtacgaatagccagaactttgtctgtatcttgtcgcttttttaggttgctcacctcttgtctcttctgtggaggtgatctcaagtgacagttgggggaggtgacaactacgtcgatagagattcagttggtctttccttcgtggactagtatccagtccattcctctagtagcttcttgagtgatcttgaggctagtagtggtccattatggcaaggatcaaacagacatgctccagggcacatccttacgaccctcacattgctaggctggcaaacagaggtagagccagtatagtttaggaggctgcacaacctctagatggtagagagccaaaggttggccaggcagatgcgcctgtggctgaccaggatgcggagagcttagatagtgagtttgaggttgaggagattgtacctgtcaagaagagacagtacaagacatgttctattttcctctataacactctagtctcgtacgatgagggtgttcatccattgaataggcttggttagccttcagaggttggagtggaccatgttttaagggaggctgcgagcctcaggttcttgatcagggggagcagcgggatcggtggatctctcctccatacactatcagcaccaagacacttgacaagatcaaggagagtggagtagtgggagatgtccagtgtgaccagccattaagggaccaacgagagcatcagttggccctcagctggatgtcatagtcagagcgccacatagagcagggagcagtactgctcctactttagagacatcaccgcatacttcagagtgtgcacgtcttaaatcacctcgaaatgtataaagtacctttcagctatgttgattctctacgtcgagttaggctggcctcagccttccccttatgagataaggtacttctttgagttaaagtctatcttgaaacagaaccagacaagatacttctactttagctagatcggttatcaatggctgggagatactaacatcgcgcccttatcgaaggtatgaggatatgccaagaactattttattgcttgggaaatccagcaagttcctcatcaccactttcaaaaagtgccaagctataaacgttccatccccaccctctagatgcaggatagagctaatcatattttgtccctcccgattgataggaggatatattgaggccagcctgtctagctaactttcagagatatggtctatatcccccaaagtctggcattgtgggggttgagggcccatcaagaggtccagacggatccccagcagctgaggaggcttgcctaagaggtggacgtactcttcacatggatgacgatatccccctctctagaattgcaaagaacttggagagaagagaaaaagccttctaccaacacttggctcacggaggcattattgatgatgccacttttttcattaggcctagaggccagggttctgctaggtctgctcaccccttgcctacgtttagaggtaagggcaaggcggctactagtagttcagatgactcctcttccgaggatggtggtagttgatagttgatagcaccaacctttctacttttttcttgtattgaatattagtaacctgtactctaactttgttacttttttttttttttgcagatatggcttctaggctgagagatcttgctagaaagccctctggtagagctttaggtcgtcctagggccaaggtggcctagaccacccgacctagtgatgctacagggtcttcactacctccccctcctccgggtcctgcaacggctagtcagccggtgattgtcaatcttcaactaaggaagaccccatctccatgttggccttcaggcaagggcatccagaacagaaattaaaatcgagcccttatgtgaaaaataccattaacgttcagactaagctttaaaaagttccaaactcgatttctaactcaaaattacctcaaattcaac

SEQ ID NO: 24560 - DNA, 5686 bp, Cannabis sativa
tagggcacaaaacccaacaaaacatatctctaatattagtagtagtattgggagaaaaaagaatggatgatttatcaaaattaaccacttggcccgaggcttgagaataggtttgaagggctgaattcaagggtacacaagaagacggtgtagccatgcaaaagagaatactattatcagcaaacaaaagatgagtaagagaaggagcagtgcgagagctggcaatacccttgaaggctccttaccgctgagaggagtgaagaagtgcagagagtccttcagaatagagtataaaaaggtaaggagaaagagggtctccttgccttaaacctttggtaggaaagactttgccacaaacctccccattaacagaaaaggatatggtagcagtggttaggcacttcataatgttagaaacaaacttaacagggaaactaaaatggtacataagactttggagaaaaccccattcaaccctatcaaaagctttggacatatcaagcttaagggccgcccaacaaactttcccatgcatcctattgttaatggcatgaactatctcattagcaagaagtatgttatcaaagatgatacggccagagataaaagcactctgatggggggaaatgattttatccaaaaccacctttagacgatttgcaagaatcttagaaatgactttgtaaaaggtggtgcaaagactaataggcctaaaatccttgagagaatgagcacgttgctttttagggataagaacaatgagagtagagttaatcgttgcaaaatctgcgccattattaaggctatcaaggatagccttagtaaagtcagttcccaaaacagaccaatttttctggtaaaaataagcattaaggccgtcaagaccaactgctatatcaccagagatttgaaaaacacctctcttaacctcatccagagtaaaatcttgattgagaaaattgacatcaggctccgcgaacccaggattaagagaagcaaagatagcagaagcaacatcaacatcactaccttgagaagaaaaaaggttttgaaaataatcagttataagattgacaatcccctcatgagtattcacaacagagccatcctcagccttaagaaatttgatagtattcaatttccttctgaaggaggcatgcttatgaaaaaaatttagtatttttgtccccagcatttaaccatttaaccctagctcgttgtctccaatagacctcctctttataaagcagagtatctaaagcagacttaagatgactacgcttacgagactcctcaaaagtaagagcaatcttattttggagttgatctatttcaaaattaagctgggaaattctggtcttaaaaagagaagtatattttttactccaagacttgagatgattaacacaatgatgttgcttattaaggaaagactggaaaccagaggcagctataggaatagagttatcagaccaaacttctttgacaatagaataaaaatcagaatcttccaaccaggtattttcaaactgaaacctcttattgacaaaactaggaacagtatacgaattattatcaagaactagcttaagaactctatgatccgagccataaaaacctaagtagtgcaaagagttattaggaaagaggtcacaccaagactcagagacaacaacccaatctaacctttctttaacactagaattacaccaagtgaatttattaccaataaaaggaagaggaataagagaaaatttattaagaaactcagaaaaagaagaagaatgagaactagaaccaacacgacctccatatttatcactactaaacaaatagctattaaaatcatccatgataacccatggaagattaggggcattatgatatatcttatccaagagatcccaagtaaaacgcctagtacttccaccggggaaccataaaaataggtaaagtgccatatattattagagttaaaggagatattactatctatatgattaagggaatagtttaaaatatttacattacaattagctttccataataacattaagccacccccaaaagacaatctagggacttctaaccccaaatcaaaacccaaagaagtcttaaacctattaatagaatgaggcttaagtctagtttccatcaaaaaaagaaccaacggcctatgtactttgaccaaaagggaaagctggttgaatgctcgagagttccctagccctcgagcattccaactgataagagtcatttttctgggcgggtgtgcccaacatcacccacctgttcagatggtgaagttgtggaagcaggaacaaaatcattatctccagacctggctcgcttcagctgtgaacgaagagagccaccaacttggacttgatgagagtgaaaagtaggcctcttgacccttgaagcacaagcaagacctttccctttgaccctagtatcgggagcagcaccaggcccttccacattggttcctaggtcaagagaagggatggcatcagcaagtgaccttgcagccagcaggacctcaggatgctgaaatttagatgtatcagagacaatagtagaatccgttggtgcaatggtcatctggacagggacagggacagagccataaggtgaggcattaacgtactcagtaaaatgtgaggaaataggattggtgaggttcgtattaacaggagtaggaatcataaggacactagtggtaataggcgatcctaaaaacgaactaggtcctatagtagagtttaacagaccagtgaaagcatacgattgggccaagaatgggttcatcacccttggatcataaggaagagagtgcgatggcaactcagacatggtaaaggcaggaggatgaggataatcaaaaggcccaggcttatccattgatttttccttcccccgaagaaggatggtataaggactaggaggtggaactggattttcatcacagttttgtaaataagcttgacaaaaccttttggtatgatcaagcttaccacagtaaaagcaaaaatcaaggagtcgctcatatttaaaatctaaccacttggtaaattccctacccatcttaaggaaacgaatgttaattcccctccgaataggtttattaacatcaagaaggtatctacccggcaaataaggcccagtgccctctttaatagtatcctcatcaacttgaataagatcacccaaactcgaagctataagtttagcaaggtcataggacttgcaacgaaatggaatgccatacacttgaacccagaaaggtatgtagtgcaaaagatcagcagtaatgggaaaggaatgatctggggaggcaaaaatagtaaggctttgagcgaaatgccaaggctgtccatcaaggatcctctttttgtctccttcacaaccaaatgtaacaaggaacagaccctcagagtgttcagaaacaactacaggaaatcgacactgggaggtccacatttgagacagagttttcatgagagaaggacgattaaaaggacgaatagtaaacaaacgcaggaggagactaatggtatggtgagaatcatcagaaatgtcaagaagagtgaaaacatcactctcatcttgagtgagggacaaaggaataggagacagattgggaagattagccatagcaaggtaaagttgcaaaaaaaaagtaaataaaaataaggaataaagaagaagatacctggatgtgaagcttaggatgcactttaaatagaaaaaacaagggagtccccaaataataacctctacaattacaggtcagagcctccacttcactaggagtagatctcattatgggatgggatctttgaacttcacgaaggccgtctttcttcctcgccgccataaatatgagataaaaaggctctttgagaagcagagtgatttgatagccagggatcaacaagatttgcaagagcaaagaagaaagaaatgggggctgcaaaggatctaaatgatgacttgagcaattaatgcagtcaggtggagaagaaaaaacaagaaaaaatgaatttagggaatcaaagacattaaatacacatttaatgcactgaacatagctatgatgatagtagattaagggatcggggcaccagaatccaccacacaactctggtaggtggaccataaacccatttcgggtaccagaaaggggaacacaagccagactcttgaacattctagagagagaaagttaattctctctttttatgttaattatgagtggtttaacaaaatttaagagtatttattttctaagataacatgtctctttataaatggaccccattttatcatttatacataatatcctcttttaaaaaataattgacttttgttgaagaataaactttagttggttcttagtactttgtttttcaagtatgcttttttcaaatgtatttcgtttgtaaattagttgtactaagacccaacatctatataaataacaacctcataaaaaaatagacttaaagattgtttaaaattaaagagaccatcaattaatattatggatatggatttttaacaaaaaaatatcataaatatgaatattaaaagatgtgcaacttttgatatttttaagatgtataatttcaatgtatatttaatttgaaattatattaaattaaagaagcatacatatttgattttgaaaaataatgttaaaattaaatattaattctgattttaacaatttgaataaagcacgaagttttggttttcacaacacaattaaaatagacatctattatcagagtctcccgatagcttcggactgctgaaactacttgggaagaagaagtcccttcatggtaagggtgaagtttgtgattttctttgttttgtgcctggtttttgttcttgttaacagtgatagggttatggatttagaattggttaataggctatctgaagtcttggttcttgatgagggagatggtcctgttctacctcttaacaaggtaggaattgcagagggtaagaagaaacttgatttgtgtttgattgggaaggttattgggcctagaccagccaataaggatgggattgagagagcaatgaaagggatttggaagataaatcacagattccaggttgaagaattgagttcgaagaacacttttcgattttcctttggctgccgtgaggataggcaaagagtttatggtggtggcccttggactattgacaaacaattgatatgctttgtcaaaccgatgggtctaggtgaaatttcaaagatgaattttgatttcacatctttctggatctcaattaataatgtgcctttagcttgtatgacggaacttttcgctcgggaatggggtgaacggattggtaaattggaggatatcaagattgttaatggcaccatgaaagtgagggtaagaataaatatcaccgagcctcttaaacgggggctgcgggttgcgattgatgataatgggaatgaggtttctctcctctttcaatatgaacacttaccggatttttgctatgattgtggcatcattggccataaggcgttagattgtcccctgcgtgactttggtggagataacccacggattgacaatgggagatttggttcatggctgtgtgctccggcatctcctccccgtgataattttcgattcaacagaaaacg

SEQ ID NO: 24561 - DNA, 4100 bp, Cannabis sativa
  modified_base (3834)..(3835): a, c, t, g, unknown or other
cttacgcacgggactactgaatgtcacaatgaccttgtgtgcaaatctagacagcgaggaccttgggaacaatctagcatggtgaagacctttcaaatggatataagtagtgatgattgagatatgggcggcgacgagcttgcgaacagatctagccagcggtgaccttgcgaatagatctaagcgagatgactaaaatctaggcagtggccacaaagtatcaaatctttgttatgctatatattgatttttaaagaagtattatcataaatattttcataataaatagattagattaataattaataaataatatatattaattctattgaatcataattatagtaaacatattagattaataagagctttataatactaatcaaatatttaataaatatattatatatataaaaactgtatataaaaaataaacaaaatttgtaaatatatttgtatatttttattttcatttcgtattaaattttagtatacatattattttagtactacatcaaaatatagatattaacttatgtatttatatatttaactttatgtaatttttttttttaaaaaaatgaactgaaaataaacataaacatacatgtttatttgtaaatatttataaaattgtataaaattatgtaattatattttctttacattctttttgtaaaatagtacaatatttaattatatataattaaaaattgcacttaaaaagttatgtagctaaatctagtctcttagacaatttttatattataaaaatattatattatattgtataaataattatatttagtacaatttttaattttttttttcaatatgtggttgtaaaaacaaataccaaaatgaatggtccattatttgaatttgatcattgtaatgacgccataaatagacatgtaaaattagtaattaatcaatattatagtaaattatagaataatatgtgatttttgaaataaatacttattattggaaaatagataaatattattactcaattatagagattttatagaattatgtgtttgttgtatataatatgtatttattatgtttatgatcgaccacaatggaaactcgacaaattgataaaaatatcacaatagtataaactaatattttaaaggtactggtaatttttatgaacaattattattattggattatgtagatcactagagaaatgaccattttatccttaagtttaagtatatgtttgtttatgtgaagggcattttggtaattgcccttattattattactcaaagccaaattaacttaaatatataatgatctattttttatctataccataataaatttattcattgcatttaaacagtaattttcataaaataatgatagtaagataattattttacataaaacattatttaaatacttataattaattttctaacaactaaatgtctaattactaataacacatttattatctctttcttctttatcttcaataatatagtagaatattctcaaaattaacaaaacaataatgtgaatattaattgattaaataacgaattattataatctactattaaatctataacctttataaaagtgtaaatagtttcggctttccactattaaattactttaataccctttaattttttatatctttctttcaacctcccatcatatatatgtgcaagagaatctactaataaattactttaataacctctactatatcttttctttcaacctcccatcgtcatactccaatagtgcacaaactaatttaagtctatacaatttttttattacaaagagtgatattatgatgatcaaatttagtatataggtgttgcctactaattttttattcttattattctatttgcaatatatattggccatatagagcattacttggaacatgtataacaaatttatgaatttatctaaatttttggaaattttctctgaatgaagatctaatttaatttttatattgagcaattatatataatatgcttttaaaataatttaatttttttttctgaaaaattattgtatatataaaattataatttatatattactgttttagaaattatccacgtgcgtagcacgtgtaggcttcactagtattatcttaaatattgggaggactatgggctcatgaaattttggctccaaataagatagatccaaaattttaaaaaataaattttctaacttattaatttctcataactccactttagattcgaaatcgcactcgtgatttcaaagaactctatatatcaaatatagatacattataatattatatattttttctataatatcgatcaataatcatctataattaatagggattaaaattattgttttatccatttaattatattttatccttaaatcatctagttgacttaatgatatttgagtgaactaatatgatcactctatcattaaatactctaacttagctagaacgaatctcgcatttcactaataacatagtagctatagatttccatatctatgattaacaaactctcacttaattttttagttttataatactaaattaggtacgcagcaaaagaattatttttaagtatcattgtaccatatacctaaaatcgtcatatgtatatatattaaataaaaagttaatagatgaaaataatatttatcccttcatgcttattggaatatccttaattcttttcatatattgtgtctttttgggctgattggatattctctcgaagttgttgagagattatctctaggtggttaaaatgttctcttaattagttattagatacttattactttaaattaaatatttacatttgaaaataatatcaataaaaatattacatatattattttaagtattataatatgatcatttattatttttaaataaataaataacttaattaattaaacacttaatattattttattagttataatcaatatacttgtataaatctaaatctatatatatatatatgatatatttagaaaacctaaaaagttgaatcaaatataattttttttctttcaagtaaaaactgtccttgttcatgttgagaaaaaatctacgaatatattttctatatcctatttaccaagactgatccttgtgtatttttcttgatctagaaaatcatagtgtgagacattattgtttcttgaatacgatttacgaaaatactcgaagatacttgttggttcatcaagacgtaacttttttgttcatcttattattttctaatttaatttatatatatatatatagagatgttgaagatgctaagatgtggtaggatgataatcttattaaatgcttaagctccacaccaaatttagtgccacaaaacaaaaaatggtactagaattggttctattatgtatatatattaaatattatgcgagttttcttgtattatatatatatgcgatgtgtatatgaatggatgataatatgtattgtcaatgtatatttaatatggatcgttaattatatggtaatgttaggtgtacgaattacttttacttttctaggaaaaattataagccattattgtggcatatgaattttatgtaatttttttctctgaaattattttacgttgaattattacgatgtaattggatccttacgaggcctacaatctcttgcgtagtgcccagattttccacacacaaaataatggcctctcacttctttgaattggctaatgtcttttcttagacccaaatattttccacctcttttattattgttgttgcctttgtgatgcttgtttgagaccgcattgnncttagaaacctcatctttaggttctttcacatttccattatctctaaatttcgatttctctttgattcgaatatgattttggatctcttctaacgaataatcctcatttttatagaggattattttcctatatcccttccaagttggtggcaactttgccacaattgcaccaacttgaaatgtctcaggaagcttaatgttgagaacctttaacttgttcacaatggtttgtaacccatgaatttgaggaagaagatctttagca

SEQ ID NO: 24562 - DNA, 4583 bp, Cannabis sativa
  modified_base (1743)..(1743): a, c, t, g, unknown or other
agctatcaaggctaattcaagcactttcttatacaaagtgtcgtgagcagtgataatcttcaagtcccgactgattgtagcattcagtcctctcatatattttttgtttcttggtgaaatctgtaggcactagatcaccaaaatatttggacagccgatcaaattctagagtgtattcagccacaaatatttttccctgagttagtttcacaaagtcttctgtatgtgacgttctcacagcaatgttataatttttttccttaaacaaactcttgaactcatcccaagtcatcatactaacatgtcgactctaccccacaatatcccaccatatgcgggcatgatcttgtaacataaaggcagcacagttcactctctctgttcttgtcgcccccatgttatcaaggatgcgagtgatagtactcatccattgctcagctttaattatatcagtatctcccaaaaacgttggaggtttcaactttacgaacctttcaaacactgaatctctgagcagcaatacaaatccctggttacccaccactggcacaggagctggtggtaaaacttattctataggagctgtcggtgccggttgcctcaaccgacgcaattcttcctcttgacgaagtatgatacctcgtatttcttaaaatatttgctactaatcagcattcggattaacattatgccaacccccacattatcccccagattctgtggaggtgcaggcactgccggtggattggtttggtctacacaaggctctacttgctcgccctatggtctagatgattgcggagggtccatttttacaaataacactgaaatcaacaacaccggcgagtcaggcacccataccacacttatgcacttattgcctttaaatcataactcaactatttcattccaattatatagacatttatcaattaatattctaaacatggcttcatttcacataaatactctagatgctcacatactgcctaaaatggaaagcgataaataaataatcacataagtagctaagtgcttactctcaacacttactgcaccacgagccgagcttatctctgacgatgattgtacatgttcagccggtctacaggaagtttaaaaacctttgcactctaataccaaactgtaatgccctaacaattaggcacgccacgacaactgattacaaaaccctaatcccctaatccatgattactagaaaggtaagtgcgagatatttaaactttatttgaaacagaatgaaaataaaacttgtaataattttaaactttacaaataaccaaaagatacatgtttcgggatcctgcaaatattttcacaaaatattataagtctatttcacgtgccaacctaagcagtaaaattagagttacaaaatacatcattagtagaccccaactcgcttggtctagtgtggcccgaacatgtacaagcactgccaaactctcacactcatggctgatcacagactaatttaccctttcctgcacagtagaacacccatgagccaagcccaacaagatagtataaatatcaataatcacaaataatatatcacatatataattaagccatttcacttattgtctatttgatataaaccagcgtgttacgctcacatgcctatttatatctatgtggcatagacccacgtgttacggtcacacatctaaatacattaaggccttagaatagttcatctcggttctaattcccgagtcnaaccaaattataccttgaacgcataattcttaatctcaatatatatagcatggcataacatttaaacattaacaaatactagggtaataaccctagactatataaccgctcactttaggtaataaccttaatctcagttcttaacaactcacaattataatattcaatatgatcaccaccgagcttaactctacgtgtaattactatcatacctgatgtcccgcgaatgtggagattctaaatccctaggtgttcctgaccaagtgtcggtaatcctagtcacaatttctatgatttacaaatagggttaatccttaactccatttccatataattataaaattggcattcaaaatgagataaatatatagagctcggaacaactttccaacgatatgcagaactcctgaaatagagtcagaattaaaaagttatgaagaagggcgggtcgcggcacttgggttgaaaacccaggattcaacaagaggcgggccgcggtgcctagtgagtggggtcgcggcgcctgcgttccaaacccaggaaactccatttccagctttgaaactcaaggccaaaacacaactgaatcaccccaaacatgcatataacttacaatcatattccatagattactagacaccatagcagggcattagaacccacaattcaagataaattctcatccaaacatacatcctataaaaatcagattaacaacactcaaaataagattcaaacattgagttataatcatcatattttcatataaagatgttgcactacaaagtctcaaaataatctcaaaaacctagcattcaattccaacaaactgactttaatttcagtattccaaaccccaatttcaacctaattaacacacaacataatcttaatggaaaacataaaatttccaagcttaaaccacatacaaaacaccccaatttcacaatcacaacaatcatgtttttaagaacatcatcacaagaaattcatgaacatttaacttcagattacatcacaaaattaaagcaaaaaaaaaaaaaaaggtggaaagctacctcaaactcttcaacaagaaaagcacccaaaactccacaaatcaagcttgaaccaaagctaatttccaaaaatcaaagttggttgagaagatgaataaggagagaaagagagggggtcggtttaagggccaagcaaaaatcagaaaatgcttctcaattttctctaaaatttatttttgttgaaagtaattcacaagtaggcaaatgactaaaatgcccctagggccatgatatagcataagcccaactcaagggcataaatgtcattcaatcacacaccacacttaaaataatatttagaatattcaaatatccataaaaaggccaatacaaaatcctgaaaatgtatttcggttcgacccgaaatacctgattgtgactatgtcgcgccgacttgtcaaaaaacacctgtagaaagacaaaaaaagtataatatataataatatagtctataagcacacaattaaattaaattcacagttttacccttctcagatcaaaattatgaaaatgcccctagctctccagcggggtcttaacatgtcatttatcaaattaattcacatataattccatataaatacacatttaactagttagggttctctaatccattttcttaatcttaggatattacaaaagtaaaacactaaaaacgagcatcataatgacattaaaaatgtgttccggagatccctattataaaaggtttacaaaacgactatatacaacaataatttaaaatactaaaatcaaaatacatagtagatacaacccaaaacaactccaggcgacttggcacacaggccgatgggatcattatgtacattgttgtagaagactgtcacattatggttgatctaacttttcttttcctttacttgcaccacatagcacccgtgagtcacaaggactcagcaagaaaagtaataaaagataatacatggtgttatccaagtttttatgcatgagacacgtagcctgattaaaggacatgtattagcgaaaaggattaatcaaattaacccatagggtatcccagagagaacatcttgacaatcttggaagtgttcgttcgatacatgataaggcaagtcattcgcgcgaaagaaacccctcccgcatttggaagatggttaaaacagaagactcccagatgaaacttccttaagtaatgaacttggagcgcaatagcgatttcaagggtacggactacgtcagcatcacacaaaaatcgctctatagatggttacacctttttctaacatcagatcagatcttctcccctcatgccaggccatggtagtgtgcatacgcaccgtaggacatacctttttcccaatagtttgaatagagagtatattgcaaaggaggacctttgcatgacacatgtcttgggttatacaaaatctcttattgcaactgtacgccacacaatgaagaaggttctcctcaatcgatggtcaaatcatcttctagtatatcagccttggtagcgtgtagggtacgaaaccctaggtaggtaaaatgaatgcccttcaccccatgtgtgtctataaatactcctattttctttgggcaaggggagaacaatttttcgtttacagttactctgctaaaattcctagagagcttcctcctaagagagaaataagaggaatacatagagcatatttgtaattacttgtaatgtcaaaacacacgcccaaagaggctaatactactaactcgtggactaaggatcattaacgcttgaatcacataaaaatcttcttgtctatt

SEQ ID NO: 24563 - DNA, 2130 bp, Cannabis sativa
gtaatggaagacagagttactaacccggccaacacagtggggaacccccagatttttgttgatgaatccctcattagtgagacgcaacaaatttctaaataggttttgagagtcctgaggggtgttgggagagaaaagaatggatgatttatcaagattgaccgattgtccagttgcctgatgatatgtatgaaggaaatcatttatggcgatactagactgagcagtgacaggagtgaacaacatactgtcatcagcaaacaagagatgggacatggaaggagctcctccgcaaactttgattctagagaactcaattgtcatctccttgattctaatggcagctgagagtcctttagccacaagaagaaagagatacggagatagagggtctccttgacggattcttctagtcgaagagaatgtgtcagacaagttaccattaagagataaacggtaggtaacagtggaaagacaactcatgataagggagataaacctggaaaggaaacccacatgagcgaggatattcttgagaaaaggccactcaaccctatcaaaggcttttttcaatatcgagtttaatagcaggcagccaattttgcccaatttcatagaatgaatagagtgtataatctcgttggcaataataatgttatcaaagatttgtcggccagtgaggaaagcactctgattattagcaatgaccgagtgaagaacactctgaagacgattttctaggacctttgaaaggcatttatatattgtattatagaagctgatagggcgaaaatcacgcattgttgttgcctttttctttttagggatcaaaaccagaatagtatcattgatcaaagagatatcaccactatgatttaggatgtcaagaacagcgtgacaaaggtcagaccccaaaaaattccaatgtttttggtagaaaaaagagttaagaccgtcggggccagggggcttatcaccagagaggctaaacatagcttttttgacctcgtccttagagaaaggctcactcagaaatgagatttgaggtgggaagagatgaagagtgaccccctggaggatgttattgatagcaccctgatcaactccttgagaatggaaaagattagaataaaagtttaaaaaatgggaaagaatggtgggggtatcgctggcagtagaaccatcaggaatggctatgcttctaatgagattggttttttcctgatggaagctttgtggtgaaagaatttagtgttcttatgaccggccttaagccaatccacacgagccttttgcttccaataaatttcttccttgtgaagaagggcttccagtttggattggagggtgttggcttgggctaaaatgtgtgaattaggcttagtgatgttaagaaaaaggtcaagctcatgttgagtgttggcaattttcctcctaataagattttgagattcactccagtctttaattgcctgatgcaagtggattgtttggaaaggaaactgtgaagaggagaggaggaagatattgaagtggaaataccccaggaagattggatagtggaagaaaaagagacatcagtgaaccagtggttttcaaaaagaaatcgagaatgtttttggggggaaggtttgaatctgtcttccagttgaactttaagggctctgtggtcagacccgtaaaagtccaaatggaaaagacatgccgaaggaaacaggttattccaagattgatttgcagtacaccagtcaatgtgctcaagaaggtggccatgtctccaagtgaatttgttacctgagggaatgaggggcaagtgattaaacttatgcagaaaagaatggaaattgtgcatagcatgagggggaggattagtactagagtttttatcactgagagaaaaataatcattaaaatccactataactaaccatggcataagaggagcagtacatagagcctatgaagtagagtccaagtgacatttttattggaaggataaggaaaaccataataaccagtaaaatgccattttatatcattagaaatatttacagtacaatcaatatgattaagtagggctgaacatttagacccgcagacccggaaaacccgaccacccgccccgacccg

SEQ ID NO: 24564 - DNA, 2511 bp, Cannabis sativa
tactgaaattgtggtagaaagagataaaactttttttatttttatttttatacacttaatttttttttttttttttgtttcaatgctttcttaactttatttttatttataaatttgatgcgcctcaattaaatttcactgttaaatactaattgtgtgtacctatgtacacatgacagtaaaatcataaagcctataaaaatatgtcaatatacacagatgtacacagtgtcaatcttggtactacaaatttacaaagaaaaataaaagtaaagaaattttgctacataaaataaaatataaagaagataagtgttataaaattaaaaaaaaatacgggaatttcgtcaccaataaccctcttttttattaaattttattattttatttttattaaaaatattatataaatttaaaataataaataacaaatataactaagattattgttacgtaagttgcaggtatacttaattatatttttatttttgttatgtgtatcttaaaaaaattttaaattaaagaaaactacttattaatttttaatttattttaaaaaattaatatttaagttttaaaaaattgaaaaaaaaaataaatacaaagtttacgaatattaaaattgaatgtacacccaatattaaaaataacaatgaaaaatataatgttacaaataatatattaatattaatatatatttaaattaatctgaaataaaaaaatattaatatttataaaactaactcaaaatttcttatattcttaaaatattatgttaaaaatattgttagatatattttatatataaagatatatactaggtctcacctaattattaatttaaataataagaataaaactaaatctaatacaattaaattatattaaatttaaaatttaatgtagttttaaatttatttataaaaaaaatatatctaataagtaattttattaaacaataaaataataaataagtttacatattttaaataatataactaataaatttgttataaacatatataaagtatgattaattcattgaataaacgtctaatttaaatttaaattaagatttataaaaaaaaaaataatcaactaattttattgatacttttaacaaactatttttttcaaaagaaaaagaaaaagtaattgattgattcatttaaaaccgtgttttagttttaacccttaacattaatagaaaataaaaacaaaatcattaaatctgataatttttgttaaatagtagaatttaatataaaaaagatatatgaagagataaaaaattatttatttttcatattttaaaaatatatatatataaaatttaatcaaaatttaaatttagttgtttcatatttttcaaattaaaattctatcatatcgttttaattgtaaattttttaaattgtatcacatttaaatttagatttaataatatttctcacttttaaattcttttaaaaagattaaacttaaattcttggagaattttaaaaaatactcctttcttatgttttatttataattttatagcacaaaaatatgctttggtgagtaaaaagctaaaaaataataataaaaaatgcaacctcagcaactataaatactataacacaaatagaaaaatcatctcatgacaaacataatacaactacaaataaattataaaataactaaaaaaaatgtttattgcttttactgaagaggtatctttttaataaaaaagttcaaagaataaaaataaaaaaatttcacgttgacttatttttgtaattttttttttcaaattttcaatttattatgtaaatttttcaaaattcaaaataaataccatttacaattttttttaaatattagtaaccgttcattttatggaataactctaacaaaaaataattaaaccaacaattttcttgaaatatctatattttattgtggaaattacaccttatacttttttttgttaacccatttcagttttacctttcttttctatatatttaatttataccctcttttatttattatatcccgattatacccttatgtaataaaaaaacttttctcacctccctaaacaatactcttctgtgagggtataatcggtaatggacttataaaaggggtacatttcaattgaatttaaaatataagctattttggttaactgatgaaaaaaaaaacgagcatatttcaacttagccctattttattgatagctctaatatattaaatgtgactatataacagaaagggttgttctattttaaatattgtgattcaaatttaaatctactctatacatctacaaatatctttttatcattatttttaaacttatctctattatattttatgtctatgtttgttatattaaatgtaactataacttgttctttcttcataacattataatttaaatttaaatttaatatgcatatctcttttatcttttatcttatattacatgtagttatataacacaatatatatatatatata

SEQ ID NO: 24565 - DNA, 1902 bp, Cannabis sativa
gcttccaaaaatgcacgcgagtcgagccactcacgacttagttccgaagtcagcaaccaggtacatagcgataaaaaagtactatagtattaaaatatgttttacgttagactgatcctaataattaattatccgaggttatcttctcctaaatttttaaatgttcctataataattaatttggtttaatatattaccacattttcttttttaaaaaagaaaagaaaaatatcattacatttttttgctacgaaaaaatgcatcattacttgttttgtcaaataatatttaatgggagatggtcttaggagttaggaataataggatgccctcgattgggggattaaccttttatgtagtttacccctacaaaagaaaaagaagtcaagttcattcacaaagacaaacgcaccgctagtcacggtgaccaaaagtctttctatttcaactttcaaccaccagaagaaaaaaagaaaagaaaaagaaaaagcttctctctctctcacactctcttcttattttacaaaatcacaatcagaatgtgctgttgtaatgaaaagcaacaccaaaggcaggcatcgattgcaagaagcaataccaaattgacaataataatgagctacaaaaagaaaaagtagaaaacactgcgctgcatggcatataaaatcatggcccccaccctttaccgcaatccaggccttaatttagtccaacaccatctcttactcctcctagtaactactaatacccctataagttcccattttacaagaatgactcttcttctggttcatgagcttccatggctagagcaaagcttcagctttggttcttcttcttcaacctttttctctgcttctttcatgggttgtcttcagagtttgaggttggagatgggtcttggctcagtgaggaagatggagttgttatggttcagagtgggaaaaacttacccaaaaaatgtgatttttcttctgggaaatgggtttttgatcaatcttatcctctctatgaatccacttgcccttatcttagtacagcagtgacttgtcagaagaatgggagaccagattctgattaccagaagtggaggtggaagcccaacggctgctccattcctaggtaatggtttggtttagaacattgctacatgaagaagccatgtaaacatagtttaatttactcaatcagctttaagttttctttttggttcagttataacatttccattagctaaagattaaaggtcatgtaataaaaaggttctctttgttaattacatggataagatatagaaatttatatggtacattaggtaacaaaaaaaaagcagtgatttaggcagtgttcctaaatttcatggtttgtagtagctagaaaatattctcaacttattaatattgcttgattaatttgttgttttgtttttggcatttatctcaaacaggttcaatgcactgaaatttcttgctaaaatgagaaataaacgaattatgttggtgggtgactccattatgagaaatcaatgggagtctcttgtctgcctagtacaaggagttattccaactggccgaaagagggtcacctacaatggtccaactatggcattccatgcaatggtaatactaatgcatttgttatagactgatttacaacatttgcaacattattttggcaaagcctaagagatgatagttatattttacacaggattttgagacatcaattgagtttgcatgggctccactcctagtagagttaaagaaagaatctgggaagaagagaattttacatttggattccattgaagataatgcaaggtactggagaggagttaattttctcgtttttgactctgctcattggtggactcacacagacaaatggagttcgtaagtaaaa

SEQ ID NO: 24566 - DNA, 1496 bp, Cannabis sativa
tttttagtgttttattttagtcaaatttttaatattatcacaatttttaaaaataatattaaactagtttataaaatcatacatgtggcgtccctatagattagaatttcctaagtgagtttcctaacttctcagtcttcatttccaaatcttataatttgagtgttgatatgacttccttaagagttatggaagtccttccatattggatggttatttttacttttatataggattctaataatgagttgaggatgatgtagcttgattcccatcactcaaagcctctttctctcctaagttatcccattcggtatgtatcctcaagaattcatcaagattttgataaatcttgttagagagtgatttctattgaaaattgctattctagtttttccaaatctttgttggaatttcttccttgtcaattaatatgatgattgagtaagatagattgaatataatcagagcattagcagtttccaacaattcctcatgttgaatctttgtagttccatctcgccactcaattgggagaacccttaatagattatgttgagccagtagagatcgaatcttctttctccatatcttgtaattttctgtaccatcaaacttatctatttcaactttaattgtactcatgttattaggttgtaagtcaaatataaatagagttagagggttctaatccaaaatttccaatgagacatcaacaaattcatctagattgaattcaggttcttatatattaatcctctccagtcttgcaacttctttctaatgttcttagtcgattcttgcttctaagattcatgcaactctcataccatgtaggaagttcaatttcgaatttaccgtacaccaactcaaagacaaaattagaaaaataaggtcaaaattgaataaattatggtactgtagtactacctttaccttcttctaatagtttggtgtgctagaacaaacttcgaatcacacacacaggaacacacattagagtctcaaactaaatccacacacaagaacacatgattcacaatgaattcaatcaacacaaaagagaaattaaaagattgagtgagagacgcaaacacaataattatagaagttcacctcaaaatactaggactacttccacttttgagttttcctcatagatatggggctcaatctgcactagtaatggtaaatccagttacaaagtctcaagattccatgtcacaatacgcaatctcttttttcttctcaggatctctctctcgctaacttggacaaccaatctctcatctcgcttttttcttaccatgattggtatttatatttattagcctttttctgttacacaattttgtttctaaaataggaaataagaaagtcttggactaggccaaataactctggtttttggcacaaattttggcacctgaaaatacctccgaaagtgttgaactttctgtggcgagctataacaggtactcttccaacatgtgtga

SEQ ID NO: 24567 - DNA, 1643 bp, Cannabis sativa
agaattggctttaacccaaggttgcagtgatggttagaggtttactgggattgactggaagctacaagatgtttgttttaggatttctacgctcttagaaggattaagtcgaatgatttgaaacaaaatttaattaaaaacagaatttaattattgcaccagtattaacatttccagtcagtgaggataaatttgtgatataatgtggtattcttaaacaattgaagaagtgttagcaatggtattccagttatgatattgaattgatagcaatggcttttcccttggaagttttgcattttacacatctggtaaatgcgcgaagtttacacagattacaagaacctcaaatactttatctcttgggatgatttaattataaaacagtaacaatggttagagctagttaaagattataaccgtgagattctctaccaatctaggaaagaaaattgatgatgggtgctttaatttggagaggtgtaagacatgatttcactaaagttggatgaagatttaactagagtggggattgaatttgtgattggagaacttgttagaatcacactatagtctgatgtaatagaaagaatcaaaatggcccagcagggtgactccgagctacaggggtacaaggaaaagacttgaatctaggtcggcaaatgactttcaaattttgtctaaagggattttacgataaaaggatagggtttgtgtaccggtcgataaggatatcaaatagaagattctagatgagtctcatcctataccatactctttacactcaagaacaactgagatgtatcacgatgtaaaaaaaaaataatcctctactaggcatgaaagatgacattgtggagtgtgtgtcaagtgttcaacttgtcagcaagtaaaggcaatgtgtcagaaaccagtaggaatatttcaacctctcaagatacttgagtggaaatagaaagaagtaacgatagactttgtggatggattactatagaatggtagggttctatgatactatatgggtaactaagaataactgtacaaagtcaatacaatatttcttatcagagcggaatatgattaaagcagattagtgtgctaatctatttgtcaaagaaatagatcaaccttgtgatgctttaaaagtaattacctcatattgagatttaaactttacagctaaggctgagagagtcgatgacaagcatacgtgatagattttgaggttccttgaaataaccatcattcgctgaatgagttttcatataataacagttattagaatactgttaatgtggcattgatgcagtttaaacatttaagttcgtatgttgcatatataatggatggaagagctatgctagtccaaagtgtagagacattaaattccaagttggagattttatcttacttcaggtgatttcaatgacgggaattcagaaattgggaagaaagggaagttaagtcccaaattaatcggtcagtttgagtttctagaaagggtaggtcgggtagcttatcagctagccatactccctgctttatttacagtctacaacatgtacttcaatgtttcagaagtatgaggtagaagcaatccatatacggagttacgagaatattgaattgttgggttttatgcc

SEQ ID NO: 24568 - DNA, 3765 bp, Cannabis sativa
cttggcatagaagtgcatcgagatgaaactaggtagtatctaactcaaaccaaatacatctcaaatttgttgcataagtacagaatgctaaatctcaagtcatgtcccagtcccatggtctcaaggaagcctctttcaaagtctgatggagtagaactatttaatccaactatctattatagtgctattggagctttgcaatatatgtgtcataccaaacttgctattgcatttgttgtaaatatattaagtcaattcttacaagctccaactactagtcattggagtggagtaaaaatggtgctaagatatttgaaaggaacaattaaccatggattgcaaatcagctatagtgatcacttgtcttttgttgggtactcagatgcggattgagcttcttgtcctgatgacaaatggtccattggagggtacagtgtttattttagagatacccttgttgcttggtcatcaaagaaaaaattagttgtgtcaaaatctagcaccgagtcagagtatctagcccttgctcatgttgcttttgagatctcatggattgagttactgctcaaagaactcaaattcaaactctctagtacctcaatcacctggtgtgacaatcaaagtgcaagtacacttgcttccaatccgatttatcatacaagaaccaaatacattgagattgatattcattttgtttgagacaagacgataaagaagaagcttgaagttcggtatgtgccaatatcagatcaagttgcacaaaaggattaacacactgaaagatttcaaatcctcatcgacaaacttcgagtgaaggcatcaccccttagttttaggagtggtgttaagaatgaggcctaaagtgtactgcacctctactacacagaattacttgctcatcatgatgtggcaatcattagtatcaagaatattctgtacaatttctgttgctgccttgatttctgtaatgccacttgacactgttgtattggctcctcctgttgtatcgatcttggctatttaatgaaatcatctctctcagtatcaattgagctgagaaaacaatttccaattgtccttaaaatctatctctctgtagcctcaaaattttaaaactgacttttaactatttaattgtaggaagctatataatgaaattcaagtgatccaagactttaaacgaataataatgactaattttgaaatgacatcttccaaaagctcatcagcgaagaacactgtcatgagtaaatgacggcctttatcttaaatatactgttatacagttcacaatactatgaacaaggaacactgttacatgtgaagataacacactattttgaaaaatcatacaaaaaaatctgcctaccaaacactccaggtagagcaatatcccctatactagatggattaaataatcataatgactgctgctgccacttttcccttggttgtttgttttttcactatacaattgaacctacaaatcttcagtggtcagcttttcaagcatcctctcaaagattctttcatgaaaaaattccaagctaaccaagctgcaccaactgcaggctccacctaattttcattcaagaaaacaaatatacaaaacttgtatcaattttacatggggaagatttattgaatgtagtgtcacattaacagttcggtcgaataatgtgcacgggtgcataggcttattattcacttcactcttatcattaataacttcactggtatcaccaactatgctatgtcttttattgtttgttaaatcaaaacatgaatcagtgtctacagtattgcctacactgcatccaacccaaataactgggaaaggagatgattcccttcatattacctaaaccaaatttttgttgtctaaagaaactcaagcatgcaaatatttttggaattggactacaggttgcaattgaaagcaaaagctttggatttcaaataacaaatcattactaatatcaaatccacaaaagactgtcaaaatagggtgtaaaaaattataaatgttgccattatgatggtcccttggaaagaaagaacatcagaattttttgaagggttggagggagtcattctgaactaaggttaaagcttatggctctctgtactttttacgataaatgttttgtagataaagtggactttgcagaagggcctttgggagaaagttaattttaggggagcaacttgcattgttcaaactaaaggctttgagggtttatattttcttgattttagcaaagagggggaaacttttatgttcattttaccgcgtaccgttactatgcttacaatttagcttcttgtgatctgcacctgatctcttacctttatgttttaattagtattgatacaaagacatttcttttcttttttaaacgagtctcctgatgcgggtaaggagtgtcaaggatttaagacaaagaaatttcacttgaagagttctgttagcatcaggaagtattagaagatgaaatttagaaccataatacaattttggtttctaattttgtctcttggttgaacaatttaatgatgatttcttatgtaatcatatgtaattacttagtataatctttaaaaataagaaaacaataaaaataattcattgttatctttggtcgtttctttattataattgaaataataataataaagtaggaggaatatgcttaccttaggcctaattgaaatgacaccagggtagtccttattgatgtacttcacaacttcttttcctatatcccacctcttatttgcttcaagtacaccaccaaccatgacgagtggaaaggagtgttttccatctgcgataatatttttcacaaaaatcacaatactgaagatagaactctgcagaaattaggggaaaggcatgtttatatctcctacttcctaattcatctacgccggtattagctgcttcagatgaaagttaaactaagttgggccacaccaaactaaaaatccaaatgcgtacaactacatggtgaaagctgtgtgtggaaatttctcttcttactagactacctggatttgaccatatcagtgcattgtttaatcgtgtatgatctcatggctacaacaacaataagaacccaaaaaatctatctcatagacccatgttagttttgtacatcataccttctccacccaagtcaagtcttcgaacaacagctttcacacttgatgccaactcctcgacagaatcatacaaaattctatttgcaacatcatcaccagcctccgcgcaagatacaacaactgggacaagtgcagcaattcgagcccaagatggatctgcatatgtccacctaaattccaatagaaaaagaaaaaattgtttcagctgcatactcaacaaatatacaaaatgcatgatactttctatattacataacatatttctcatgaatgaatgagaaaacacatacagcacaacattatttaaacatatacacaaaaaccaccaataatgagaacgtcggtagaatgactacaagaacaaatacagtggtgctgtataatcattcaaattaataataactatgagaaaaacaatacaactgtttcttgaacaagtctaagcattttctaacaaacaaatttcgagataatgatataaatcttgtcctttatattctccaaacagcgcaaacagattggctgcgtagcaattttacagcaaatgtgacaataaatagtaagagtttcagatacatacccaattagttcatctggaga

SEQ ID NO: 24569 - DNA, 1637 bp, Cannabis sativa
cctagaaagaaaagaataagatcaaaaggagaaccaaaagttgtcttgaaatgcacaaggtgcgaaaaagttggccacaaccgaagaacgtgcaataattcacagttttacaaacctccaaaacagaataacaaaagcaacgagtcaaagaagaatgattgatcagctacaagataaatagatattgattgacagttttataaaaactggtttctcagcattgaataaagttggacaaaatacaattttttcaataagatacatacaacaaatatttttgggcttttgaatttttatctatttaaataatcattgttttaaagattttctcttaatatcatagatcatttcaaaaaggtacatgaaaaagaataaattttactaaacaagaaaccagttattgacaaaagtatactaaaaaaacaattgccacttaccaataaataaaaacacatattgccattgttatcacctacaaaaagaaaacaaaacaaaaacaaaaatcagttaattgtacattcaaaagaaaccaaaacgaaattaatagtaaaacaaaaaccagtttcaaaaaaaaaaataaaaattaagccatcaactaaaaacttataatacaaagtgttgctgattcattcaaacttccagtcttacaaaaaaaaaaatacaaacactttaactaagtaacaagtcttttaaaaaaaacactaaaaaactatataacatcgtctttaaataccaaatacaaaaaaaaaaaaaaaaaaaccaaacaaaaccagtttcttgtaaacataagaacataaatccaaaaaaaaaaatgtaattattataaacatctatccagtcatctgaaatcatttcgctttgcccttttcctttgcaatatccttccctttgacctttgccttatcacttgcattatcctttgatttcttcatctttttcaacacttcatcatcagttatataaccaccaatttgtttcctcctagcatgaataaacaaactgacagcaagatcatctctatatactgctaccaaatctgacatcttagatggaatgtcatcaatttttccatgaatgaaaaagtcagcaaacttgatgaaaaacacaccatagtcaatgcaagaaaacaaaaaatgaattcatatcaaaaaccgatttctgtgcaaacaaaacaaaaattgacaaaatatataagcagaacaaaacataaaactagtttcaattaaaaaatatatgatcaaaaaatgaaaaatttcctattgacctgacttggaagcccatcaatgaacttgaaattcaaaggttctcttttcccaacagaatatggaccttcaatcaaattaagatccgatctagaagaataaacatcaagatactccaaataatacggcaacatagtagaataagctttgacatgatccaaggcgcgtttcttgttgagagcaccagacatggagttatatacgttcaacatcctctccttgatatcaaaatggaccaatatccaatattgttgcttttgaatattaacatatataagaacatggtcagtaagcacccaaggagtattgcaaaacaaatactcaccaacaatgtatctaggaatgacattatcaaagtcaatcttagaaggatta

SEQ ID NO: 24570 - DNA, 2145 bp, Cannabis sativa
attcgtttctttgtcaatgaaacagaatccctccaggctaaggtaataattccaaaaagcatattattatatctttttcttgatatacatatatagtttgtttgaaacacaaaaacacaaaagaatgatacattttgtcgattagtttatcaaataataacttaagtgagtacaaacaaagccaaacatgagtcgtcactgtttgaaattattatccaaaatgtttatggaagctgactagtaatttattacaggctggtaggtatcaaaatcctgaagagaatgccttctttcctgatcatttaccaccctcattggtgccaccatatgcctttccaccggtaaattattattattagttaatatcttggtgagtcaattaatagtatataaaaaatattttggattcttataataaacttggaccgtaggtactgcatcgtgcaggggcttcaatcaatgtgaacaacaaaatttgggatatatatttcaagcaattgcttcctttgtttattatatcgggtgatgatggaaactatgcatcgactgcctctagtgacctcaattgcttacaggtaaggttgtttaagttttcctttttattgggcaaatacctatttttcatctgaatcatgattttatatctataaatatttataaccgaacagttttatgcaacaaaatttctttcacaatttaatgtgtcgtcgaaatatctcaattatacaaaatcatttcaaacatgtgatttagtatcattacctatacttttcttgctaaagaaaaacacatgcataaattatagtaaagtcaattttttagaatattagttgtatatgcactcttagaattaatgttttgtttgtatatacatgcttagcatcaataaactcaattcagctaacttcaattagttaaataaataactatgtcagtatacccacattaacaaactgcttaaagaaaaagtgaacagcgagaggtaacataaaagacaaatttgcagtggtgctatatatagttcaaattgaagaatttggccataacaaaagtttgaggggaactttagtaaaaaacttataagacaaaactctacatgaatagttcatttaaatggatatattttgttttgtctttagctagaaaatgacaatgtaagatagtggttcttattactcgctgcaggctatctctagaaggattcattatggaaaatttgtggctgaggtgaaatacaaggatgccccacatgactatgaacccgcaattcgtgctaaggtacgtacatttgaatctattataaattaactatagaccaagatatgcaattcattgtaggagtattttgactgtggttataaagaacaataatttagcattatcacatgattatacggcatgcatgtatctaattttaattaaattgaaaaataatccaggatagggatgcactgatgaagctgttaacatttaaagctgtggaagagacagtgaagaagagggttgagaagaaggcaatgatatttggggaagaggtaaccacaaacactacttgcacagaaagcaatgagggaaagcacaagattgatccaccattagtttctcgtctctatgatgaatggataatgcctcttactaaatttgttcaagttgagtaccttctacgtcgcctcgattagtgtataataagtaataagtttaacaataaatttaattacataaggtacttgtatcttccgtttttaataaccaaagacgtaaccccaccttcgatttcggtatttttaaacatatgtcatcggctcaaatgacttcggttgcgaattttaataaaatccgaagatcaactggcctaaaaatcgaaaataaaggccctttttctagttgtgaattatgatccttataaagtattgtctttcatttgatgataacatgattttaatgaagctctcttaaagagttcagataaaaaataaagaaaaatttacataataaactaaaaattataaaaacaatcggtataaaaaaagcttatgtgactgaattttttatttataaaaatatctttttaataaaaataataaattcattttttttattattttatagtatatttataactgagattattttgctgtttatttt

SEQ ID NO: 24571 - DNA, 1955 bp, Cannabis sativa
  modified_base (1885)..(1908): a, c, t, g, unknown or other
tattgggatcatttacaaagctattttattttcttataaacttcaattaaatttaaattttagttcaattaattaaattacttaaaactttatttttttaaatttccacttatatagaaataataatataactttcttttcttaacaatttataaacattttatttttgttggtaagaaaacatatttaaaacttcttattgttaataagcattttaattttattaaaaaaaaaagcattttaactatctcgataacactctagctaaaagattaacatacttaaaacctccattacactagtgaagacatgaagagaggcatcaagaaggagatgttggggattgatggaactattggtaatattaactatttgggtcttgcactctttagatctcgaaagaaggatgcatattttaactttatcttgggcagccttgtctccaactctaagagtagaaagtaaaaactattatgttcaaattagttgggcttgctctcctagtgtacacgatacaaacgactaaactctccaagatactcacttctaaagttaatggcatggtaagggacttttggtgaagttatgagaagggaaattatggtcactacttaaaagcgtgggatactttgtgcctccccaaatcttacggaggcttagggttctagaaaataatggagataaataaggctttcttagcttaatggggttggtatctaatcattgatcacaaatctttatgttgcagggtcttaagggccaaacatccgaaagacaagcaattcatgaagtgtgcttataaaaattatgattcttaatttttgaagaatattgtgaaagccagggaaatttataaaaaaggggtctgttaaattgtgaatgatgagaaggatacacaaatctagaaagatttgtggatacaacatggcaaagaattatgtcctaattatgtagcgaaccaaattattgggtttgaaaaggtcttcgaattgcttttagaaaatgtggattgtaacctggtcaagcttcaattcctatttgactctgatacagtacacaatattttgaagggagtaagcttattggccagggaaagaacaggtgaatttggacaagaaatcaaatagaattttttctaacaaatctacttaactagttcaagctttagatcatgccccctcatacaatggtgccttccctttggaataaattggagaatagcaaagtgttggagtttcataagattttgtggtggagcgttctctccaaggctcttccaattcatgcacttcttgctacgagaatacatattaaagatacctcctgccttatttgtggtgagggagagaaaattatggaacatctttttctcaattgcaacttagccttccacttgaggagatcttctccataggggatcatgctcgttcttgagttaggtgctcaggtttaggattcgataaaattcttatgggacttgaagtcgaagaatgtcaatgtagatgagttttttctccatgctttgataactctagaaattagagttatttttcacatttttttaactaaatttagcttagtctttgtgtttttaattaatttagtaagtttgtaattatttttgaatttattagctttatgtttattttatagtttattatgtgtttttataattattttattataatatgttatgtgttaatttttataattgcattttaatttttttttaattgattttatgtatttttaggtgtgtttgtgagataaagtgtgagattaaaatgaagaaaagcttgagaaaatgggtcaaaagtataaatttaagaagaaaatcagataagccttttgaaagcctcactctctgtaacgccctaaataattnnnnnnnnnnnnnnnnnnnnnnnngaaaccctaatcccctaatcgggattactaattaaaatagcgcagaa

SEQ ID NO: 24572 - DNA, 4666 bp, Cannabis sativa
  modified_base (2673)..(2675): a, c, t, g, unknown or other
aagtagagcatataacatgagtacttcggattgtttgaacaacgggtaagctatcaaactcaacctcaacctttgcttttaacccaactaatagcctatgtaatctctattgccttaaaaccttcaaccgcatagcaaccatcatgacaatcagttttggcttcaatgagagttttagaatgagatcgagcaaccataccaaatcctaacatattttctctatcaaacagagtaacatccacattaatctttagactcgatttagtaaaaagctcaactccatcatcagtattgtcaaagcaaaaagatgacaaagaagttttatctttctctttcaaattgtaatatggttgcattagattctatgacatgtttcagatgacgtctacatacaaatttctcgactacctgtagtgtaaaaaaatattttcacaaattttctaagtcaatcttgtagaattatttaccaaatatcatgtttagtttatgttgtgtcataagtcgattctgagattgagtgaaccttaagaaaaaagaaaaattattagaccattttattaaacaaaatatgtgatattttcaaaaattattaaaaatatatatatgtaaaatgatttttttttttctgaactggatggactctaaacataggcctaaccctaatctatcttagttcaggcccaaaccagtatccttataacattttttgttatgtctatgctttcaatctaaaatttggtagggtgtgctatagtatgtgaaatcaatcactttatatagaaaaatatgcataaaaaaaaggttactcacacttaaatatccttatgcaccactgaacttaatacaataatgtgagaaagtggataaagaacattataactaaattcctttggagatcatattcatattcacattcacaattatctcaaaaaagaatcaaatgaaattcaagtacaagttagatgaaaaaggtgatatttcttaatcttataattggataaaaaaaaagaaaaaaaaattataagaatatgcatcttgttagatttgatttgaatgtactttgatcgaaattttaatatatatactataaaacattatttgatgtaattaaaaaccatcaaccaaattatcaatttaaaaacataacaaaatctccttaatatatttaattaatggggcttataagttaaaactaagattgatttaatgattattaatcaagaagaagagctagccttgttctcaaacttaaatctaagaacaaactcaaagcaaatgaaaatgacatttcaagaagaaaaaattattcccattatgattttttttttttttgaataatgtgaatatctttaaatagagataaaaatttcgatgccttttcataaaaaaactaaaaaataaaaatagcagtagtaattaattaaagaaattcctttgcatctactaaaagatatgagatgatgataaagtaaaatatatattttactaactttttatttttataaataaatggggatatctattctacaataggagtgttttagaaatggagaaattgttccatttcataaggaagaaaaagacatggagaaattattaattttttattttttatttatattcgagttgcggtagatattttatttgttttcaaaaattatgaatactttataatgtaaaaaaataaaatttaaaataatcagttgtacatataaaagaataaaaaatatccacatacacaaatgaatgtatggattctgtttttgacattgtatttaattttttatttttcaaagaaaaataggtagaaagtttacaataattataatatatataccatcttataatttctcaaaaaaaaaaaaaaaaataaaataaaataccatcttataaaaaatttaaatttaatttctctaattaccaaagttattgacaaaagtaatgcttctcctagctataaacattcttcttttcaaaaaaaaaaaaaaaaaacaatttagcctctaaattcagcaattattttatatttcatacattatatatacataattatttaatctggcaaaatcagataagatcttttgaaatataaaagttgtaattgtttttttttttttggactttttttccattttgcatattctcaagttgactattttttaagagcattcaaggtgtcaaatattaatgaccaaactatatcttgcccaataagaagataaatattataatgcaatacttaaaaaatatgatttagcatatatatatatattaaaaattatgttatataatttttttaatgtcaaatataacctaaaatataacatactaataataatattatacttttaatagattctaataaaattggacaaattaaatattataccttataatatttatttaaactcaatttcaataaaatttattgattattatagatgttaatttatagttttatttaaaacagcattgcatgtagcgtgtactatagcataataatgctaatcatatattagttaatttaaacatgtatttgatttgaaaagatgtccactacatcataactcatataaactcatatctattaccaaactaaaaataatgtattattatgtcaaaaaaaaaataatgtataattgacctaaaaaaatgtattattattattattannnttattattattattattattcacactcaaactaaaattttggacccctcaataaataaatgaaaaaattacactgtataactactttttatttcttatcttaattttatttattttttattttttaagttatacctagttttataggtcatatatccttattatgtgtgttagggattctaattttaataagctatgtgatgttatattcggtactctgattataaaaataatatttattaattaaaattattttacaattatatttaattaatgtgtaataaaaatggtatttctcaacttatctttaaataaatcactttaaatttgtgataaaaaaatcataaatagatatctccacatcacaaacaaaaattcaagttatgttgctgaaaaaaaaaacatgaaaaaaatttaacataaattccaaaatgagaattgaaaagattaaaaaagaaagaaaagaagaggagagctcaatgccagttggagcacaactttatttctttgcattttcaggtttaagtggtttaaatttaggtttatttcattgttaaaaaaaagtttagttcatttccttttatgtttaaatttagtattaattgagattcttagtttttttttttattattttaaatacataatttttaatttttatggacctagtgtccacttgtgtcttggctccaccaactacatgtaataaaaataatgatgtatattttaattatttttatcaatataatatacaagtgtcctttgcttattattatatataaaataaatataattaattcttccctaatttgaattacaagtaatttatctaaaaataccatcaaaactaaaggctattatttttctttttttcaaagaaaattataattttctcttctaggttttaacaaaatttagtaattttacagctaatattttaaatatgtacatactattttgagcaacaaaaatttcttaaatagattcaatttcttaattttttgattatttggtaaatatgttctcctccaacaaagcttttgtaaaattacttaaataaaaaaagtcagagacattatgaatttaaaaatggtatatgtatttataattttatattcattattttattttaataaaactttttctaaaaagaaaaaccaagaatctttgatgttgtcaagtgtttgacacgaactcaataatactcataatatataaaataggattcttgagtttcacttagttttgcaattcagtccttgaaaattattttttacaattaagtcttttatttttcataaaaatacttaaaggggtataatagttgaaaattttcaaaatcattcattaaaaaatacatataatcttcttagtaataactaaaagtttaattgctaccctttattattatttatttttcttttaaacaaataagagatctgcaagctttcatgttgagattcataaaaatgaattaacttccttcgttctcgctccaagtcaatctatgagtttagtgctcgtccttgtaattttcaactgagattgtcatggtgctaagtaaatatttctgttttttttttttgtttcttatattggttatgttcttcatttctcatctatagtttttttttgaacaacttatttagtaaaagttaataatttacctttcttttttttttttgctaaattttagctattaaatttaccattgacttggagatatttcctcctatgttgtagtatttctctacacaaaaataaaagattttgattgccaatattttaggagctgaattacaaaacagcaaaaactgaaaaagtatatatataagctaaaaagtaaagggtaaatttacattgcacctcttaaagggatatttgggtagacttcctatttatttcggtatctaaagaacttttaatttattttttatgatcgtaaatgttataattatttaggattgtctgaaaatttttaaaaattctaaataa

SEQ ID NO: 24573 - DNA, 2092 bp, Cannabis sativa
taatagctgaaaagttttggattcaaacccataacctctctctttttcccattcttttctcactactaagggtttctccaataggacactaaaattataaaaatagtggaatttggacacaaaattgctcaaatagaacactaaatgttattctatatacgtgggagtctatagtgtcccactatttagtgggacactatagactatacgaaattaatattttatttttttaaacattaaaataataggtttgtgattgaattttatatttatatacatattattgtgtgagataatttaataatacaaaatatatttttactgttgtggttgaaattgaaaaagaatttaatattgaaataatatcctttttagtattgatttaatactaaatttaaatttttcgattgcaattactcaaagattcttagtggcttaaaacaaatactattacttcacatgataaaagttgtgataaactcaataatgatctgatcatctccataatataataaaatataattttgaaatagattaatatatatgattttaaaaaaaaaaataaataatataaatgtccatgttcattgttgatgatgagatcaccaatcaccattcaccactcattttactgtcattggacaatggcttaatttgtaccagatgttgtctcctacctaaatatctatatttatagttctattttatattccaatatctttgtttagggaaaataaaacaaattcagagctaatcttcacatataaaataaaaacaaataattgggtatgagtgtgacaccatccacattttaataaaacatttgtcttcttcttggaacacatgcaaatctcctaccaatatcaatatttaattactattcatttttaatttaagattgaattttttttttctttaaatttgctccttgacttgaccattctcttctaagaatattattaattatatatattttgtatcttattattctttttaaagaaaaatcacaaaacgagcaagctcttaaaaaagataaaaataggtaatatcattaaagatgtataatacaatttgagtaaactcaccaccaaacctagctaatagtcacatctaagacatacttagtaagattgtagataacaactttaagtgtcctaaaataatgaaaaagactcgtattataaaagaaaatcaaattaaaataaatatctcttaaaattaaatttagtgatgagtctaaaaaaaatattattattaatcttgttaactacattaagatagtttcgaattaaatattatccaactaagaaggtgacattgattaccagcatggcaaagagcaaaaatttctgcagttttagcttaaaaaaactaaccatgctaaataaccgtgacaaaaacaatcccataaacatcatgaatataactataccaatgccacaaaatcaaccttccaaatctaaagtttcattaatattaaccttaaaataaaaagttataactataacttaaataaaaagcatgtttaagagagaaacttaaagttgtcaagtaaataagaaaaaatgttgtagtctttaaaaaaaaaattcaaaaaaaatcataaaataaatagatttatttcagaaatacacaaaaacaataaaaaaaatataaaaatacagatatacataattttaatattttttacgatttttaaaattttatttataaaaaatacggtctttttatgttttatattatatctttattattttgttgttatttgtatattatttttatgttatcttgatattatttagatattgttttcttattatttacttattacttttgtactattttttttatagaataccatacaaataaaaataaaaatatttaaacctaaaaatttactaaaaatattattttgtataaatttccttaaatatttgaaataaattaaatcttacattttttaatttgttttttatgtgaaaaagtgatttacagtgtctaaacaagaaaaagatcaaaaaaaaaaacacatttttagtatcgtatcgatcccgtaaaatctcaagtggtattcctatcaaagccacgcatg

SEQ ID NO: 24574 - DNA, 1498 bp, Cannabis sativa
aagctaataacagtagctgggatgttgaaattgtgagagattttttctctctcgaagatgctgcaatcattcttggtattcctataaatccctttggtggtagtgactcctggtattgggttgctgagaaaaatgggttttactcagtccaagttgcatatagtttgattcaaggtctgaagcatatctcagacaattcagaaagcaatgagttttggaagaagctatggtcactcaaagtgcctcctaaagctaaagaccttgtttggagggcggcttcaaactatcttgctactaaaggaaatttgtgcaccaagaaggttttggttgacaatgcttgccctttgtgtggtgtgtttgctgagacgcaatggcatattctggtgtcctgcaactttgcatggtcatgttgggagtatgctggtttggctgctgctagtagagaattttcttctcttcggtcttggttggacgatacctttaggctagtagatggtgagtccacgggcagagtggtgatgctgtgttgggccatttggtcagctagaaatgatgttttatggaagcagcgtgttcgaagtgtgagggatgtggttacatttgccaattcgagtcttgatcaatggttgaaagctcaaggaaagggtaacattcccctgttgtctcctctcaaagttcgagatggatcggagtagtgggttaagccgacttcaggtatcaagttcaacatagatgcaaccattttcgatcattccttcaaacatggcttcgggtgagttgttagaaacatagatggagatctagttgctgcctttgctggggtcaagcatggtaaagtgccctgatttggctgaaatcatgggcattagggaggctttaagttggctaaaaaaatcacacttacacacgggctattgttgagacagacagcctggtctgtgctgaagccattcgaagtgcagaaatctttgcttcagctttcggtttggtggtggaagattgcaagaacattctaaataatttgttaaatgtttcggtattttttgttaagcgttctgcgaattttgctacgcactttgttgcccggcattctatttctttagttgagcgtatgttctctattaatagtgttcctttggagttaatgtctattcttatgagcgattgctcgaattaataaagaacacttcttttcaaaaaaaaattaaaataaaattgtaattaataaatacaaaaaaaaattacaaaatttacgcaaaaaaaaattcaatttattgtgccaccacattagcatcggaattgatgctccgtcgccttcgtctcctctggcatttactttcttgattgtttatgatagattcaagcttttggctaacaaaggatagtattttttgttgtcagtgatgaattgagaattgaatagacaaaagaaactaattcaatatatgttaactatatattaacgaaataataaataatcacttttatgagaattttg

SEQ ID NO: 24575 - DNA, 2194 bp, Cannabis sativa
ttgttaaaataattaagctaagagatttatatataaataaaaaaattatttataaattttaattgctaaaaaaggtcttcttaaatatttatttaattaaagtttgtgaattattgcataattgaagtcctaagtccaaactacaaagactatatttttaagtaagtgcccaagtggggttcagttttctctcttttctccagtgtagtttccctctctttgtcgttttccccttctttcgctggcggtttcctccatgtcctcgcacttttcttctcaatccgacttcaatggagtcgtgctccacgatgatatgagtcccaggcagttcttatggattcctggtgttatgtatgaatcacagttctgcatttatgccttattccttcgctttctgttcgcttactctattcttctatcttttatggattcgattcttcttgatatggattcccgattggtgctttcagaaaaggaaagtgcagtccattccttcacttctgctgatctcactgatgagaacaatgctcccaaattttttcttatggcgcgatgtctatctaatgctattaacccaaaaacttttattaagaaaatgggtgacttctggagtaacaaatgccgcttccaggttgaggtttctaaaatgcattctgatttatttctactaacgatttgttgtgcaggtgataagttgaggattcagtatggggaaccttggcattatttcaaccatctcattttgctacactcaccaaatcacttacagagtgtttcgactggtgatttctccaaggtgcaattctgggttcaaatccatcgtctcccttttcttagcaaattcagagcgctcgctaagaaggttggggaatggattggtgactatgttgatatgaagattctcttcatgaaggctgggggtcttttatcacaattagagtatggattgacatctcccaacctttgatgagaggaaagcttgttaaccttcctcacgttcgggatgaacactggctagaatttcagtatgagaaccttcctattttctgctttcattgtggagttttgggtcacccttttaagaagtgtagtggttttttggaattggtggatgctggtagggaccctgacctcccttacgatccttttatgttgggcgataaactttcgaattcgggttatgatcgttatcggagtgacttttcaaaagccaatgtctacccttttctcactagactagccaggaaatcaattggttcaaccatccctaacacaaatacctacctaaaccgtatggccaagctaaatcctcacccttcctcactcactgaagccgaaaatagtactcctagtaaccatgctccaatacaaaaagaagtaattcctgagttaccatcacccttcccttcctttttccaaagcttatcttcatcaatattgaccaattctgttgatcctcatatttccatctccacaggccaatctaacactataccgaaacacagcctttttgccacttatcccccatctgaccaaattgtttctgcttttgggaaaggatcatgtcctatctttaatgatgctacaattacttctggtaagaataaaaaaaaggctattacgattgatgaggttattcaagatgacagtagctccggtaaagctttcaaaagacaagttgatcctgttaattttcgaagtgtgttaaagagatgtcgcaataacagtgggagcagcaaggtgccaaatgagttcgaccctcaacaagtttctgatactccttcggattctattgaggagatttcattttcttcatcggatgttacgcagaagcagccccgcatggagccatgaagattataagttggaatgcgaggggattgggcaacccttcggaattcagacatctgaaactgcttgtccaaaagcagcgtccgcatttgctttttattatggaatctaaagtagtctgtaattctattaatcgtgtctgttctgtccttaagtttagcaattgattggaggttcctaggcaaggtttgaaggggggattgttgttgttatggaaggatgatattgatgtaactctgaattcgttctcaatgaatcattttgatgtttttgtttcgtatgattgttgccctcggttccactttaccactttttatgcttctcccgaaactcaccaacgatc

SEQ ID NO: 24576 - DNA, 995 bp, Cannabis sativa
aagccaaattattttcaaaaaataattttctgtttttaaaaataaaaaacagttttttagttatgatgtcaaacatgcacctaatatttgtattaaaattacattggataagtagggaggagtatccaatggagaaatcataaacatgagagttgctgtcaagccaactgctactattgctgtaagtctcataaatcaaaatcattattagattcaaagaaatctcatcaaatcattaacattagtactactggtgttattttttattaatttcagtaaattaatattcaaaaaaattcaattgtggcaagtataaaataatggttgatcatgatcatcttcatatatgttcagaaaaaacaacttacagtgacacgagataaaacagagacagagttgatcactcgcggtcgacatgatccatgtgttgtctctagaggtaccttcactaatctatatatatatatatatatatatatatataatatgattaattaattatgagtattaattgggttattgttatttagcacattaacactatgcaatgcattaaatgataatttggattctataatttacaagatgaatcaaattggtattttcacatcaattttagtctaataagttttaagaaaattcatgccctcagctcaattttctatcagtaatttcagatttacattgaagaaacactattacaaaagtcagaattcgtgacggtcctaaaaacgcttttataggggactgtcgctaaaaaaaacaactgtttaaaacagtcgggaaaaattagtattcccgatgatttataacagtaattacaggaatagacgatggttttaattggaattcgtgaatttatttggcccttatacctgacggtttaaaaccgtcgcctatattaaaccgttacctatactataggcgacggttttaaaccgtcaagtataagggcccaataaaaaattgttacctacttctcgccacatttctca

SEQ ID NO: 24577 - DNA, 2115 bp, Cannabis sativa
tatttatgctgacgtggcaatcggtgtggcaatcggtatggcaatcggtatttgtgcaaataattttcttaaaggtatttttataaataaaattaattttaggtataatattgaaaagacccctaaaataaatctttcatttgataacggtgggatacttccttacctatgaataaaacatttatattgtcatatttattatatatttaaccattgcagtcatagtttcttttgctttgagaatttattaggcacgaaatcgactctaactatttgtacaatttttcttattatatgatttgtttatttcaaattgtgatcaattttaggtattttaggtattataatttttattaacttttatttcaagatgcattgaaatatagattgttttccctccttcatttaagcaaattggattagttttagtctagcatataaatcaacaaagaacatctcatcatacatgttaggagaaattagacccaaactaaaattacaaaaaaaaaaaaaaaaaaaaatcaaaaatcagatgagaagaataaaacaacttcaatttagtttcagtttcaatagttttttttaatcaatagaataacaatatgtacatataatcatatatatatatatatattatttaatatattaactttttttatagttataatccaaatcatacttagtacacaaataatagcctaactattaaaaatcataatatatatatataaaaattataatattgagtaaaagtgtaaaatattaaataaattagtcttaaattagagtaattattcttgaaagagttgatggttagaaaaaataataaaaaataaaagaggattatcattaaaagagtaaaaatgatgagttcaatttttatttgttttattatattttatacttattatttatattaacaaattgatgaaaaaattataataaaaaacataactataattatgtaaaagttgaataaattgaatgatatacgaaatattttttggaaataaataaataaatgtgtgtacagctgcgcgaagcgcggcattgttacctagtttactataaagaaaatagtattaacgtatatgttaagaattaagttataatatatatagctcactaatagtattttcagtggatagttagttaattgtagttttcataattaattataaactataaattatataacgtataataaaatcaagaaaagaaaaagagataataaatatatatttcaaaaacattacatcaaataaatacgttattatgtaccaaataaatacggtattagacaattattgcaacatgaaaatgttgctgggtgaattttgtgtatagggaaactaattaagttgctcatgtctaccaatgaagctattaacaaagctagtaccatgtggattgaggttatactctcttgtgctaatcatgcgatgttgcatgattggcctaatctttgtaatccttgtttgtattaatgaattacttttcaaaaaaaaaagtaccaaataaataatacttaacaaacctctttcttataagtttttcaaaaaaaaaaaaaatcaaaatcaaaataaatacaaaaaacttaacaacaaaataaacacttattatttattagttagagtatcagaaaaaatgttaagattgagagagtaaattatcataaaaataaagatcatcgaatctaaaaaaactataactataaagagagaaaagctgaagtcaaattcacaaaagttataattataaaaaggaagagaaacaaaaaaaaaactatgatagaattaccttatggatgaaattcgaattgtaagacatcgtgattgtcaattgtgcgaaacaaaactataatagagttacctataaataaagtttagatggtaagacctcgtagttgtcaattatgtgaagaggagaggagaaaataaaataaaatattttatcttatatatatatataaaaaaattatatataaaatattttaaattatatatataaaaaattaagtaataaagcgtgcttcgtgtttggttatattttatttaatgataataagtgataaaagtatatcaaattttaaattttaatatttatatatatata

SEQ ID NO: 24578 - DNA, 2217 bp, Cannabis sativa
ttcaattaacaaaattctaaaatagatcatttaaagttttaaaaaaattataaaagagtaactaatttctatattagtaacgaaataatttttttttctggaaatagcgaaaaaatatatgtttcccacattttaaaatgttcacattgaagagtaaatcacaatgaattttttaggctcatccgagtaactagcggtgtttgcagtgcgtgtggtgcggttttgacaattttttcaaaccaactcgtacatgcatttttttctaattttccaaatcgcactcgcatcgcgaaactaaaaaactgtagaaattgcatcacaaaaaatggtgtggtgcagttcaatttttgcggtttgaactatcaccaatacaacaaaacttgagcaacacttgtcaaaaataccataaagcttgaaaataaatttaagtttcaacattacaataattagtgggctttgggttggacattcacattttggatctaaataaatataaaaattgatatttttataatgtgcggtgtggtgcagtttcaaacgcatattaacaattcaaaactgcaaactgcaccgcaccgcgcggtataagaaaaattcaaactgcaaactgcaccgcatggtataagaaaaattcaaactgcaatcgcaccataaagaattttaaaccgtattttttttttatagtatggtgcggtgcgggcagtttaagcgatttgatgaacacccctacgagtaatgacttgaccagaaattatttgtaaagtttaagaaaagagagataaataaaaaaataagaacgaagaaagagagaaaggagagagagaaaggggagagagaaagaaatgtattaataagagtattaaaacatacacaacaataaaaacgttattgataattgaccaagtcatttttgataattagataaaaaaaataaggtgtgaagtgtaaaatttttaaataattataagggttatagatttcaaagctagcaaactaataaggattatatatctttattagtagtaactattcaatcccttaaaatataaccattttgatatatcagtcataagttaaaagtgtgttaggtttaagaggctcaattttttattttattttttaaacaaaggaaaactttttattcaaaataatcactgaacaatacacaatgcaaagtagcaacccacctatcaaaaagtagaaatcaaagctagtacatcattatctcttttagttagctttgaagtattacaaacaaggctagctttaacaatagatttaatttgcctgttcaaggcagtagcagaccaacaaacaccttaaaaaacaaaacaattttgattaagttagacacagtacacaacaacagccaacacaattacataaatcgttggaacaatccccttaggcaccttagcaaatattgataaccattcttcgaagctctcaggccaattacatctactaaaccaatttcgcacctctagtaataacttcctcgtgaatgtacaatcaaaaaagagttgagaatgagtttctaaatcaaaatcataagtcggacagaggtaagaatctaaacttagaaacttaacaagcttatcacgagttaaaagaaagcttttatagcttgccaaacaataaaacgatgcgtaggaacagagtgtctatgtcaaactaatctgaaatttcctactttagtattaccaatttattaattaattagtcaattaattaaatgcagaataatgaatatgatattgaaacaattattctatagctacaaaacatgactctataactctagaatagaaaaatcaacaaagaataaaagtgcgtaaaaaataaaaaaaaaataaaaacacaaggtttttacatgtgctatcatcaatccttacatattgttactagtccacagggtcatgtccagagataagattcattagatagatctcaaaaatacaaagtaattaacttatgcatgttattatatgccgcaagctagatgtatttcaccttttcaaatgaatcttgcttaaacttcaagtgtacgaacttccttttatctgcttaaagggtgtttgctttctcctgaggcaacacttgaaaaactttccccagaaagcttgaactgttgggctttgtatcctaaataaaattctatttcaatgtaatattttctattcaattatcaataaagatacagatttaatttcatta

SEQ ID NO: 24579 - DNA, 2747 bp, Cannabis sativa
tttcaaatgccactcaactgcaaaagttggcttccatctatgatgatgatatgtccttgtgtcagtcacgcgtgaggggcagggcgcgaccattgaggagttatcttctagaaatggctatatctttgacagttgtttagtttttggcgcgaaaattaaaaaagagcattttcatcattgatccacaccttggttctagggtgcattaaatgtgaggatacacatagatttttggactctccaactgttggatgagatttgtgattttggaagtaagattgtgggtcgttcatctccttttcacgtggattgctgttttgggtataaataccccttgtgccttctagttatcacttttcattctttttcaaatttttaatttttcgaagcgtacaagtctctctgcaatctctagaactacgaatcgaatttgattcaaaattttcttctttaatttggaaaatatcgtagatttctatcgtttactattgttgaggattaaggcaggagagttcccacatcatcggcccccaatgatcaggacttctacaacacgagaaattacaagtctagatttcaactagagatcgatttgttgatcgatctagcatctcgtcttcacaaaaggtgcgatcaactcccctagcctaatccaacgacaattagctttatatctccattatcaatatcaagttatttgtctatggattgtattttttgaatttgtcgtttcaaactatatttgcatgttttgttctggaatgaagttagggtttttgtttgtgcgattgccatcttaagtagatttaagcatcacgaaccatattaatttttgaaattccagtttaaaaattcctggagttggtcgatttatagcaaaagtgctggtaaaatttttctttcgcccaaaaccttttggttttgggttcttcgttaatttttgtcatttttctctctgtattgttcctgacttcttatctggaatgaataacttctagaagttctcgtttcaggataattagtctagttgggacctctccaagcagtttatggggaaggacccctagctccctttctatgctaggtagttagggtggctaactgcttggattttctttctttcgtacaaaaattatgcataaacaaactcatccagaggaagctaattcagatgaggaagtaatagagcgagaagacgctccaaaattaatcctaaatgaaaatccatgggagttggaccagcatgtcaacatgttcaggaattataacaatttgaggaaatacaagaccctacgagggcttgaaagggttcaggattattttgaaataggctctccattctcggggagaggtccaacaagtgcactaaaggaggcttcagtctctagaactgggctcatatcgagatgggtgcacacttgcctctgaggtgctatttcgtaaacttctacgtcgtggccagaatagctcctttttaacttatttcccaggcgtaccgtttactgtcaggttggtacatcttttgtgctcaacacggtaagtctgtgccaacatcgaaggagatcttgtacttttataagattaagtcttcacccatgaggggccacaaggagaaggtgggcttttataggctagagtgctatactaggattgtcctttgccccaccagttctacgaagtatacacacgactttagagactactacttctacacctccgacttcccattgaagagggttcctaccctcagtttggatttcaatatggcaagtaagtatcattcccttctttaaactttaagattttgcttttactcctacttttgttttctacatctgccagactgccttccccaactacctttgactttagagttagaagagaggataactttctacaaatccttcttgtcaaaagagatgcaagtggagaagcttgtaaccactaagaacctctaggaagtaggtcttatcgccccacactaggacatggctcaccttttcgtgaaggacactgtctaggatgctcttcgaggggatctggacgaggttaaagaggctatcgcagttattactgctaaagaggctctgaaggcaatgaaagctgatgagtagtggctggcagattggaggagacaattcccagaaagcctaagcgaggccaaagaactcactattaaattcaaggaggtagtgtagaatgggggtgctccgagaatgagcacctctagtagtggtgagacacccttccatataattagggctccaactctaactgatttcaagactgtcagtcaatgttgatttgatccatatttcttaaatttagaccatcgtggatatccattcagtaagtatatagataaattagagtgcatcattaggagtcccaaccacttcgttccacctgtgcaccatcatgtcagagtggacgcatttagtaaaatttactttctaggcttcttccaagacgagactaacttatgttgagaagacattgcctttttgatagggggaaagtcaattatactaaaattaatggtttggatcttcttaacgtcttgcatgatgatatcttgtaaagatcacatattttgttatggccttgtttgatggacaatttttttgttttaagtagatcaaccaaccactctataaatggggcaactaaataggttcgcgtgcaacatcaaatcccaacttgacaaggttcaagaaatcgccagggtggtggagatgaaggaaaga

SEQ ID NO: 24580 - DNA, 3243 bp, Cannabis sativa
aaactactctctctagccacacaatattttttttctctctcctgcgattcaaattgcttagtttctcatatgatcaaaattaatcgccaaagatccttcatcaagaaattgattttttcatcaagaaatcgatttcttcatcaagaaactggcttcttcattaagaaactgattttttcattaagaaactaatttcttcatctgaaaactgttattatataaaagtaaaatttataacaaaaaacttataataaaaaaaaaaagacaaaacacaataagaaaataaaaacaactccattaaagtaaaatagaggtgctcaaaaaattactaaaaattatcctataaaactgcctaaaaataaataaaaacattaaatgtgggctttgaaaatataatttacatatatatagtatatcaaataccataaaaatacctgaaaaaaaatattatataaattggtcaaacctaaaaatgtcatatttaagtaaatttttaaaactcacaatattgagtgtaaattcctcatatatatatatattgttatctaagtctggctttaggcataagcgatcaaggttcgtgcctaggtcctacctagtccagggaccaaaaaaaaaaaggaataagttgaaaactaccatttttcattacacatgaatcaaataattccaaaataattttaattgataaatactctcttttataatcaaagtactatatataacctcacataacttattaaaattagagtttttaatgtacataatgaggatatgacttaaaaaattgggtataaattaaagaataataaaatgaaggtaaataaaataaaaaaaaaagtgagtattcaaaaaaaaaaaaaaaattccttttaaaagcaaaaaatattactatgtattttaagggtcaaacaccataagagataatatgtatttcaatattagttccacatatttgtggttgatcaatatcatgttccttcatagagggaccatttgattgaaatcactttcaattagttgtactcctctgtttggctagcaagctagctccttttagaggattcttattactatcctttactagaatcttattgtatgtgtgtatagtagataaagcaatcattttatatgattggtagaatgttgatgttattcttatataatatatatatatataattaaattgctctttacgtgatagtttttctttctttcttagtgtacaatagtgcctttttgttatctaatataatagtcctttatatattgtagaaatatactacattctattcccattgatgttggataaggactaaagctagactatagtataagaaagcaaagaagatactcatgactaattaataaccattttgaatttgaatgtaaatatactatatttataattaaattattattatttatatatatgttgtataccgattggtttaatatctataccactcccagaaggcactctagctcaacaccctagaaaatgacaatgcaatttggtaggaggaggttataaatatttaccgacctgatcatattcattaaattataagatcggagaacacattccataatctatttgaataaaaagatactatcttatctgtataggtactcatttgttacaatattaaaaaaaaaaaaaaggaatttcctagtttggtaaattatattgttgtttggttttaaaagcaaagcctataccaccgaacggtaaaattgagtagaatagacattgatagaaaaaagtcgataataaatgttatcgaccgtttacaatcgacggcaaaagtgagaacaatcgagataagcacttttccctcaattttggacagttgcagagtaaaaaaaattataaatatgatctaaatctcacgaccgaaaccaaatcttagatatcaccacccaaatacacaaatattaccatactaaaaccatttataatatatagtatagaacacatatacaaaaatgacttagatctaatataaatattttaaaaatatatatttcattataaactgtcttgtctcttcaactttattggaaagctttttgacatatcacatcaactttattagtagttgtgttagttagtgggtggatcattatttatccttgtttaacgaaaattgggataatatttagcctagaagtttttattcggcctttggtcaatgaagacttaagacttatcttgtttgcattagggatgtgtgattaattgttgtggtgactctaaaaaaaagcaattggatagagcctagaggacattggtctcattcaccagagcccatcgagcgttagggcgttagagatttttacacaaagcctgaagacattgttcttattcccgaggtggaagaatctcaattagaaaataaagtcttgaatgggaacgacttctttaagtgtgctagcggagttgacacttgaagtgaatcacaccaagcctggaggcgttggttttactctaaaaagttcccaaaccttaggagcgttaggattgtggggagaattgcaccaagcctgtaggtcttagacatattctctaggtgcgcctaagccatggcagcattaggacttggagagaattgcaccaagctcaaaggtgttagttttcctcgaggttcctaagccatgctaagattaggactttgagagaattgcgtcaagcccggaggtgttgactattctcaaggtgcataagccattgacattaagacttggagagaattgcgacaagcccaaaggcattgactattctcaaggtgcctaaaccattggcattaggacttggagagaattgcaccaagcctagaggcattgactattctcaaggtgcctaagccattggtattacgactttgtacttaagccattgacattaggactttgtgcctaagtcattggtggcattagaactttgtgcctaagtcattggtggcattaggacttggaaagaattacgccaagcctggaggcgttggctattctcaaggtgcctaagccatgctaagattaggactttgagagaattgcatcaagcccggaggcgttgactattctcaaggtgcctaaggcattgccattaggacttgcagagaattgcaccaagcacatagacattggctattctcaaggtgcctaaaccattggcattaggacttggagagatttgcgtcaagcctagaggcattaactattcttaaggtgcctaagcca

SEQ ID NO: 24581 - DNA, 1264 bp, Cannabis sativa
gagagagagagagagagatgtagttcaaacaaaagaaaagtaatccatttgacttctactgttgcattcgccaatgctcaaaactcactttttgtgcttgatttggcaacaaattgttgtttcttggctgaacaagacaccaaattattgccaaaaacataacataccttcctgttgatcttctatcatcaacacaacttgtccaatttatataactataaccttgtagactcaaagtataagatcacttgtagctttagaccattagagaaggcacatttgacttaccttagtagtcttttataggctttctagtgcttagttgttggagcatgaaaaaattagcttaatttgttgataataaagcaacatcaggtatggtcaaatttaaataatgcagagcacccaatgttcttctatagagagaaatatcttcaaaagaatcatcatctctaaggcttagtttaaaggtagaacttgtaggattgggacatgacttgactccttccatatgaagtctggtttaaagatcagtattatattaactttgacttaaaatattcttgtagcatccctataaatttccacaccaaggaagtaatgaactagttccaaatctataaaaaaaaatgcctggttcaaatcagaaatgagagcactaatcaaagttgaatttggtcatgttgtaatattgtcatcgacatataccaaaaggtagacaaaattattgtgagagccataaatggatagagaagtgtctgacttggaagcttggaaaccccattgaaacaaggtttgttttagcttttcattctaggctctcgatgcctatttaaggccatacaaagcgttgtgtaatagacaaacatgagtaggctttagttcatcaatgaacccccgaggttgctgcgtatacattgtttcttgaagagtaccattaaggaatgcattactcacatctagttgcttgactggttaatttgcagaaacatcaaggctgaaaacaatacaaactgtagttggcttgacaacaggactaaaggttttagttcatcaatgaacccctgaggttgctgcatattcttgaagagtaccattaaggaatgcattactcacatctagttgcttgactgaccaatttgtagaaacatcaaggctgagaacaatacaaactgtagttggcttgacaataggactaaaggtgtcctcatagtctattccaggtgtttttgaaaatagcctttagtaggggtgttcatccgat

SEQ ID NO: 24582 - DNA, 3337 bp, Cannabis sativa
cccagcccaattataaaaacatgtctattaatttcttagtgtacgaacaagaagtaattcaatcaaaaaatcagaattcaaaattatacatgtaatagtactaatgtctttgaccaaccaatgggaaagtaattatatcggagaagttggaaagtattaaccaccgtcttataattcacgtgattacatgcattgtccatgcacgtacgtaatgagttgttgactatatatattagctttgggagtattactattagtactcattgagctcaattccactctaagttaattctacatataattactcaaatttcaaataacatatatatgcatatatacaaattgggcctcacaaaagatccattaactacttttcaaagtaggccttttatggatttggataaggtggaaatagtatcgagtcagccatttttgcatgttatacaacaaatctaattattttaacaaacattatactccactcacaccaatatatattctattatatatttggtgcctagtaggtataacttcacttgcatcaagataaaagtagttgaattttttctctaattatacccttttttcgcctacaattctataaatgcaatatatatcgcacatattaatttcattcacaagttcacaatcacagccttaacttttatttatttatttatttacattctctcaacatatatcaaactaaagtacaaaactacaaaattgatatcaaccggcattgacaatttcactaacaaaattaaatgaccgaccaataaaaatattataatttgcgtaccaaaattatactctaaaaattcaaaacattcatttcacacacaatataggttgactttcttcttttcgtgtactaattatgacacattcaataaaattagaccctgaatttaactatttattaaaaagaaaaaaaaagtaaaaaactgctacttaatcaatctaataagacaaaaataaccaattatgggcctaatcgaaatcaggggaacaaaataaataaataataaaaaaaatatataaaaagaaaagaagataatcagccggaaaagccgctcaactcaccggaatttccgagagctgttagactttttacgagaagatatccggtcaacggtggccggttgacttttacatagagcagagctagccgtgatcgccaaagaacagaggtccggcaacgaaaggggtttctgggcacgcgactccggcaacaagaagtagatttgacccgactgaagctcctcctcttcggcggcgcgtgtgagacacgctcccactgacatagtctccgcgctgcagaggaagaagttggggttcttggatgtgatctgtttggcttggatcggagtcgggaactcatggaggcggccatctacggcgttgatcaccttggcggtggcggcggttgttgacagccgtcggattcgatctgacgccgacatttggttttgtgatccggctgttataagccttctggtggttggaatttgagtggaagcacagacccccatttgattttttttttttgtgattttgattttgatgattgaattgaattgaatctgtattgatataaatactatatatcgataatgtgaatagatagatggatagataggattatagaagacgtagctaataactaagttagagtaagattttggaattttatgaaagaaacatggcctccctatattttttctctattaaatattattgtagctgcaatttgttatatataaatttatcggctcacctttaattaattaaattgttgtatatatatttggccctccaatttaatcattttagaaacaaaattaaagctaaaccataaggcgtatctttaatattgatatttatatattttcatttaataaataatataaaaaatcactgaatgccacactaatgtgatattgagcattgatatttacgtttttagattggaccgacgtacttccaaagtaataaatcagtccacagcagagtcaggcaacaactctgggtctagatgcaagtccaacttacaaacatgataagactcgagaaggccagaccactttggttcggaaaagctatcttgcctagaagacgaaaagtccattaggataccatcaaggagtaattcaaaacaggtaactgaagagacactcagaagtatctggaaaccattctacgtggcatcctccaggcacaaggccccacaaagtcagaggtttgccctatacgtcaggcgcacaccaccaaaagaaaacacattttggtccaacctctctataccaacatggttgtgcacgacacctatcatcaccaaacaccccacacatgcggatgaatgttgtctcataaattaagccttacttaactggcacaaagtcaatgtatactgtatattttaccccatcactgtgcctagttgacacatttaaaccctacaaggtccgagttcacctatacccaactcaagcatatacataaagggttgaaaaattatttctcacgtcaagggctaaggattatggtttttgatgaacttcagcaataatactcttgcgtaaaaatgctttaaaattgttctactttaataatattgactcgtgaactaagatttattaatggtccaaccacgtaaaaatcatcgtctcttcatttttaattttttcctcttcaagtttaatctatttattaatcaatttttgaaaatctcagtaaatagacaccttaaggtgccaatagtaagaaatactaaaaagcatcagtagtgtcttacaccctccacagtgtcatatcgctattgatacaattaagtatatatcatgtctcatatactttaatacaataaattttataatatatcactaacaaattgtaaggcaccatctctaaatggtgttggacaccactgataacttatagcaatacttttctaaaaatgccatgtgacacattaaggtgccaagcaccacaagacatggtttactgttattattgcatttaaatatcaagtcctaatttaataaaagatacagggaactgctaactgattataaatacacatttggtaccttgtgttttgtcaaataataaatacttagggcttgtccaaggaaacggtattttatatatatgtcgtttcattttgatacaagggggcactattaaagataacattttgaagtttattctacagtgtgcactgtagacactgcatatgattttttttaattatatatatatttaattaatatttatatatataagtgactattcaatggttacatttttattttaaccatatggttacattttt

SEQ ID NO: 24583 - DNA, 4593 bp, Cannabis sativa
aatggaggcaattcgatcctttccctgaacaacctagtagaagtggcagaaataattttaggcgatgggggtggtggaggaggatcctggttgtccttgaatgtgttagtgcctcacttaggtggcctttcgccataatatgtgtcaggcccccttctaggactgagtctttcaggcctgcctccttgaggctgccaactacaagaccttcttgttagcctccaccctcaccttcttgctggcgctactatcagatgaaccaacctacttcttgttgattaggactggcccatcgtaatttgagctatcccctcctgagttctccataggaacctacctcaaaggttccacgaataagaaaagtttggttaagtcaatgatggaagtggaagtggcttgcatgcctagagccataggagtagcctccagatttgaggtcaaaggtgttgcttcttagatcttctcccagaagcctggctctttctccctttatctccatcaccttgggcgagttcccaaacctcgtcagaacaggattcgatgttacccaggaacctatttagtagccccatttgtagagtggctggttaatctgcataaaacaaacaaaatattcatcaaacaagaccataagaaaagatatgatctttacaacacatcatcatgcaagacattaagaagatttaaacattaattatagtataatttacttttctcctagcaaaaagagcgatgtcttctcaacctaagttagtctcatattggaagaagcctaggaaagaaattttactaaatgcatccactctaacatgatggtgcacgggtggaatgaagtggttaggacttctgatgatgcaatctactttatctatatacctactacatgaatatttatgaccgtctaaattcaagaaatatggatcgaatccacattgactggcgttcttgaaatcagttatagtgagaaccctaattatatggaagggtgtctcaccactaccggaggtgctcgttctcagagcaccctcattatgcattacctccttgaattggatagtgagttcttcaccatcatttaggcttttcaggaattatctcctccaatctgccagccattgctcatcggccttcattgccttcatttccttcagagcctcttcagcagtaataactgtgatggcctccttaaccttatccaggtcccctcgtagagcactctgaactgtatccttcatagaaaggtgggccacatcttggtgtggggcgataagacctacttcctagaggttctccgtggtcacaagcttttccacttgaaactccttggacgagaaggatttgtagaaagatatcctctcttccagctttggagtcaaaggcgactgcggaaggcattctagcaaatgcaaaaaacaagaaattagtacatatcaaacaggaggagaaatagaatcctaaagtctaaataagggaatgatacttacttacaatattaaaatctaaactaagggtaggaaccctcttcagtgggaagctagaggtgaaaaagtagtagtccctaaagtcgtgcatatacttcgtcaaactggtgggccaaggaatactcctagtgtatcgctccaacctgtggaagcccaccttctccttgtggcccctcatgggttgggacttgatcttgtataagtcaagatctcctctaacatcggcacagattttctgtgcttaacacaaaagacgtaccaccctgatagtaagctatacgcctgaggaattagttggaaaggtgatatcccaactacggtgcagaaatttgcaatataacacctcaagggcaggtgtgccctcattttaatatgagcctagctttagacaccaagcctcattctgcacacttgctgggcctctcactgagtacggagagcctattctagaacagtcctagaacacttacaaccactcatagggtctcatacttcctcaaattattgtaattcctgaatatgttgacatgtttgtccaactcccatggactgtccttcatgatcaactttggagcagctccttgctccattacttctttctctgagtcagcctcttcttgacgagttttcttaggtataatttctgtacaaaagaagaaaattcaagcagttagccaccctaactacctagcatagaaaaggagtagggggtcctcccccataaactgcttggagaggtcccaaatagactaactacccataaacgagaacttcaaggagttatttgttctagataggaagtttggaatgatacagaaagagagatgagagaaattaacaacaaactcaaaaccagaagaattttgggcaaaaataaaattccccaaaacttttgctgtaaattgaccaactccaaaaaattttaaacgaaaaatttgaaaaataatgtggtttgtgatgcttaactttacctaagatgacaatcgcacaaaccaaaaaaccctaatctcattctagaacagagcatgcatatacaatttaaagcaatgaattcaaaaaatacattccatggacaaagaaacaatgtacttgatattagtaatggagatattaagctaatcgtcactggatcaggctgggggagttgatcgcacattttgcaaaaaaaaaaaagatgctagggcaatgagaaaatcgatctctgcattaaaatccagactcgtaatttctcctattgtagaagtccttatcactggaaaaggaaggtgtgggaactctcatgccctaatcctcaacagtagacaaagacaaaaatctacggtatattccaggttgaagaagagagctttgttttgaactcgattcgtagttttgaggactgcaaacaaattcgtgtgctttgaagggttgaaatatttgaaaaagaaaggaaagtggtaattggaagttacaaggggtatttatacccaaaaaggcaatccacgtgaagaggaggtagaaggccacaatcttatctccagaaacacaagctccatcctacgatcagggagttcaacaatctacgtgcatcctcgcaattaatgccctccaaaactgaggtgaaaatcaatgatgaaaatgcttcttttttatttttgcaccaaaaaatgaagagccataaaaaatgtagccatttttggaaagctacacctcgatggtcgtgtcctgtccttcacgcgcgactgacacgtagacatgtcatcatcatagatagaagccaacttttgtggtcaaatggcatttgaaatgtcacgattgtattccttaatttccacatgttcaaattaagagggtgatgcaagcttccaccatatgcaacattctggaagcttcaggggtaaatgttgttcatgtttctagcattggacacatggactccaggtcagtaataaagacccatcagtgggaccctcagcaaagacaaaatgagccaagcccatctatatatgtccttctaggaacgtaccttagttccgcactcacaaagccttccgccctcagcaagccgtacccgaaagacatctccagtatcacgagaccgaagagacaagatcgtacattcccagaagacccttccagtttccttttatattcctggacacaaataaggaaactctagttgtcagatcagaacagagtatcgtataaagattaaggggaaacttcctatgacaaatattgtgcgattaatttagattaattgtccacaataaatgtacatggtgttgactagatcaatccaaatccaatacccctagttagcagatcatcttgtccatgagctggacttcatgagaaagcccacgagtattatttattgtttagtcaccagtagagggaaatgggaaacctaattaaattctcaaactactataaataccccacaaatcctatggattaagggttgaactctcttgcaaaattttctcaggcaaacttaagaacatacattctacgtatctctttaggcatttacaagcaaaagacttactgaataatattgactcctagactaaggctagttaatgccccaaccacattaagaactgattgtctcattttataatttctctcttaattatttattcttcagttcttattatttttatttagtttccgaaattctcgataaacagaagtgaacatcactcatgacactcaactgtgcagcaacctaacaacaacacaagaacaataacaaaacaattatcatatgctctaaggcgtggatcggtttcaatacaaaaaatgtagctttaacgttgtttttaagttttgtttatgttgtttaatcttcctaaaaataaaagtaaaatgtataggtgacacaataataacagaaatataacgatgaatgtgataataagatattgcaaatataaagaaaatttacatattctgatgcaataacaacttaatatttgattttgagttgttttgtatgtttgctatatgctgtccatatttttataagcttgacatgtggactctaatccaagaagccaagatgataatcggctggtaaatgcctttaataacagtgtaacaccctaatgctaaggcacgctacagt

SEQ ID NO: 24584 - DNA, 2371 bp, Cannabis sativa
gaggctgtcatcagcaaaaaacaagtgtgtgattggaggggcatgacgtgttagcttgaagcccatgagattacccgtattttgttcatgctgcaacaagcgagaaaggcactcagagcaaattaggaataaatatggggataatggacagccttgtcgaagccctctagtaggcgttaaagctcccataacttctccgttgatgagaaaggagaaattatttgttgtaagacagcacataatcaaggaaatccatctttcagcgaaccccatttgcctcataacctcctcaataaacctccactctgtcaaaagctttactcatatcaaacttgaaagaggcaacaccattgcgtcccgctgttttgttttttatagcatgtaccagctcaaaagccactaaaacattatctgtgatcagtcggttaggcaaaaaagcactttgagcctcagaaattaccataggaagggcatgcttgaatcttgagacaagcaccttggtgacaagtttggagattacattgcagaggtttattggacgataatcttgcatacgttgaggcttcttgatcttgggaattagagttgtatttaagttaattattttttttttaatatgaggtgaacttataattgttacctcttttttctaaacttttttctttgatgtgtaatggtaatgcggttaatgtttgttgggtgcctaaaaaccgcaatatccctgatcattaaataaaggtatcctttactttcaaaaaaaataaaaataaaggtatcctttcatcaaaaaaaaaaaaatagtaaagacaatttgatagctgataatattagtaatataatatccaatattaattttgtagttaatattagtaatataatttcacatattcatcatttcatatattgatagatacgattatttgataacttttttattacattatatttataaatattgggatatgattttatatattagatggtctcagaatacattaaatgagtatcagagtacgtttctactttttaactttaattattcctagatcaatcttagtcatcagatcaaataactccctcatctgacggctgccgtacatcacgaattacaatccgtaaaagtacaataacgggacaaaatcatatccctataaatattttaaagaaaaattcatctttatataatcaattagaataaattatatttgattattgaaacagtaaatattacatcatcatgttcatggcaataagatgaataccgatacctcccatcataatcgtccttctctgtgtccaactcaagtaaccattttacaaacacataacaaaacagaaacaatgatagtctatacatattactaaatcttcattgtttataatacagaaagatcaggcaacccattttgggatataacaagactatcgaatcaatcatctagctcaattttcatgtatattgatgtaaagacctaaaggatcagtaaaaagaaattacatcttctcaactaaaaatcattatgaacatttttgcattacattgttcctgtgtcaaatctgtaccaaactaaatgtgcactattgctagccctctcaaaaactaaattattcaaatcaaaacatcaataagtttgtagctgtcccaacaacaaaaggttccattaacaagcgagtcaagaagtaaaaaagaacacccaacgcaatggatatcgggagagcgggcaaagctttacggtacacagacaacaatatgagagtgcagccaagtccacaaataatagcaaggtaacaagcataaacagtcataagatcatacattgctgctcttccaacaagaacactatagaaaataaaatcaccaagaccaagtttaatacctctacttgataactcaactccttctcttgtcacttctctttcatttcccaatcccattagctcaacaagaggagaaatttcctcctggcccctattcggtggtggtggtggtggcggagaatcactactagtagaagaatgcctccccattgaacttaacaccaatggtgacctttcctcttcatcttcctcactcgaaacacctctctcattcgcaaagtttcgaacttcaacccctgtgaactcgctattgccaccgcggccaccgttttcttcttcttgggtcctaattctattcgaattgtcaggtgaaattgcctgaagctcgactgaacctgaaaaaaaaaacatgataaattttttattaccaaaataaacaggtttagtcacacaagctaccgaaaattgttgatttatcacagtgtaagttcattacctaatggatttttacgttctaatactccatcgggagttatcagtatttatcaaagtt

SEQ ID NO: 24585 - DNA, 1855 bp, Cannabis sativa
tacattcaagtatgaatctctagactcatacgaaaacttaagtaaaaatacataacacataagccaattttacttgcatgacacaccatacataatcatttattatttcaattcacacaaacacattgcatgtactcaaaaaaatttttttaacgtaaaacatgaattcatacaaacactggaaaggtcgttttctgtccaaagtagggaaagagactctcctcaaaacagtagcacaagccttcccaagctatgctatgtctgtattcttgctaccattggaaacttgtcgaagtcttgaaagcattatgagtaatttttggtggcaatcttctaaaaacaagcatggagttatctagatcagttggaaaaaaaaactctgcaagcataaaacagttggtgatttaggttttagagattttagggagtataacttagcattactagggaacacaagcatggaggttattaacagaagattcttccctagtttgcaaagtttacaaggcaagatatttttctgatggttcttttctctcggcctcccttagaaataacccgtcattcatctggaagagcatatttgaaataaagaatttaattagtgctagtgtgagaattcaaattggtaatgacctgagtacacagattgccactgatccctgactgccagacatacatcaaccctatgttagctcttcacatccaactttggctggaagccgtgtcgctagtttaatgcaaatcgaccagaacctatgggaagctgaaatagttgttgatctattcaatgacagggattatgctcttatcttgggatccccctccctaattcaaatacaattgatcggtggagatatatgacacttcaggacactactcagtctagagtgcctatagatttatgcagcagaatgaagatgatgttcgattacatgctaatttttggaagaattattggaagataaggtaccaccgaaagtgctgcattttggttggagagctattacaggctgcttaccaactcgaacccaactccaaacaaagcatatacatgtcactagttcatgtcctgtttgttctaatgcagcagaatcaattcttcatgttctagtcctttgcccatttgctctttcatgttggcatagatcagccgttaatttcaatccagcaacaacaggtgtgttcaaagactcgtttgaggatgttactcgcggcaatactgccaatacttctatagaaatcttaatggtagcttggaaaatttagaatgcacggaatgatgtcctttggaaaggaagaaacaaaacagcagctagtgtagttctagaagcaagatcgcatcttaaccaatggttgtgtgctcaaaaaaaattaaatggaacctattcttgttcaaaatgatcaaggattggacatagagcactggactaaacccgtgactaacatggttaaggttaatgttgatgtggctatatttgcagcaactagctcttttggtgttggtttcatagctagagattgtgatggcaaaattttggaagttgtctaaaaatgcaacattggccatgtctctcctgaggtagccgaagcttgtggtatcaaaaaagcccttagttggttaaaaggcaaaacttcgcaaattgtgttgattgaaaccgactgtttagtggcagtacaaggcatatatagtaatgtgcaaatgccatctgcatttgggacgattgtatgggactgtaaacaactcattgctgagttggaaaatatttctttaaaatttgttaagcattctgctaacaaggttgcgcacttccttgcacgtagtgcttgtttgcacgtagtgcttgttattcat

SEQ ID NO: 24586 - DNA, 1188 bp, Cannabis sativa
tataaaagtttaaattctacgctatttttattagtaatccggattaggggattagggtttcataagcattttgggtagcgtgcctaattatttagggcgttacatttctagtccactagaaaaaaaaattattttgtccaacaatattgactaaaaaacttatagtggatgtgatatatgtatttttatttttttttaagccgttttattttcacatccaactctgctggactagaaaaatattttagaaagttttgtagtccaacatagctagatgtgattttctatttttaggaaggaaaaaactaaaaaaacgagtgagctgcagttactcattcaatattttaaaatatattattattattagatatgaaaagtattcatcataacacatttttccaacttcatctaacacacatttttccatttctttaaatatataaatatataaataagaaatatcttaattaactaattaacacaatcgcccatagtgtaattgttataaatattaaatcaatgtagtatgtaactttgtttgtttttattttctttgaataagatatatgaatgactgaataactacgatctaattataaaaagtaataaatatgagtgcgtcacagtcttctcttcatgctactttaaacttttatatatacacaacaccactctgcatataatttacatatctaaacttataactatatataacaaggattaaacttataactaaaaaaaagtttcaacattacataatcaacaatgtttgaattgtgttttttgatgaaagatagtaatatattgtgtcgaatatccaactattgtatttttcttaattgatgttaataggttatgttaactcaagatatatttctaagaggagaggtgaattagaaattataactaatttcggtaaattaatacgttcaacacaaaactatgcaattaatcaagtaaatgcaaatagtatggtaagcaaatatagagagaaaataatcaagcttgtaaaataaagagtttaagggtaaaaaattgcaaactctcgatttttacttagcttgatagaacaaagccacctacgtctttagtcttcaaagctatggatgtacctttgagttccactatcgagctaagttaacggacttgactaatatttacaatcgagaatttttcaccaaggtattt

SEQ ID NO: 24587 - DNA, 3455 bp, Cannabis sativa
tattattattattattatgcaatcgtgacaattttttattttctttggtggcatatatactcttcttaatttttaagtcaatttaatgtctgcaaatagaagaaaaaaaaatgttacaatttgacttggtcaacactgctgtaattttcattccttcacggatctcaattgacccattttcttaatttatttatgttaaaatttgaacaactaattaaataaatacacaaaatttactctaaattgaaataccaaagtctaaagtatcaattcatttttcaatagcatttccatttatcgtttttttttaatcgtagcatataaagatgacctttttcctgcaatgaaagtctaatccaaaaacatatggaatttcttggatttattgaaaatgacacgtgtaagtctcattttatttttcttttaaaaaaaaagtctcatttattgattcgaaatagataataaatggcttcacaaaatttgagtaaataaagaaataattgttggaaagtttaggatatatttttctggggaaggctaaagacaaccaattcatagtcacatgtacttcctataaatgataaaacaaggtcggtattaggggtattattgtccttttgaaaataagatgatggccgaattcagagtttcatcaattatttcataattaaactcaagtatttggacagaaactatatgaaaaatgacaaaaacaaccttattagagagtacataggcacatgggtttggatgaataatcataagctgttttcttagagatctatgggaagttggactacatatatattggacagaatgcaattgaaaaatatgtatatatatccaaattaaataaataaataaataataagatgccttgttcatggtctaattcaatcacatcctaatgagagacaattaatcctttaatttaattaatatgtagctcgtgggaacaacagaggaacatcagatcaaccaaaatgcacattctcaacccttcactttattttttttttattttgatttatataatatatatatatatataaaaaaaagagtaatgatacaaatctttatgtgggcaagccatgtgcagagatgaagatcttgatttgaaagtatttgcctttgattttaaataagaattatttacagccaaatgagtatatatttttacaattaatttttataatgtgttgatttatggtcggcaataattctataaatttatatataaatataaaggttgtatatggtacaggacaagcttatatggtgatatgtataaatttctggcaacaaccaacatggaggcatgtgttattgagtatgtttaaatcaaacccaaccttaatcctatttctaagtaaacttattataacaaatattgtaagaatatatattattacgttttgggtgttatccatatattctcatcttattgttggctttaaagcatgttactatcaatttatttatttttgtttgtttatgcatctcaattaattgtttcaaattaattattcccattatttcaaaatatacagaattagatgcaaaagacaattatctcttgattaatgcaaccattaatatcctcgggtttgaagtgaagaaaagatttttttctccatataataattgagtgcatgtacatatcaaacacgtaacatttacatttagaagtatatatatctaatttatatattaaaaataaaaccacagtttttagtttaacggttttcttttaactctttaattaacattgtgttaatctatcattaacttacaattacgttttttaaaataaaaataaaacacttgttaataaattcgttttttatccactctcttgttaagagatttgcttatttcaaaacaagaaaaaaaaatccacttcacttgcaagaagatcgtgaatctaaaccgcctagattctttattcaaaaaggaaaaaaaaaaacacgcttagattgagaaaaaaattaaacacaaataacaatttgcgtctcaatcctctttcactctaagataattttttccattgtcatgttgttccatccagatgtatgatcaatacatataatatgaactgtttttgtagaagagagacaaataatagctttcttttcttcatgtcctgtcactggtccttgaaattaaataaaccccagtagaaccatcaagaataaaatggaatttgaggggcttttaagataattttttccattgtcatgttgttatgttcttattacaataacatatgatagatttggcacatgatgcatagattctttcttacccattaggtgattagatttagaaatataaaacagaaaacacacaccccatccacacatatctgtgatatgcatatgcataaatgaaataacatgggaatgtcttttcttttccaaataattaccaataaaaacactcaattttctccattaacaactgagtttatttctattactttttcagccattaacaaattaaaactatatacaggttagatgaccaaactctatggctctaatctctactcagttgctcatcaaagaagatatggtactttgttggacccaaaatcctgcaaaaataattatgttattgattaatgtttgtagcatgaagctcttcatcagatatcatttgaataaattccaatgtaattctaaaggggctttaaaattatccatctaaacatgaaaaaacctgattaatgactaattgtaacgttagaaaattaagaacatgaagattacattttgagcaaagcaagggaagttagaggctaagaaaaggagggaagtagctgcaatggaagaaggagttgcagtgaacatgattagaggacaaggagtttctatgactcaccctctctttctgctatgtaatcttttcatatgaaattcatgtaggtaaataataacatttcatacataaaacatacactaatttcatgtaaacttacaacttttttaaaaggctgttacagccagaacatgtattttttttttctttggctggatcaggaaatagagtagtacatgaaaattacagtagtaaatagtattaatatatatacatgcaaattttacaagagccaaagaatagattttcttttcagtgcttaactagatgggaatttggagagctgatccaaaaccccaatagattcatatatcaagtatagaatggaatttgagagactttatttgatcaaacttgtatgggggaagaagtccatttttccacttgtcatgttattttcttctttttccaataaccttcatgacagttttgtcacatgtacagaatctttgtcacccaaataagtgtcccaggccctgtattgatgagtccaaaaccaattgccagcttctcactatgcccacaaaaaatctcagattttgaagcttcaacttcatctataggacctctttcaa

SEQ ID NO: 24588 - DNA, 1557 bp, Cannabis sativa
  modified_base (1436)..(1448): a, c, t, g, unknown or other
  modified_base (1514)..(1516): a, c, t, g, unknown or other
tcccatgggttcgacctcgttcttcacaatctcaatactacaataaagattcgtgcgcttgcgagttgataaatgtaaaacgtaccatttcggtatacaacaacttccaagcccacaccataaaaatactaatgactcatcccctctgccaagtgattcagaagccagattccttcagtaagttgctaaaatgggccatggaacttagccaattcgatatccagtaccacccacgggtatctattaaagtttaagcccttgttgatttcatagtagagtgttgtagcttgaatgacctctcagaagatctaatcccagaactgcccacctagaaggtctatgtagacggtgcatctaatgaaaaaggagtcagagcagggatcgtgatgatttccctgcaaaggcaccaacttcagagtgctctatgttttagcttttgcgcctccaacaacgaagcagagcacgaactatgctggcatgcttaagattggctaaggaagtgggagcccaatagattgaagtacacaaagaattctcaactggagctgttgtaaggattcaaaagttacaacatctgtcaggttgcgagagaacaaaatttgttcgcagacatgttagctaaacttgcaacagaccctgagatcatacaacacatagtagtcccaaattgtcacctgaataaaccaagcattgaggtctagggggtaaatgccatagtcggcaactctcattcttggatggcacccatttataatttcctaaatttaagagagcttcttggggacaaggccgcttccaaaaaggttcagtaccaagctccccgttacgtgattatggatgggaaactttatcgccaatgactatctatgccatacttgaggtgcatcgcttgaataaaaatccactgtgatccatgagattcatggtggcttttgcagagaccatacttctggacctagtttatccaagaaaatccttcgccaagggtatttttggcctacaaaatgattgcatagagtatgtaagaaagtgcgagcaatgctagagatatgctaaggttccatgtgcaccacctactaagatcacactcatgagtagcccatggccttttgcagtttgggggatagacctagtaggatccctccccacaggaaaaggaggagttaaatacgcgatagttgtggttgattatttcactaagtgggtcgaggtaaaaccaatgaatactgtcacctcaaagaaggccctagactttgttattaagaacattgtgtgtcgatatggacttccatacaagatcatctccgataacgagaagtagttcgacagcgagcacttcaccggattttgtgcccaacatggaattatgaagagcttcttagctgtggctcggccacagattatcggacaggtggatcttaatcctgatatggttnnnnnnnnnnnnnttgtattatttatgttcttagaggtgttcgtggaagctaactaatggttctggcggatatttacannntgggaacatggtagttcaattaagcgggagcgctgatcata

SEQ ID NO: 24589 - DNA, 3647 bp, Cannabis sativa
  modified_base (102)..(103): a, c, t, g, unknown or other
  modified_base (1043)..(1050): a, c, t, g, unknown or other
ttttttataactttgttttctgaaaactgttttcaaaaaacaaggtcaaacaagccaaattgttttcaaaaaataaatttctgtttttaaaaacaaaaaacnnttttttagttatgatgccaaacaaacacttatactctgttgtttccaaaaattttcacattgcagcaacatgttattcaactacaattcaacctccatatacttcaacacagacacaagatcacaacctcttttccaacgacgcacttcccctttgcaatctcgaattctctgtttaaaattattagagtaatccttttcccaatcttacaaaatctcactacaatatttaattttttccataatagtgcaacccaaataaagataccaagccttctcaacaactttgaaacacaaaggttgtttcaacctcaaatttttttattttgtatcaccatcacctcattctcaataaccaaataaagggacaatggtcagatgtaaaaatctccagattaaaaagtatattattagtaatagagaaaataatttatatatataaatttagtgacgattctaaattttattaaaattcgataacattttaaaaatattattaaattctaaggataaaaattatggtacaatttttagatttgaattattattatttttttaaaagaaaattttcactaggcaacatttaaatatagtatttacttaatgttatttaaatataatttttgtaacatttttttagcaaatgtcaataaatcaaatgccacctttctgtaattttgttgtagtggccctttggtcttcaagtagtcttcttcaaaggttgcatctttgggagtcgtggctaaaagaatcatcaaacgaatcgaaaaaatctaactttggaagacaagaagagtgggagagaattcgatttgtgaaagctttatgggctaaataaggaagaatgagagttgtgagccaaataacaaagtagaaaaattattggaattagtctcacattgttaatatgtataaataaattatcatatataagatgaatnnnnnnnncctcccattgccaattagttttgatatgaaccctattcacctcatcccaaattctaacatgctatcagagtcgattgtgaactagtatgagcccaaagtgtcaccgatccaaaaaggcaagccataaaatagctaaattaacgtaaaaacttttgttgtctctcatttaacctctatttgggacctttcggccaatgtgtgccagtttctagtgttggggtctttgacctgttacgaatttcctgacgtgtacacccacgaattttttaatatttggccttgtgggattctttcaaatatcatgttcgaccctatagttctttaaaggttgttcgttatagtcacactttttaagcccaaacgtgtagaaacaaaatatcatatataagatgaatatagactacttctcctattgccaattagttttgagatagaacttcattcatcttatcccaaattctaataaaaatgtagctgcaaaaaaactatagaacttttaaagcacataggatagtccgctttagagtagagaagaaattaatttgtagttattaagaaaagtaaaacctacaaaggcccaagattgaaatagtacccccaacccaacccattaaaaatcgaaggaatatgactggaggctgtgagtgaacatggagtcagatcgactaacaaagcctagttctactgaaatcatcgatccacgtgaacaagaaaaaggccctattgacgccatcgatttgagcaatcaaattaaatgggttcaagcgagaaattcaggctcaaagccgttaagcatatcaagtcaataaagctaattgattacgattatttccctccaaattcacatggtattaataaaataaaataataaaaaaaaaagtaaggaaaggggtctatatatgtatctaaaattctcactaattccctaatgatctgattaactttaagtatagaatatttttttgcaagaaatcctcagaatacttgcaagattctataccttggaaaacgatcgaagtaagaaagacacgatggctttgtggagagagagttgcagctcttcaatttttagcaactcaatagtgagcaattttttggcatcaacactttggtatctcaattagttgagttatgatcattaccaatatcaaaaaaaccatgtagagtagagtagcctatacaaagcactctctcttgtatttactagcttagctcattacttgaaatcattttcaatatactttgtgtttcaataactattattatgtaaccatctttctttctttctttctttttttaattttatttatatagaattaagatgtagtactgtcttactgaaatatgtgatgaaattatagccaaagaagaaagatataaagttttccaaattaagacccttctattttagcaggctatatatatttcagctctttcagataaaaaaataatcaagaagttgtattaacaaattaagcatacccaaaaaagaaaaaaagaggtaatatttgttctcgttggagctgtggagttgtggttttcacttatttttttgaagccattcaagaattcccttctcagcttctgaaatttccccatctttccctctcatagttccttcaactaactcaaagtaatctttgtaattgcgtttgtaataactatccattctctgaaaacaaaaaacaaaaaaccaaaataaaattataatatacataatttgttcattattttttgtttttggccataacataatttggagtaacaatgaaatttggccattcatatggaattcgaaaacccaccctgcattattaacaagagtactagctagtaggaggttgggggtgttaaggcaagaatttcacctccttgtcatttttggctttgttttcctcactcttctttaaatactctgtatacatataaatatttaaaattagcaaatattaagtgattgggaactaaaaatgagtaaagaaaatatatataattattagattagttactttgaagaagttgagttttggagtctgtgacttgaagagcagcaacaacagtggataagagaagacctcttcttccatgaatgatgtggtgatgagtaggagtagtggtggtttgtgaattgttggtgttatttctatgaactgcttgaatatttgaagaagcgtatttgttcatggtgacagtgaatgccatcaatatgctttggcctatggaactcataactgcagccactcgtttctgtctcactctcagcttcaagattgaacaacttatttcactgccactgatgatgatattatcatgttgccaaagtggatatgcttttccttttatcatttcttcagctaaattaccaaataccccttttcaaaacttcattttaaccacaacaagtaatttcaaaaatactttattgctctttgatttacattttatagtcaattttataggttatatctctattatatatgttataggaattctaattttcataagttatgaagttattttttggtactttgattataaaagagagtatttattaattaaaattattttgcagctatattttgttaatgtgtattaca

SEQ ID NO: 24590 - DNA, 2190 bp, Cannabis sativa
aaatattacaaaaagatgacaattgtcatatgttacatattaatttgttacacatatttaatctacacattatattattgataaataatataacagaatctaatcctcatgttctcctaaaaatataatgggctaatacattcaaatttctaagaatataacaaaaactaacattagaaaatattaataaagaggcaataatcttttgctccaaatatgataatgaagacctatctttttatttatgtctcactttagtggttaaaacatggcaatctgactcaccataacaatggaaaactccaccaaagagcaccaattcaaagctttgtataaagcttcagcctctgcaaattaaagttagagacaacccactaggaatagaagagtaacaaccagcactacaaccaacaactgcttctcctttacaatttctcacaactgcaccaaaacctattcgcatgttcttttcatcaacagagacatcaacattcaattttaacttgtgtgatggaggtaacttgtcatcctggctaataatccctctgcaatgatcaaacagactttgtggaacacaattggcactgatgttcatgctattcatgcagttgtcttgtgccatttattaaacaaaatattatgacggttgttccaaactgcccaagcaataccaaaaaacaaagggacttcatcttttcttagattatccgaacctctcaataaaaattctttaatatcacaattcttgatagtattataaaactaattaaataaagtacccctccatttagatttagttttggaaaacttaagggcatgagtaactccactttacaagaacacaaggaacaaaagggattataggaatgatatttttcttgaagagatttaaagtagaagggagaatgttattaaagactttctaaataaaatgtttaattttatgaagtattttaagagtccaaacaactttttattatgataagaagggttaaaagaaggaaaagaagaagataatttagccaaatggtgacagttttaacattaagacacctagaggaatgatgcccataaatgagacagcatccatagaaggatgaataggaacctgaagagtagaactaaccaaatcatcatcaaaataaccacttaattttttttaaatcccaacaaccactatcattgataaagtaagaaataatatcatctggaggaggaagattctgcttatacttgaagaatctaatagcaagaatccagtaagagctaagggtagagatagattaccataccccaccttccaaagaagcttttgcttaagtaaatattttccccataatagacttctcgaagttaaagaagaacagtaagtagtgacccttagaagcatgaagaaaagtattattcttaaagtattcagccttaagcaacctagaaagaagagagtcacgattagagaaaatcctctaagcctgcttagtaagtatagcttgattgtgatgaataatagatctgaaacccaaacttccaaaaaacttagaatcacagagattagaccgttttttcaatgatttttttattacctatagacccccacaaaaatttagtcataagactatcaatatttttacaaatagacatagtgagcctgaaacaagacatagcataagaaggaatagtttggacaataaccttaaggacttcttttactcctctagaaaataacttgctactccaaacattaatcttagacttgatattttgaagaagatagaatgaagatttcattgacctactaaagtatttagggacacctaaatatttgctaataaaaggcttattattaagacctagattattattgaaaaaatcaacatcttgagaattagtattaggaaagagcagaacataagatttggcgagattaacatatgaacagtgacattattataaagagtgagaatatccttgatagctacacacaattagggagtaacagtgataaacaaaagactatcatcaacaaagaataaatgagaaataacaggagaagacctaaaaattggaatgccttttaactggttagcttgttccttaattctaatagtagtggaaaggtttttagccacaagaagaaaactataaggagataaaggatcaccttgtctaattgttgggaatattttacca

SEQ ID NO: 24591 - DNA, 13391 bp, Cannabis sativa
  modified_base (4172)..(4176): a, c, t, g, unknown or other
ctcgtaaaattactaactgtccttctaaagtgtggatcgacatatagcctgtttactaccgggaccgtagtgtatctaattggacgacatcaccgacacatagagggctaatcactggaattattatatcaatggacattgcagtaaaactcagtaaatataattctataattgctaagagttcaatttcatatttttagtagtgtaatcatgaattaataaataatgattatttggttgatgagactcaataaataatatagtttattggatcttagaattataggtccatggttcctgaatcgccaccttgaaacattaccaaggaaatggataaagagtattataatgtcattcgaaaatttttattttgaattggcaaaatagtaataatatatttttttaataaataaataatttttcaaattaataaaataaggaaaagacaaaaattgttaagataaaatttgtcaagacaatatttgttgagacaaaagctatcagaacaaaagacaccatccttgtcctaaacaagacatggtaggtgcatgtccttatggggtttgtcttttgggttaattaattatataattaattcaatcagataaatatttgaatttgaaaagtggttaaagatatttcaaagttgttgagatattctctcaagtaattaagagattccctcacaaatattaataaccaaattcagtaatagatttttatttatttgaattattaaatatgatttaactaataaggatttaactactataaatataaatagaagcctgatttgagaaatcaaaaaataattttcaaattatttttgaaatacctagaggagaaagaaaattgttttctctctcaattgtttttgctcgtgttgagaacttaacaagaacatcattatacaatttatcttaataggccccactattccttgtatgtggtagattaatttagaagacactggtgtgagtttaattacatcattctcatcatcttgagttaaaggatacaacatacgagaagtttcgaggataccctgatagtcatcaagcggtatatgtgataaacttattattttatgttttgatttaatgttgatttaatgtacacttaatgtacacacatctgaaaattcattaggctattacaatgataatcagataatacgaaactcttccactgcgtacctaatttagtactataaaactaacagtatctgcattctctttttcacatacatcatatgtaataagaaatagagttatcagcatcaataccaatagcagccaacatcatatctttgaaatacccttttaagaaacaaccatcatatcaagctttaaggcatacgtaaacccttttaaacaaccttttatgatcaaccatcttgcttttaattatctatgttctcccaagattcaattccattagttggttgctattttaggtgaactggaagaattagggaagtttggatacgaattgggtaaggtttcgaatttgtttgggttacctggtgcaaaccggttaaccgattttacaagcactgtaaaactggttaaccagattaggggcaggtttcccgaaatgttcgatttatcggttctgttattttcagagtcttatttggttatttcctcgataattagggtgttattataagaactactgatagtagaacccttagtagtgagtttggattttccaaattaggttttcggtgtgttatttacctattaacataaatgtgacttagggcatctatccagcacgaggttttccattcaggtcggtcgactcacttgaattcgggaacaaggtaagactagcatagaacatattatatatgttaatatgtgtatgtatgtaaattgcataaagttataaattgatatcatagtggcacaactatcgtgtcgggtcagcagtacgagaatagtactggatttgactgatattcaattcaagaaagtattaattggcgctatcatagcggtatgagcatagtaacagtttagcagtccgagtatagtactagttaagagtattattgtggtcaattatacttttgggtattatcgatgctatcatagcgatatgaacatagtaccgggcccgcagtacaatcttagcgctagtagtggctgatatcatggtcgataatactaagtgtaaagaacattcttacttatttgataagccgtgtggataggtgtatgggcacctagatacaagtcggtgatatattattgttaaatgcttttcttactgagtctattgactcacagttgctactttcaaatgttagtaagggaaaggcaaaggctgaacaggagtgagatccgagcttggatggtgattgtacatgtcgggacgatgtgacctagagtgttcgttcgggacatcttgagctgtattttgtagtcgttgggcgacatatttgtaaagtattgtgataatatttgtaaaaagtttcaatacgggatcctggtttatctaaaatatatatatgtttataaagtttaataatttaaatcaaaagttttaatttggcacaatttttgaggaaaactctttgattagcaaaagtgacacattaattaaaaaatcattgtagcgcgcctaagtatcaaggtgttacaactaagttactaaaatctctcacactatcaaaataatccatccaatccaataaaaaacatgtggttcaaaaaatatttaaccagagcaaacaaaagggtcttgaaacaactggaaaataaagaaaaaagaaagtatggctttggtatgaatacgataaaaaagaaaaatagaagaatggaaaaaagcaagatttcacattaccaactatataaagtaaaaagtatgtaaaaaaatcaaagttatggagaaggaccaactattagagtcgagtcgataaccatcgcattataaatgcacatgagttgggtctgctagttcccaccaagacattatagttatttagttgtaatacaatataattatttagggccaggttcaccatatgtcataacatatttaaacatggatttatatctaagattatggatgatggcctgattggcccaatatgcttgatgctagtctgatggtcaacttggacctaagggcagggccgatgggctcgataggcccgatatttgctcgatgctaattcgatggtcctcttggacctaaatctaagactgatgagtctgatggtaggcccgatgggatacgattgggcccgatgccttataaatttatggctttttaaagacttttgtatcacttttctgttagatttttgttctaaatttgtaattgtatttttttatgtctgtgataggttcaattatttttgcattcgttatgtataatagtgtttgggagcttgaggatagagattggatttataaccgagccgaaaatttgatatttgagattgatacgaacgtaagctactcgcgtttagttgatcttttgtacgaagaacacgatgttgataaaatacagtatgacttgaaattgaaagttaattacgagtacatgaaaggcttaatgtatcgccctaaagttattgaaaatgataagcgtgtaaggttatttttgtctatgcttgcgaagaagtcaaatgaatttactctcttgtttgtgactttggtaaaaaagaatgtttgtatcgatcctagtcccacaccaagtactgttaaggatacttgtagcgaggttaggagttttgttccataaacaaattcggaggtgttggcagccgatgtgttacctgaattaaacactatgatgtcgacatctgacattgtagcacaaatgccctttcttgatggttttggtgatggtccagaccctgaatggtatgttgagggaaatgatgatgtaagagacgaccaagatacagaggtccctattgttgtaactttgaacttgactccactatcataccaaataccatccaggcaaccgacacaaaaaagaatgtcccgtagagagaattgtcaaacacctgatactagtagtagtcgtccagatagaactaataatgctagagggagcactaacgatagaggtcctagtgatgctagagggaccaataatgctagcggtcctagtgatgctagagggatcaataataataataataatannnnnaataataataataataaatttttaacattaagaagaataacaatgtaattagagactaattgggtgaatcacacaaagctaatcaaaattttactaatttgaaggaatgaaaaattcatttattggcatctcaatagaaattatgaaaattaaaaagaaaatattagattttgagaagcaagcaagaagagtatgaaaaagaaagcaaaaattggtgagctactactctactagactgcacagttctattaagaaacaaaaataaaaacacctaaaaatgtttataatataacaaaactcttcttcaatagtaaacaactgtacaaaaatcaaatgccgggctgctattaaatttctcactaaactcaattgtgcagataatcacaagaagctcccttcttgcaatgcccactttcatggaacttacagactctctgtcctttgaaaggagtcctggaggtacttccaccgcctcctcctccgctaccgccattaaatgacgattgtctgttccatggtttaccaccaccataacccgaatctacaccttgagaacccatatctctttggttggcgaatctatctgtgttatgattacgctcactaccccagttgcttgaattcccacctggaacgccaccccatccggggtttgcatttccttgtccttgaccatgacctacccaaccttgatttgtgttggcagttataggtgctgctggtccttgaccagatgggacccaacccgagacttgaggtctaacttgattgtgccatcctggatttgtatttccaggtgctagaacctgacttggaggaactccccaattcgggtttgcatttcctggtacttgtccactccatcccatgtttggatttccagccactggtggtgcccaaccttgattttgattgtcttgcggtactcttggcgcgccagtttggttgtccacaacgcccatgctataaggcatgttgggtggagcctgaggctgaggttgaatgttaggtctccaggaatcagattgaggaacagctgctgtgaagccagatgtcggaaagttcccaactgcatttcctgcattaaatgaggcaggattgtgtatggcggaagcatcactccaaagagcatgagcagagggttgtgcatgcatgataccagggttattcggttctaacttctgggatggagttcctctccagggctgagattcagctccagttattggacctgaggcaagcatttcgggttttgggacgggcgacatctgattagcaactgactgaactagactctgcagattcgatacaacattttgtatatcagcatttgtatttaatgaagcgtgatttaacgtaggtgctgagattgttggaaaatggtgaattggaagatcatttgtagtcatattcttttctgacttggatgtcatagcagaaaatgaactcgaatcattttcagcaactcgcatcgcaccctctcgtgtacctccagcactacctgggaattgattcattcccaccatagaattatttgataaaacggtattgcctgaccatttattttcgtaagtttggggctttgctccaccaagaggagtttgcgttggggtaggagacgggaggtttgttgaaccccatgtatctgaagaatatttggagacgtcaactggggtcggaacaaccttgcctgctgacaaaggactaatttcattttgagatctccaactttctccaccaacttgaatttctgtagccctttgcatggatgcaacttgaggcttcccaggtggtgtgggcgatggaggtaaattgtgcaaaacctgaaccttctccttctgaaactttccagttaatacatcagtcaaaagcatggagtcatcttctttatcgctggctttccaaattcgaaggtcaactgggaaatagccagtaccgctccatttacgcaactgtgcaatggaaaatggtccctggacttttccagatggatccttgtaataccaatttttttctgattcattgattttaggtggagattctgtaacccctgtaggcaaagaggacgccaagttatcagggacagcagtagattctgcagcgtgcgaattcctcgaacccatttctgaagttgacattctcttcttttcccagctgtttggtgcttctctctctcttccttgattccatgtgtcatttactatttcaccaactacagttgtatcctcagctttgccagagaacccacgactggacctgttcctacttggttcttgatttgagctgaaatagctcctgcccccactccaggtatcacccgaacttgatccaccttttcgtggagaaatcgggtccctgcctctcctgctaaagccagaacctctagatctcatgaagttttctgcatgaatagaaagtcatgttattaatgactaagcaaataaatggattgaaggaaaccgatgatacaatatattatacgaaatggagaaaggaaccttttctcttattttctgcatcctcctcttcttccgactcaaaatttggatccatattggggtctgcatgtatttctggaatatcttctaatctacgctggcgttcctctggtgtcttcagaagttgtaatttctcaacacattctctaagcgtaaaatttaagtcaaggaccaaacaaacaattctagatgcataaattctccacaaatttcaagagtttagaatagatatatgatggtaagaagaaatacttatgaattgctcacacccgttcggaaactcttaatccccaatctataagaatatgagttaggtcactctcactctccttactttcactcgtacggaaagcaaactttcaaatgcagggttttaaaataccgcaaatcataaatatctgatctagcattaggaccttttatatatacaactacaaactagccacataacattacaaactaagctttaacttcctggtttaggtaaatatgtggcagtcaaatgccaaaggagtcaattttcaaatgttcattgtaaattgaggcacccgaaagcctgtgaaaaggctcgtgaaatatggcaatgcaagtgtaccgttatgtaagaaatgttaacaaagactgacaaacaacatcaatgaatatctcaaacaaagaaacaaaacaaatgaaccagcaaagcaaaggatattctttacggcgtcctttttcactagctcgatcacgaagatggctaagccggacgatttctgactctagccactgcaaaagcacaaacaataaaatgcattcattaaatgtcgtgtaaaaaaaaaattaataacacaagagaaacctttttttcatactaagagattacatgtgatcatcatagaagatgaaaatgaattccaatctcctaaccaatgcagaaaacaacactccctcaacaacctaatattgcaactatgacactttgaatggggtaatttagctactttagaggagcgagaaatgaacagcagcgctagaagtaatgttgagataaaattgagagctatatagcacatgggatgaactggaggtttaagggaaatgagtatatgaaggtttactgtgacaataacacaggcattgccatctcataatcatgttcatcatggtagaacagaacatgaagaagtggaccacaattatttcatcaaagaaaagattgatggcattagtgttgtgtgtgtcttcatcacattaagttgctgattttttttccttgaagaatgttcaagtcagtgctgagaagttaattgacaaggtggggactgggttcataacattcaacctgtttagtccaacttgaggggtatacagtctcaaactgtcctaaactttccttatttctaaagtaaaaattatgcaatctgaaaggatagtaacttacatctttaactctgacggattgaagtgccattgctttctcttgaacatcaccctacatgcaaatgcagatttatcataagagtagtagtacatttggcaactttcagaaattttttaaggtaaacagtagtattaccaccgtaagccgattgataagtccacactttatgctctgacgtagtctcttgcattcatcctaacaaagaaaaaagacacaaactgaaatgtcaacagacagggaaaaaaaaatatccatacacatgagaaaaggtataaactatccacatcttaataggagcagcctttactatgtaaaactttttttacttttattttgaggagaacaccttaaacaagatattgaaatagtaccataccaaaggtgttttgaatatgtttcaaattttggaataaaattttacgtttacacatctaccaattttaacacatgcagccattttggaatcttctttctaacaaaaatcatgtgtttctcttaataatttaaaaagattgaaatagactgtcaagtggggaatgataagtagaaaaggctcgtgctaaatcacctcagtgaattcttgatttgagatgatatcaattgatacaacctcagtcttgtttaagtttaaaatctctagcacggtatctgtggtctttttaccaactttatatggctcagcagctttggttgtacctgttcaaatatcattaaaagaaatgaccaaactttacagtagtgatttgtttcactcattatataacgagccaaacgatgacaaaatacatcttatttagatatttaccagtaacttggaccagcctatacaagtcttgcttttgaccagtaccagaaattctaattcttgcaaatgcaccaactactttatcatggaagtttgcagtatcgtcaatcaggtcctcaaccaaattacgtctcaaataaatcaaattaatgttgtggttatcaatagcagcataatcatcaagattagattgaggccctttcccatcaccctttctacgcgatttacgtttcttgtctttaccactttttcccacaccatcatcattaccgtcagcttccaactgacttgcttctgtatcgacgacactcccttgaagatcgtcagtatgggaatcttcctttgcaagaaaatgagattcgagaagctttaacatttcaaaatggccaacgcgtggctttccaaacagattctgaagccttgagtcacaaatgatttgacttttcctgcgaggatcgcgaagtttgttcctttttatgtattctagcaaaagggcttgcacatcaaactgagacaaaggagatatatcaccatttctcatgtgcataacaaactccaagagttcttttgatgcccatgcattgttgtcaccagcagattgccctcccgaagcagttgctctagttgcctttcgtgaatccttgtctttggtacgggacttcacgcgttttttggtctttctttttttggtgttgctaggttctactttatcagaggaaccatcactgtctgagccaacatcatcatttgcattataaggttcatcagctgactcctgcttatgagaatcagatcctataaatggatttttcgcctcagcaagttcctctaatgttaaagatagcttctcctttaagtctatccaataatctttaaagaggtattcccagctacttctgtcatcaaaatctatattatcctgcccaaaaaaaaatcaacagaaaaagaaagcaaaatatcaatgcaagacatggatacaacacaaaatatgaagttcaaatctcaaaggtctgttccaacaaaattggaaagaaaaacaagaaggataattgagtagtgcattgttcctttaaatgggttttaaaaaaaatataagaacagaagatgggaattaaaattaactgtctcatgttttataaatgtaactggtaagaagtcagaaaatcaactcatccaagttttttaaaatcatctgatatctatgccaaaacataccaagaaaatccattctctattgaaggtaaatcgctttaactaacgacccgaaaggaaacacagaaacatttagagaaggagctaacataccgcattcttctttccttcattcttttcaatcagcatgacagttttcatacatggctcacaaagtcctttattttcgcgaagacataatatagtattacttttaatacaccccttgcacaaagagaaggtacatgtgtaacaccagaagtgtgcatttttctcacagatgctacaaaggtgccaaccttaataaatggaagataaaatatacacaaattagacggcaaaacaaaactaataaagaaataatatcaattgcaaagggatttactgtaaatagtaaaagtttccactattagtattagtattgtcaataaacagataatattttgccaaaaaaggagagagctatagacagagaatgtaaaatatataaaacaaaagatagtcaagcactagttataaatgcttgcagcacaatccccttaatcttttgaactaaatatccagatatatgagtacttattttctataaacaggtttatattcataaatttaacatttagcaaaccctgaactcatcagttctaaagcataaatatctaaaaacaaaataggtacagattgttccaactgcctaacttatttagctgtaggttcttccttgtctaggtgtaaggctcaaaattacatactttagaagcacaaaagcattaccagaactcaaacaactgaatgatgtccaaaatctacaccagtaataaaagcatcacttttgctcaataagaagaaaaattatcaccctaaacagaaacttaccacaattccaacgacccttggttcgaaaaaatgcttcatcacggttaacacatgaagggtgataagctttggggcatcccctgattacagccaaaaaaatatctcactaaattactcaaccaaacatagatgagcaagcaaacataataaaagtatatgacaaaatcatataaaagccatgaaatgaatgaagcatgtaaaacactgacctccggtcacacaggacaagctcacccccatcaaagcaaatgaaacaaacatcctcttccaactttttccttgagttgactttggcaggagctttattatttttcccccgtttccttttcccattactgctcccacgaccaacttcctccacaaccacctccatggctgtagcttcatccacattctcagttccctctgcctctgttgtctcctccatagcatcagcaacatcagcttcctctgctacttctgtctccatagccacaccctcatcctctccctctgtatcaacatctttctcatcctcctctccttctgcctcaatatcctctttctcatcctcctctcctgcttcttcaatgtcctctttctcatcttcctcttcctctgcatcaatcttctctttctcaccttcctcctcctctgcatcaatcccctctttctcatcctcttcttcctctgcatcaatctcctctttctcatcttcctcttcctctgcatcaatctcctctttctcatcctcttctttctctgcatcaatcgcttcttcctcatcttcctctgcaccaatcttctctttctcatcctcttctttctctgcatcaatctcttcttcctcatcctcctctccctctgctataatctcctctttctctttctcagcctcatctccctctgcttcaatatcctctttctcatcctcctcacctcctcctcctcctccctcaatttcctccctttcctcctctccctcaatctcctcctcttcctctacttccacctcttcttgcttaacagttccatcttcaacgtcagccactttcaccgtctccttctcctctacctgcgcagccaaattagtttcttcctctatatcccccacaccctcgtgctcctcaacttcaattttcacagcatcattctccatacccgactcctccactaaatcccctaaagcatccttttttacaacttccatctcatcttctttccccttctcctcggctacctccggctctttctctttctctttctcacccgcacactcaattttaacctcctccgccacaccaatatcatcaactaccggagccacctcaaccacaactgtagattcctcttccacctttacttcaaaagccaaagctttctccccctccccttcttgcatttcaaccatgtcgctcttcacttcttcctcatccattttctgttgggccgactcattattggattcggaatcgcattggagccgcgtagctgagggttcgaggtcagactcgggcatggccgctgttccttcttggagctgagaaagaggaggtttattgacatgtgaagcctcttcttcatcgccttccatagcaattaaaggaattgaaaattgagaagctagggtttcgaagttcagctatggcttcaatttataaagctttcttttttattattctaattttttatgttattgttagtctgaactgaaaacacagaaccaaagagaagaagagaagagttttggtgttgttgcgagttcgataggcaagaggggtttcgtttaggaccgaaaatgaaaatacagaaatgcccccaaactccctcatgcaactgtttgtatctgggcctggacctgggcctggactgggccgaggattttacaatggaattttataaaaatattagattttaggtaaaagtttacaattttactctcatacggcagaaattacatttatattgtcctctttttttttttcttttatactgtaaatacaaaaaaaaatgagacctctattttctacacccataatgagacctctattttctacacccataaaccgaaataccagaacagctgaaaaacaaccattaattctgacggaattgagcaaaaacaaatcaaataaaaaatggacaaatggattaaaaaaaattatcttctgcacagcctcaacaccaaatgcaatagtggttatacttgcaagtccagacctgtaaaattataataaaaaaactactaaaacaaaactaaaataacacaaaaacaaatgtaaaacaatgaagcagatataactatttagaaaaacataaaagaaccacacacctcataactcatttgacagtgagctcgtcaaatgtatttataggagaatcagaataaaaaatcatgaaaatagccatagagaaggaagaagaaatatatttatagtcttcatcttccaca

SEQ ID NO: 24592 - DNA, 3058 bp, Cannabis sativa
  modified_base (968)..(973): a, c, t, g, unknown or other
  modified_base (3012)..(3018): a, c, t, g, unknown or other
ttatacttacatttattattaatgatttatatataccaactaattatttagtcacgataaaatataaaaccaaattaatatgtttaatgtatattatgtcactacaaatattttagctattaaaaaagacaatgttagtgagctataaaagagcaaataatatataagctcagcaataaactaattaacaaacttatatatctgttcattaattgtttttttattgaaaagattacactgagcatttttttatggtaaaaatcaatttaaatttaaaataatatgatgagttaatatataatattgtttagatattttatcacattaataggtgataattgttattcttatactttttattttaaaatttattattttgatttgcttaataattagttagctatttctgtgcatttttttttatatagtatgtatataaattaattctttttgataagatttcattcaaatgtgtatcgactgtaactattttgttactttaaatatttttcaaattttaatttagaaaattaattattaatataatatttaaaaaactaaactaattatttattttaactatcacgtttctttaaaaagattatataaatctacatataaatgtaaatgccaatttttttctattacttctattttcttattttaatattcattcttctcaaaatttttgaatcactacatgaaattttacttttgccagtgcagttcgcttttatattggcaaaaatcacttttactaacacatttcgagaactgtgctggtaaaaatgtcacagtttttaccagtgcatattttcactagcaaaacttattttatcagcgcaattcatatttgaaagtgagcgcagttcgttattgtattggaaaaaataacttttaccaacgcatttcatgaactacgctagtaaaaaatttctaattttaatatatttttttaatttttaatnnnnnnattttttaattttttataattattcagtataataggaataatcaatattctaattttcttaatagtattaataatatacaataattttagagtatacactaaaaaatacaattaatattataaatttggacattaactgctggcaaagaaaagagctggaattttcctaaaaaaaaaaagaaaaaagagctggaaaaaataaaagcaccataacccatttcccccctttccttcatcacaatactccaaaatttcagttctgaatccatttcgatttggctccctctctctctccaagcttccgtcggcggcgccacatccctccgaccacccctcgtcgtcttttatcccccatccctctgaccaaccctatctcgctcctccgttcgtctctctctcggacggccattggcgacctcgtctctctctgtttcctctataattaattaattacagagtgaaattcgagatccgctaagctcctatttgaaagtaatcgggtcgaaatagtatcaccacatcggtaatcggcaccaccacccaactccggcgtcttccaggtttttgttctttgtttctgtgtatttttgtctttagtgagtgcgcttctctcttgtgctcaacttggttttttgaaattgggtaaatctatacatgggtatattgtcaaaaggcttggatttgatcaagtttcaggcactgctgtaattgacatgtactcaaagtgtggatctgtttcatatgctcgttatttatttgataagacaaagactaatgacttgatattttggaatgcaatgattacaagctatggaattcatggacagggaagagaagctttactgctcttcctcgagatgacagaaaactcaaccaccctatatcacctttttcaattgagcttccaataattttaaacattttattaatatattatactgtattttgtctaataatactaagaacaaccaattctttgtttatagatttcaccatagttgttaatgtgtgtgtttaattatttgtgcgattgttttcaccatactatgaaggaccttcttcgtctcagcggcgtgagcccgcaaacgaggactggcctgggcatttcgttgaagctctcgtcacccaagttgccattgaggcttctcattccactggttgccgtgctgctgctcttgctctcgccactctcttccaggtaacattttattactagtttttctctcacagtactctcgcattttttatagtataatatctcattaatgtttgaattatttatgattaatttgtttaatatacatgctgaacttggattttggatgttttacatttactttggttactaaagtaatagagtaaatttaatgtgtatgtatatttgcctatatagtagtctgaggatcatagaaggggactgttattttgaaaacaactgttgttctgtgagtcttgatgcatcatattctttatcaaattttggaaatgtcactttctcaggatgtaggtttcttctattctaggagaagaaaatatatttgtgcgctggtatttgtcactttgtagctacaagatcaaaaacgtgcagtcagggcctctagtggataaacaagttctcttcgattattgtgagtattttcattgatttgtgtcttttgctgcaacaacaaattttcttttggtgtgtgttttgagtgaaatgttgtaatatatacagtgtattgtgtacactcaatgacaagatcttataattaaacaacgtaaatatgtttccctgtttattggtcttgtgataatattgatttttctgtattttcttatgtttccagttattcttttatctatgcgggtttggtatcttattgtgtattacttttgagtagaatgttgttaatgcaagtgatgatatatcagggctctattgttagtaggttctaacaccactacaaaaatagattccactaccgacaacacttctacctaggacccttttgtgctttttccaatgacaatatatcttttctctctctctctctctnnnnnnntctctctctctctcttattatcaaaaaacatatcttatct

SEQ ID NO: 24593 - DNA, 2408 bp, Cannabis sativa
tctatagataatcctagagaatctctcttcacgatctcataaaattaatattttcattgctacacgagtaaccaatttgtatcattttataatctattataattatatatatatatatatatataagttttgccctgaatatcaatatgaatagggcagatgatgtaacaaaatttgcttcgtcaacaagcttgtgaatgttttgtattacagtgctttcagtactaatggtgtcgattgtgctttggctctacgactctacgtcagcagacattgatctacaatcaaactgaatttcttctatcttctataaagtacatggatttaaaagctatcatcgtatctacaaacccttttttttttgcttctacctcctctgctgcaacgccagccaactttaaaatatccagagaatcttgttcagaagacactactcagccaaaaacatttgatgctcctcaagaaatcaattggaggattgtatatctcagtactgccaatagactggtttctcagctacacattgtgaaatgataacaaatgcataaccttcactggatctttggaaattatacgccataccgccttaaagctttgcttaaacttggcatcacattgtatgcttgatatgatcttctcagttcaataatagagccaacctggacaagggaaaaagaatgatcaaaacctaataggcctgccacatcaagcagttgtccaaatcactttatcgagtaactttttaacattattattttgttgttaagaataatgcatggtttatcgaatgcaattacattcaaaatgaaaatgaaaactgaactgatactatctgtggaatggaacatatttctgagcatgccatacaagccaaaataattgctggataatcaatatagcattacagtgaggattgtgcttacaatgattaagatggatgtaaacccaattgcaaatcctgcattgatgcggcgtagataatgatcaagtatggtcgatgacgttgccaaaaaacttaacagcacgccccctgcataatttcaaacactgacaattaaaaaatggataacaatagcatatttttaaggtgtagtaggcgggattttttttttaaactatggtttcacttaaatcatagaaactcaaagttccctggaaaaaattgcagaaagaataattggtgtctaaatgccatgaggaaattaatgctttagagcacaaactatacaaattagtcaaaaagcctaccccagaaccgtgttgatgcctgaatctttgtgaggtattcaatggtagcattcccaggctttacatttggtatccgggcacccatcttgttcaagtaatcagaaatttccttaggtaagtttgcctgggcaaaaattaacacattaattaacagagactttgtaaaatacaaagaaaagctgactacaggcagtacttgagactatgaactgaacattcagaaatgacgatcagctggcacagctttttttggaaaaatgcaggtaaaataagaggcaataagcaaaaaggagactaatttacaagaaaaacttgagaaaaaaagcatgaagagtagcagcggacatgcaacactaacattaaaagaattcattaaaatgaaacttacaatgtcaaatatattgaatagaaagacgaaaaatgcatatattgagtagtacacccaaggcttagcgccaatagaagattccggattcaatatctccctagcatgctcccaaaacggtgaactaagaagactgcaaatgaacacttgttagactgctaccatggcaaatatctgccaaagaagtttagtttattagggaggaaaaaagaagaataataaaaaaaaatccatggtctgaaaatgagattaatggaaaccaggtgataagcctcaggtcggatttttgtaccgtagaaggtaagcaaagtacgcttgacaaggattgttttgagacattgagtgtttcttgtacaattgttattttctttaggactttaggctgtgttgggttaatttgactaagttgctgatgtggtagggattattgtaaaccataggctatatatatttggaaggggagatttttaggggctgtggaagaactctagagagtaatctcgattattggagaagccaatcctctcaaatggttggaatagcagagtacaagcctctcaaatgcttgtgaacgtaattttctgtttcttaatcagactaacgggaagggtacaagctgtaaatccagcatggggcgtggaaggttttgatataaagtctttgaggaatttcagcaatttgtctgtgtactaagataagaaaattctcattaagtaaaagcttatcaccacaccaggtaatgtaactaacaaagaaattagtgataagaaaacca

SEQ ID NO: 24594 - DNA, 1789 bp, Cannabis sativa
  modified_base (1541)..(1559): a, c, t, g, unknown or other
ggttgagttgttgaagaacacattgggctttctttgatgaggttttcgattataaacaacacacttaatgataattctaatttctaattttgtatgtatgttgttttgattggattggaaaaacaatgtcaacaacaacaatggcaacatgcatcttccacaagcaatagatatatagtttgacaatgttggagaaaagaacatcagaaccaatgatgcttgaattgttgtgttggggaatgatctcacagtacaaccttcatcaacaacaacatcacggtgatgatcacttgcagttgtaccccaagtttagtttgttgaatatgtcaattcatatattcctttcgtgttcttggttcatagattttgatttgatgtgttaccaacatagcattttctgttatgaaacattgacaaaacatacttccacacatcctcactaccaaactcacttctttctaattaagttatgtttcagctcaaaataatgcaaaaaataacaaacattgacctcaaaaataatactaacaaatcaaacaaatttaatactaataaataaaataatgttcatatttattactactaattaagtaattatgattgacacgatttggagggctcgaaataacaaggttcatactaatactatgggtagtttgaaacattatattgactctatatattattgttgattatggatccagtttgctcaagtctcgacaggttgatggtactttgggttggtcccccgcctgaggattgggtcaagatcaactgcgatgtcagggttggggtggaaaccatgtgtgcagtggcgattgccagagatcattcggaatcgattttgtgggtggcgactaacgagcttcacttctctgaccctcttctcggggaagcagtggcttgtatgctagctttggagaaggcgaccacaatgcatcaccattttgttatggtggagagtgattctaagatggtaatcaagaacctaaagggagtcgaatccttttggcgacttgagaactacacaagacaatgcaagcatctctctacttttttcattagctgtaattttgcttatatttctagaaactgtaattttgcggcccataatgtggccaattgggcatttgccaacaatatgtctggtatggtagaagtttctactattccgagtattatattttataatgactgtgagggttgactgtttgggtccctctaatataaaaacactttattttcaaaaaagaaaaagtaattatggatgaaattgttatagtaaactatttatttgggtctgtttcatttttttttataattttgatattttatttataattttacagtataaatttttgttttaaaaaatatatttataaagttttaggtgattctacgcacccccttaaaagggatgtaccttaacttgtttcggcatccagaagaattttttagtctaatttttttttttcatattcatgtacattatatctatttaagatatcctacaaagttttgagaaattcagaataatttannnnnnnnnnnnnnnnnnncaaacagtctattttacacgcgtgtaaaataaaatagtcacgcgtacaatacactgtttgaatgtaattttcggcgtgttaaactttttcgaatttttcaaaattttgtaggatgtcttaaatgactacaacgtatatgaccatgagaaaaaatttgactaaaaaattattgggtaattctacaatgcacctctttaaaatggatgtattgatgcaccctctacctgttt

SEQ ID NO: 24595 - DNA, 3228 bp, Cannabis sativa
  modified_base (2508)..(2508): a, c, t, g, unknown or other
ggtgcgggtagtacagtttttgaccattttttaaaccaattcacacatgcagtttttccaattttccaaactactccagtaccgcgaaactaaaaaaccgcgaaaaccacaccacaaataatgtgtttactaatataatttaaggtgttttaagagtaaaaaaaaataatgtaatgtttattgtaaattaaaaaatttaatatttattaatatattttattggatttaataaatatttagtattaaaatatttttattatatgaataaaattatagaataataaaaaatataatatttggtgttgtggttggaattaaaaaaaaattagtgttaaaataatagttttttggtattaatttaacactaaatttgagatggtaacgacaagtcccgcttttcaatttgccatgtcttttctaaatttttattattaattacaacattatgcatcactatataaataggatgtgacaattcgtaattattagtggtttttttatattattttattttattaatttatgtgatatgttaagatgcacaaataatagtactagctagcccatagtaatgcttcagtccactgttatattcaattttacaacacccagagtcggacaaacggatgtggataagagagaaacaagtggctttaattcacaaattattctaaataatttattatattttcttttaatgttcaagttattaattttgttcatcactaattatgagtcccataaaaataaactgtactcactctgctcatattttcaactttgactttacatacaattttattttctttaatttttttaaaaagagaaagaaacgaattttaataaatatgaaatgatttgtaatagattttttttttttttttggaactaaatcaattttaagaatttaaataaaaaaaaatcaattttaagaattcgattaaactagtttagagataaatctataaatttatacaaaaagataaattatgcataatatatacatatttagagatgagtaaagttgttactgacatttggaaaagagagatagcagtttggacttcggattgggatggaacaggcccaaaaacagattgagaagctgaagaagaagaagacccacttccattaatggccggtacggtaactgtaactggtgggttgaagaggttaagattattagctgaagattgagtggagagaggagaagagtatgtctgaattcgggtgattatttggagatcaacatgcatggttctgccacccatttctctccttctcggtttattattttttagtttgttactgttagattaaaaatagtgcccaaattctatatttaataatcttctaggaaaatgcatggtgatgggaaagacacgctgtaatttatttattattttttttgtttgaaaaagaggtctttttttttcttgatattggtggcattactattaaagtattcattttgttacacttgactctattatgctattcactatttcattcaaaaatactgataaatatcaacttgtataattgatgggtatacagtggtacacgtacacatgacaacttttcgatggtacacgtacttttaaggagttttttttcaaataactttattacatctaaaatttactttttttatagtaaaaaaaagcaaaaataaacaaaaatagaaaattaaactttcttttttaaaaatacagtctgtacatgagactttcccaatatagtttctcctaaaaattttagatttgaaattaacatgaacatcgatcacctctagaaaatcttagaactcctccacaatcgacgtatcctctccaaataataccaccaacgatatagaagtttttgtcgaacaccatgaatgccgacagaaagctttttatcaatcaccatgaatgccgtcaagaaactttgattcgatattcagttatggtagcgcaaccaccgattagagatctccataaaaagccaacaaaagaagatcaacaactaagaggagatgtccatgaacgtttacccaaaaaaaattgggttttttttttttattttttttattctttttacaaaaataacaaatttgatattattaattatgtttactttaatttttctaatatattattattaatatttttgagaattgattcacatatattttagtgttttttgaaaatctaaaatgaaaaccagtaaattaatttttttaggtagtataatgagaatattgagtgtgttaaaattttaaaataaaactatgttattttagcgttgtttttatgttttctttttgttgttgtccatgatcgtgaaataacaaatgtataaataacataataacaataataaaataatgacaaatataactttaatatttagaacaataaataatgaaataaagaaataattatcttcaacactatgatcaactttttcttaatttttaacgaaattttttaaacaactcggaagaatttgacaaataaacatacnggtaccaatattttaaatatttttcttcgtaatcaggttgttatttagtgtttctgaagtatatctaagtaaattcatactaaaaattggttgatctgaataaattggtacaaataatttaaatttgaaaaagatagtgattcatttaaggtcatttactgattaccgtcatgtaatagttgtttatacgttgttctcatgtattaaactggttgcttaacaatatagaaaaattaatacactagctttaggcatgcaaccactgtaaattttagtatagaacaatgatcattgggatcacaacaagcactatattgattacgaatcaagtgaagaattaatatcaagagattgcacttttgctaaactagtgcatataatgatggagaaactacaatgaaaccatgaaataactcaaatacaactgaaataccaactgaaggaaggctgccaaccactccaaatcaaggataacaaaagtctgttgttttacataaagctattaaccaaagaaactgatttcatgcagtatccattgtgtgtgaacacattcaacaacacagaaacacaattctttttggcaactacccaaacaatagtgtgccataatgtgataatgacagtaagtgacaatcacttagtgcactcagatgtacaacaacttgacaacaacagcgaaacaacttttatctgctccaatgagggaatcagtttcaaaaa

SEQ ID NO: 24596 - DNA, 3781 bp, Cannabis sativa
gtacttcctgagaaaataactacttaggaaaaaggataaaaacttgttgctacatctgaagttttgccaattctttacaacatttcactaccccatcatcaactattccctaatgtctctattcaagagaataacaccactgatctagcctcccctgcttctagtaaaggcattgataagcatgttactctaggcccgactcttctttcatcatcatacactaaaatatataaagaccatggtaaaacaattaaagataatggtgaatcaaggcttatgaatacaatcaatccacataacatggactcttcatttaatcgacctgttacaagtattcccgtgactccaatcatgcctaccccctgcttacactcatatggctcatcttcactctattacatctgtattggatcaatccacggcagtctcagtcatgcctccaacaatcaaccttgaaccagaagcctcatctgctacaactcaactaattaatcacccatctggttccataatgatgaatgaaaatagactgtcatctgtgttttctaaaaggaaacttgttacaacaggaggaagtgttcactctgtcctgaaatgatgtcgcacaagattatctcctctctcagattctacaaacaaccttatgcatcaacaacctaatccctcttctgaaatgtctaatctttcactgttggcagatggaagtgatgctttcttggcacaggctaaaatttagcctcgccaatcgtgatgaatatcattgcttggaatgttctgggcttgagcaacccgagagcattcagacaactttgtttgctcatttcttaatgtaatcctaatgtaatttttattatagagtctaaacttagtgttgggtctattaataaatttcgcaatgttttaaaatatcctaatggtattgaaagtcttagagtaggtcttagtggggtcttctttttctttggaaagctaatgtaaatgtaactatccttaattgtgatactaattttgttgactgctatgtggcgtttgttgatggtccttcttttcactattctggttcctatggagctcccactacttcttaaagacatgttacttggtgactcttgaaaaaacttaaggatattgctcatttactctcatggctggttatgggtgattttaatgaaatcctttcacacaatgacaaacttggtgggcctttatctcatgagtctcaacttgatgcttttagagatgctgttgacttttgtggcttgcaaaatttaagctttgaaggagaacgatttacttggcacaataatagtattaatggcatcaatattaaagaacggttagactgcatatttgtaaatgcctcatggacaagcagtttcagcaccccgactgttacaccttgatttctttcaatctaatcatcgagctttaaaagttgttgtgatggctgatgactcaacctgccatcctcctaaattcaaatttcgatttagatttgaaaagctctggctgcaggaggaagaatgtctcgacatcatcaactgcaattggaaaaattccaccactaatctaggttcccaactaatccaaaatctctctacctgtgcaaataggcttcgaagttggcaccgtggcaaatttggtgatcttccaaaaagaatcaaactatcacaagagaaggtggctgctttgaataactcaaatgacaccaattcaccacactatgaagagttaaaattgagtgaaaatatcattgatgatttacttgtccaagaagaagattactggcaccaacgttctcgcatttcttagcttaaatcgggagactctaatactcgatattttcaccaaaaggctaccagtagacagaagaataatgtcattaataaacttgttgatgatcatggaattgagcactcatatctgccaggcataagtaacatcatccaaaagtattttcagcaaatttattctactgatggaatagattctgaagcacttcagcatgtcacctcagttattccttgtacaatttctgcagcagcaaatgaagcccttactcgaccttacacagccattgaagtctttgatgctctctcttcaatgaagtcggatggcagcccaggactagatggaatgtcggtgatgttttataccaactattggcatattgttagtgatcttttgactaaatctgtcctgcatattctgaatgaagggggtgatccatcttgttttaaccaaacattaataaccttgattcctaaggttaaaaaaccaacaactgtgactcaattgaggccaataagtctatgtaatgttctatataagctagtgtcaaagacgattgtactccgactcaaaccacacctatctcatgtcatatcaagttcctcgagtgctttcattcaatcccgtctcatcactgataatgttttggttgcttttgagttgttgcactctctcaagcatttaaagagaggcaaagaaggttatgctgccatgaagcttgacatgagtaaagctttcgatagagtcgaatggaattttcttgtgcgagttatgtgtgctatgggttttcatatagttgtggtgtcactcatattacgctacattcagagtgtttcttattcttttttaatcaatggctctgttcaaggacatatttatccaagtcgtgggatttgacgaatggatcttctttccccatactttttcattatctgtgcagaaggccttcccagattattccaacatgaagaactttgtggtcatttacaaggcttaaaagttgctcgtggtgctctaactgtctctcacctcttctttgtagatgatagcttagtcctctgtcgtgccaatccaagatctgccaatgcggttaaacagtctcttgattactattgtcgtccctcaggtcggaaactaaacttagaaaagtgtgttttgtcattctcaccaaacactttgccttcgatccaagcaaatcttcaacaacttttacttatgccaattcaaccttgccatgagcgttacttgggtcttccatcttattcgggaaaagataaaaaagttctcatcggtgagattaaagacaaactttggaagttacttttggcctggcaagaacagttactttccattggtgacaaagagattcttctgaaagatgtggctcaatcgatgccgacctatgctatgaactgtttttgcctctctaaatctataattaaccaaattgaagttatgatgaataaaatttggtggggttcaaattctttaggcacgggtataaattggaagacatggaaggccctatgccaatccaaggttgaaggtggtatgggatttaaaagttttattcactataaccaggcttggaggattttttccaacccagaatcactactgacccgaattcttaaggctagatatttcaagaattcttcttttttggatgttggtcatggttcttacccttcactcacatggcaagggatcatttggggtaaagaacttttatccaaagacttaagatggaaagttggtgatggacaaaatatactttgtgcaaatgattcatggctaccaagtatttctaatttcaagccattaatctttaatggcattgacagaagcttaaagactcctttgtcaaagactattcattgagtctgatgtagaaaaaatacaaagtatccccttgaccttgtactctcacccagatcatcaaatttggaaccatgaatcaaatggcatatatgttggatatttattttac

SEQ ID NO: 24597 - DNA, 4462 bp, Cannabis sativa
aatatcttatttttattttttttttcctatttttgtgggcctccttgacctataaaaggagagctcccttagctcatttttcaatttcagaaaactactcacatagtcagagcttctctttttagtttctctctctagaaattagagcttctaatacttaacctttttctgcaataccttatcgtgagaaataaaatcttgaagtagatgtagctccattactgtcacgatatagggagtgaactactataaatttattgtgtctctcttataattacttaacaactattttattctcgccaatctagtgagcgggtgtggcttagaagtctagttcagatttttgagtcaacacatgtcctgctggtgaacttggtgatgagctaagtttcagtttgtatttttcatttccaattggttttctctttatcaaaaatctattgaatgtagaagatccctagtgaattccccactcatacaagtttcttcatcaacgaagatgattaaactcagaaatcttattagatgttgtagcatgattagtggcatcttcttctcttcaggcggcagcggtccattatgtaggtgttgttgtggcagagaaaaaaaaatgtgtctttcttggaacaaacaagaactttttttttaaaaaaaaaattctcccttaaaatcgactccttatttggaattgcctttgatgtctcctctgtattgtcctattgttgcccattctttcaaactactccaccagctcagttttcatcagcgataacaccatcttctcgagtagaacaatgctctttttgtcacagacgatattatccatgccatcaaaattttccttgtcaaaaattggcactttaagttctcttagtcgcttctcgtgtctagaatgagttcctgattctcctctttcaaaggatctttcgttgaataacttatttccatgtaggtggaactttggcagccccatggttgtgttcttagtgaatattattggttcttaccttaatagacactcctgggatccatttcccctcatatcttgagcgttggatgtgtttaccacttcttctcccagttcttgaacgattctttactattctagggcaatttccatcgttccatccacatttcttggacgttgtaccgttaatttagtcgttattgatggtactaatcccttaaaaagtgtgcctaacagaacttctagggttatgatgtcaaatggagctaaaagccatatagaatttttattattttcaaccacaaaaccctcttgcttgactgctagaaatttgtcataaagggacctcatttgtgtgtttttgaaatgctttagtactaattttttcatctcttttcagcttaatatatctcatgttttaattttatattcataccatagtaaaacgttccctgaaaaatgaaattacagtaacctcaatcttctcgtcgttgtcatatccatgacaagagaaaaatgtttttgcttgtaatatccatctatttgggttctctccatcaaaacttgatattttcaacttcttgagttgattttcatgtcagaattgtgagtcttgctggttctagtcaaaatatttccgctttaagctctgattcaaataaaaacctaccattagagtgatgcccgtggtcgctgattgttgttccagcattgcagctgtgttggggtgtcatggggtttgttgggcccttgctttcctccttttccttgtttctaacaactccattaacaccgtctttgggttctttgagagttctaagttttcttgaacttccaaaaaatcttgaattgttgctataacatttcttggagagattcttgcaacttttgatgaagtggttgtgttatctcttgtattgaatcatgaagagattccttaattccagaagtgtcaacttccaaagctttacgatcttcttctgaaaccatggagtaatcacttttctctgactgttttttaggtccaatgtccatcctcgccgcaccaatttgatagaataatcctagagtagaagaaatattctatcagttattttccaaaataaacaccaaaaatgaattcctctaatgatctttattcttaaaaaacagttacaaagttacaatatcgagctttcaagaggctcgtctctctaaattcacaatttttcgagaggattgatctctccacaaagagtctactcttatctaatgctaagctaatctaaatgaggttgctccctctctatttataagcattggttttaaaaagatttaggccacctaagttataattagactaatagaattaaaacactaagacaactcgacctatgtacataagagactaagtatttcatttaatcattttgtgatacacaagataaatcttaggcttatcagactaaaaagtatgacatccttcgggtaaaatagataaatattatttatttaaagggtgtgtgcttctgggagcataatcttaaactagactcaagctggtattagagaaagctatgttatcttagggcagtttttgacaaagatagaatgctagctgctagagaaacgggaaaattcaagacagctaaactctataatagtttattgcagcagaatcagttttactttcaaagtcttatttggtgtcgacttagtcttcctaagcatcggtttgtgctttggcaagtggtgcattctcaatttcttaccagggataatcttgtgagtttttgtatttccttggactctttgcaatgccatatgtgtggtttggtgaatgagaatcatgcccatatattcttttattgtattttgcctaaaaaaaatttctagattgatttttaactggctggaatttagtgcttggcctctagacatcagtagctggcttagctggggtagtctcaaaagaaaggggatgtttggttcgattgttactagaacaataggaactagtgctattttgatggtttttcacaatctgagttgcacatagctaaagatctcaaagagtatcatacagtataggttatacaatattagacttacgaattttaatgtacaggaacaacaaatcattcataaataaaaaatgaggaaattgtttttatttatttattttatttttataaggatttaataagaatcttatttagaaatagaaacaaatacacaagacataaaaagcaaattactcaagaaaaagactactgatttttgtaaaaggctcgtaattaattggggtccctttctctccatcccagtctattaccactaaacatttttttttttggtagtcttcttttttggggatgaagatccgaatctcaatcattcattatttcatttcgtacactcaatgaccgccaaaataaagattaaaaaatgcatagccaattggcattaaaagctaccttatattggtacctttatgcagatggccagatactcataaaaaataataataacattgaaactaatttttaaaaatattcattaatgacataatattttttcatttgtattattgtatgcatggcaaacaattggcatcagtaataagaattaagagccaaataaaaacggattttttttcttttacaatttttttctcatgtttatttttggtaattaatggctaaaatcaaaatcttactcgtccctaaaataaatgtgtccttatcctgtgagccaattaagaatgactgcctataaatagccaaagataaaaaatgtctatgtcattgctttgattgagagttgtctcctccctcttctaatctaaacttattccaaattgcactggtcttaagttttaaccatacaactacacaaatcttaacatcgagtccttctctcattttcttttctcttctcttttcccaagttatgaatttaaaatattgttttcaagctctcccaagtgggactttttagttttttttaaggagtcaactgtaaattaactaaccccaaaacaatactctgttcctaaatcctaacaagcccctaaaaaatcaaataaatacccatttcagaaattcaagatttgaaaatggcaggtggatcttttgctccaggtggtttggccatggaaagggcagaacagtaccaaggaaaggtcacctcatatgttatcatcgcttgtcttgttgctgccattggagggtcaatatttggatatgatattgggatttcaggttagtaatttaaaccaaaaccccttctttttttcttcttcaaaaaacaagattttgtttctgatgagaggatataccatgttttttttggtgtaatttagtttcattatcattaaagtgtggaccttttttgttcttttgtttttggaatcaagaaagagaaaaatttggcgtggaaagttgaaaaatgttgaaagagcgtgtgagtgtaagaaaagaaaaatgagtacttggatttagaatgaaaaacggg

SEQ ID NO: 24598 - DNA, 1496 bp, Cannabis sativa
  modified_base (44)..(47): a, c, t, g, unknown or other
gggacccgatacttaattgcaccaatagcgatattgacacgtannnnggtgctaggcaccagtggtgccctttagcatttctccttttacaaccctaaaattttgagtaattttgacattatttactttttttcttttttttttacaaacttcgttagtgtaagcaacattaattctcttcatggtgtttcaataagtggtcctatctctaaccaataattaagttttatcgatttctgtttatgcaattgtttttctttttcttctttgggattatgcatttcaggcatgagaacccatgcagtgctttctgattatttaatgtaacatggaaattaaataaatgtgtgtatttattgtgaaaatatatttataaaaagggtgtttttagggtttagttgttattatttttgtgtaaagaaaaaaaagtaaaaaagaataacttttattactattaaaaaaagaaattaaaaacttttactagtgtagctgtaaaccatttttgattgattcaaaaagtactacatcaacaaaaatttgtggaagacctgatgccaaacattatagtatgacatttagttgagtggtggctatttgataaggaaaaacaaaagagaagagttgttcacttacttttgtacattatatttttaagaagaggaaagaaataaactgtacaatgccacaaacaaaaatagctcaatgtgcatcatctaatgtgcatctcatttgtagtcaacgatacggagtcaataaaacgataataaaaatatttaaaattaataataatcgaaaacaataaacaacatacgcaatttatagaagtttgagtccaaatattaataacgacttactctctttatattatatttctctaagaagtattaagatgacaagaatttagtcaatgaatttttgatattcttatatagaaattacagataatattttgtagtgtgatagttctcttaaagaattagagttcacctcctgaatagtaagaatgatctagtatttatagggctataggtgaatcaattacattaatacagaataaacaataaaggataattgactcaatcacacgatttcctcaatccccttgattttctcaatcccactattttaggcatttgaaatgacctaatcttcagggattgggcggttaagacaaatctggtttctatcttcgctaaattgttggtaggatatgtcgcccaaggagcatcctctaatctaatcgagaatatttagttattctcttagagctgccaacccttttggcagagtagtatagactatatttgcttctcggttattacacccaaagccctttgagcaatcttacttaactatataccgtcctaactcattatcaaccgccacgtgtcatctttcttcgtgccacatcataagggtacttttaagataacatttgccctctaagtttgcgtatgagcgtctagtcgtatgtggacttctcagcttctatcttt

SEQ ID NO: 24599 - DNA, 3459 bp, Cannabis sativa
ttggacccttacacctacggactaatggctcttatacacgggttcgccactctggctgcttcctggatttcatgtctcagcatgctcaaggtcacaccatctcgacatcccttagttcatttcatgtctcagcatgcttaaggtcacaccatctcggcatgaaatgaaagatggtgtgaccttgagcatgctgacaattaaagatagtaatttctcaaaccttctaatagtactttctctaaaaagatagtacaaaccatgtttgtgttctccctttatgacaattaaagatccttttaaaaccttgagacaattctcataaattttgactgtacaacctttagtagcaagagaactagtagaaattaaatttctatttaggttaggaacataattgacatttgttaatgttctttgaatattttcatgcatcttcatgatgacagtaccaataccctttaccaaacaggccttgttgtctccaaaagtacatttccaccaatcttttattcaagagaaatgaataaagttttgttctgacacatatgaaaggtgcatccagagtccaagatccaattttttcttaattttgtgtctgcagtaataagcacatctgcagaatcataaccatcaacagttacactagcttcaatcttgttacctttaaaattctcgtcttttctcttgtccctattattcttggtcctcaaagggtagcattcatccttgagatatccttccttcttgcagtaattctagaactttccagccttcaatttgaatttttattgactagaaccattacccttgttgcagtgattcctttattaaagtccacttgtgttgttgctcttatgtcttttttttttattagatctaccttgagtcattaagcattcaccatttgaaccattattttcatcagacttcatccgaatcttcttggaattcagtgcagctttaacctcaaacattattaaagtctcctttccatacaacatagtgtcaacaaaatgctcataagacctcggcagtgaactcaataggacaattccttgatcctcatcttcaatctggacaccaacattgttgagttcaagaatggtattgttaaactcatgaaggtgttttttgagttcaccagattcatccattctcaaggtgtacaaccttttctatagacacaacttgttagccaaagtatttttcaaatatattaagggcagtttgttccacaatccaattgcaatggtctcacaagaaacctcttgaataagttattctctaagactcaagaggatggtgatgtgagccttcttctaaatttccttaacattcttcttatcctccttgatatcttcaagaccttctggttcagtggcttctgatatgccccggtaccccaacagagcacacattttgagccttcatagactgaagtcattctccctagtaaacttgttaatttcgaactttgttgaactcatcttgatcgagtcttgatcaccaaaacaccaaatcttgatccatgaatcccaatgctctaatgccacttttgatgttttaataacctaaaaaaaaaatcaagaacaaatatgacaattagtgcaataacatgaactaactaatcaagagaatgaaaaacataaaatgcaaaacaaaaatcaaatcacaccaatttaacaagtttcgttcagttgcttggtttcacgggctgactatttggacactcccaagtaagcggaacgtgcggcacttgctggcacaccgagctagcaagtcaggctaaatgcgcctgcaggaaaataagctcaatggttaggcacgatacatgcctcacaaatgttaagtgcaaacaagaagcatgagcaagaaaacataaatcgtctccaagggccaatctcacacaacccacaagtaagcatatagacaaatggcacgtaatggcccaacaaaggcaatagacaatcatcacataggcaacatagaagcatacagaagaagcttagataaacatcgttttattattatatggccttgatagggcaagggagtaaacagttgggcctctatcatgctggtgacaaggtgcttcataagtcaccaggtcacccccctaaagagcttaatggggttttaagagatttccaggaacatatattattatggctctctttacatatgtgaatggaattacaaaaagaaagctaaccaccaaaagtctccccaccccaatgaggtgcttggtgtaagacttgactaatgatcaagcaccaatgcatgttcacattacaaaatggccctttgtgggtatgccatggggcagcacgccacattctcccccatttaattgtttggtgtccttgacgaacctgctgcatggtcttcagtcttttgcaaaaattgcaagtcctccgccttctcccagctaatctcgtcatcagcgaggcctttccatttgaccaggtactcttttctcttctttctctttacacgaacagttctttcaacaaggattgcttctggttctctactgctgcgtcgttgaatactgatgtcatccttggtagactggttacatgctagatcttttggatcttcatgatacaacttgaggttgctaatgtgcatgaccgggtgtatcttcatccaagaaggtagttcaactttttaggaggaaaggccaactttggagatgactggaatagggcccttgtatttgcatacaagtctgatgtccttgtctctatctcaattgttctggccttagcttgataacactaagtcacctactttgaactccaacagtcggcatttttgatctaccaacttcttcatttttagtgaggcattctctaagtatgcttgggaaatctctgtattcttcttgcagtcttttgtaaaattgaaggcccacggatttcgtttgttgtactcattcaccgtgtgtggtaacagtggttgttgtccattcacaacttcaaaagggctcttgttcgatgaagaaatcttttgagagttcaaacaaaattgagctacatctagtagttgcgaccaattcttcttgttggcattgacaaagtgtcgcaaatactcctccaacatcacattgaatctttctgtctgcccatctgtctgtggatggtagcttgaggagttgttcatttatgacccaagaagcttgatagtgcagaccaaaaggtcctagtgaatctttgatctcggtcactcactctattctggggaactccccagtactttactatatgcttaaagaaaagttgagatgtctcttttgtcgacactgcttcgacactgggatgaaggttgcatactttgaaaatctatccacagtcaccaagatcgcattcaagtctcctatcttcggcagactagtaatgaaatcaagcgagacactctcccatggcctgtttgggaccaacaaaggctctaacaacc

SEQ ID NO: 24600 - DNA, 3690 bp, Cannabis sativa
  modified_base (3071)..(3072): a, c, t, g, unknown or other
agagagccttaagctagatcattagaatagtattatagagggtaacggacagcaatgatatgtgataaaaataaattttatactgaattcctcttaatcctagcattttgaataatatggtttaaatcaatagaacaatatttgctggatcatgtaataaagaaccttatctttttgtacagatatatttatataattgttatatgatggattggaagatctctaaaatccatatgtattatgtcgatcggcaagatcgtgttaattagatggatacaaatattaccgtcaggcattaatatgtgtgcctcttatcctttcacaagagtcagaaaatgcagaaggaacagtttgaagctttaataatatcttcatataatattatttcctcactaaatttattggatgaaaatttaaatttataaaagggtttcatatatatacttgtaataatacaatcgtttattttaagaacatatacacatcatgtaaccaaaaacgaaaaattatgatttaggttcaattttgtctgatagttcaagtttgaacaatgatattaatattatcccgttacatattttttattaattttattctcatacatatacacattgaaaagaaggaagaagtagctagaaattggttggagagtaattattcatatatagaaattcaaaattgaaattgaaaagttggcatgtgctttaaattccattattatctaaatgaataagttttattgtgtttgaaatgtaaaggtgaaccccctttaatactttattgttgtcggtagtgattatgatgagataaagagatagtataattacattatatatatatatatatacataaagatatataaagatatatgtatttgcttatttggaagtgaaatgtcaagctgggtggctggggaacttctagacagatgcattcattagtggcgtcaaggataaggttattctgcaaaccagacttgcaagttgccaagaagcatggagaaaggaaagaaaaatcaatttcaaaagatatatgtgatcaaacacatagaatagatagctagaatcccccaccacacaagtcttatcaagtttcatccttttttctcttttctttttcgacaacattcctttttcgaacactacaaaaacgaaaaaacaataataatcatatatcaaaatagtaataataatattaaaatatccatgttaatacatacagattttttttttttataatgagagattttggtggccaaaactacggaattgatgtaattttcagattttattgtcgcttaaggcctaatgagaaatttctttcattaaaaaaaataaataaattaatactgattttcagttcaaagtcgttaattaacccttactaaaatctctttagtaaaaaatgattatggatacctagccttagttaacaatactatcataattatttattgcatttatatggggtgtgggaaaatattttatagaatatgtatacacaaaaagaggccaattccaattaatttttggagtataaatcatacattcactacagtgttagcttccatcgatctgttccttcccccgtattccaactgtcagcttctgaaatggcctcatttcgtttgttctctctcttttttttattttttttttttgttttttctttacttctattttcagttttccaattgactctcagatttccttttttctttttagatttcagacttcagtgatcattatctgtgaatatttattttcctaaatttgaccataaattattggtcaagttaaaatttattttgggcaagtattgtaagtctgatgtagaaactttgacatgtttcatgcataagagttgttccaagcattatcatttacaatatctccaataatatttgatatcataaaaggaaaaattatgaggcagagcattctcgagatgaataaatcgtaaatatctactaaaacgaacccgacggaagtgacaagagagaaaaagaaaatggtaccaaagaaattagtcaaaccaaaaataaaggtgaaaatgaagtgtatattctatttacaaaattaaatattcctagaaaacgtgtgacaaaatatatacaaagcatggtggagaatcaattaattaattaaagttgctatgattggtgtaatgctatattccatcttagacttacccattttggagaaccgaatctttatttgaaagtagatattacatatgctttaccattttgggcagggaaacttaatctacacctggcttttccttcctacgacacgtgtaacatatggtgcctaattacataatctcttccatatatatctgatcatgacactaatgcaaacatatatacgtactctcactcgcttttcatctttctatatacaaacaacattctatatatctatatatatatatatatatatatgtggactcgtacaaatccatttagaattagtacttgcagttttgaaagctgtgcaaaaaaaattactgtaaacatttgtttagtaacatgagtgtttggtactatatatgaaccagaaaataaaaaacagaaaaactaacgatccaagtcttgtatatgatattatataccaatggatgtggttagcgccttgttaattttcaaaaacgaatatactaattaatatttagatatttattattgtaggaaacacaaaatttgtgtagaaaattagtcagtagttggtcttcttatgttttcaacatactcgtaaagttgtccatcaggagaaaaaaaaacattaattggttcacttgtaatttaatttttcatatatgaatataaaaaaattgtattttatatttatattgattgaaataataccgactacaataatttatatgaacccgatcatcttcacatctgcaataattaattataatttatgcaaatttaatttgtgtaaaatctcctataagtataatctataatgtatataatggtatatgtaaaatgagtattgctattaagcaccagtggggcttagcactttctcgacatgtcacgttgcgattggctagcgatnnttcttaaaagttattatattaaattatataggaaccaatatttaattgaaccaatagggatactgacacataagagagtgttaagcaccactgattcccataagcatttctactgtaaaatatatgtacatataagtacacattattttggaaggaaatgtaaaacatactgcaatttccgtatagatatataatacaagaatttgttgagtctttctttctttctcaaataaaacataaataataaaaagtatcgagatgtgtagtgatcacaaaatatatgctctgcaatattcattaattgttacgtatcatatccaacaacctaaaatataatacaatattcaggtttgcatgagcatcaaaacatctatcacaaacaagactgggcattaaaccaaacatttttatcaattttttttttttttttgtttacgggattctctttttcaaggatacggactacgaacagaaaaatgatgatgcgcctaagtgaataaactttttacgtaagcctcattgatacaccatcttctattgtattacatattattttattagattgtattttattgtattattattttaatagtagaataaaatgtttgatattgactt

SEQ ID NO: 24601 - DNA, 2250 bp, Cannabis sativa
  modified_base (27)..(29): a, c, t, g, unknown or other
actaatcagattgtaaagagttttatnnngggcataaaacccaacattaattgcaacaaaacttccaatattttcactttactagcaattaacccccaaactgaaattttaacggcaaaatcccaaaaattcacattatgttagcatttagccatttttatatgtttttagcagttaactgtcaaggtggttgtctacgtgtacatagagtattatccacatggacacaatatacacatggcatacatattggcccacataaataaatatttaaaaataaaaataaattaatttaaaataaaaaaaaattcatttttcatttttcatttttttccttttctacttgttttctttcatttacagcttctctcctttcacaaactttctctctctcttccccctccgtctaatttgacgccgaattggagttgccccacactagaccagaccgtcgagtgccccatcgaactctctggccacacgatggtgaaacaaaaccgttatcgaactcctcctctctcctgtgcttcctttctctctctatctcttacactctttttcattctttctctctctatcacggtgaaacaaaggttgcgacggtggtggtttttagatctggggttttgagcgcatatctaacggaggaatttgatctcttccatcggaggagctcgatctgatggaggcgcgcagatctagggtttggacctcttcttctttgtttttttctctggtttacccatttttagatatattgtttctttatttttgatctcgttctgtggcactatttaatttcagatttgattttcttgacttgttaagttgtgctgtgtggtggttcatatctgggtttaatttttttttttttgtatgatttagatgtgaaagataggtcgaggtggaagtggtggtgatttttgttgtttatgtacagtatgaagatgatggagaagatgaaagaaataaaaaataagaaagacaaaaaatggaaaaatacaatcagaacaagaaaaattaaagaaaaaagaaaaaaaataattatttatttttagttttaatatgatttatttttaattttaaaatattacttatattttaaaaaataaataatttatatgaactaataaaattgtgacatgtgtacattgtatatacttttttttgacaaatacattgtatatacttggataattcaacatggcagttaactgccaaaatagatggaaaggactaaatgtaacagagtgcgaatttttgaagttttgccgctaaagtttagatttaggggttaattgttagtaaaatgaaagtattatgggttttgccgcaactaactcaataaatttaggtgacattttgtgtgttttcctatatagtatatagaacgattttataacaattgagaaatgaaatttatatttttttagaaaattttgtatattgttttaagatatttttcaattattattttaaaacatatatattatatttaaagttataatcattattattattatttaaagtgttacaatttattataagaataaatagatatatttttttgatgataaacattctctgttttagatgactaataaaaagttaatttaacatatttgtaatattttacatgtcattattttaaaatttttacataaaaaatataatttgactcttttattacaaaattatttccacacagcttgggtaatatttttgcctttaatattttttatttactaaaatactacttacacacactctacacacaccatgcatgttcgacggtaattgacccctatcatcttttcctctttttttttcttttcattttcattttcattctagttttctttcaatttttattttttagttttatgtttcaaattttttcatcactgaaaactcatcccaacccacgatcaaagccatatatactcacgatccaaagcttgttctaccattatcttctccaactccccttaacctaattgcccactttctttttcactatcttttttttttgtctgaagttatatattaatggcgattatttgttcttcttcgtcccttccttcattgctcaaaagaacacttttaaaataggtgttaaatctgtagcaactaaatccaaaggcaaatgcctagtgatagaagatgatgactcgaactttgctccgcccgttgtgaaacgggatcgtggacctaccaagaagaaatttaaggtttctgttcctcaaaaaa

SEQ ID NO: 24602 - DNA, 4479 bp, Cannabis sativa
  modified_base (876)..(881): a, c, t, g, unknown or other
tcatttcaaaatcattaattttttctttatttttttagaattagaagcaaattatttaaacattatggtatatctatattagtttttttaatttttttttttttttttttaaatttatgtctttaatttttatctttctttcaaaatctattatgtttacctctttttttaattagtctactaattttacctctctattatttcataatagtatctattcttctctagtcaaaattttgtctcaattttttcacaaacctacacatttgtctctaaagaacataatctattatatctgaaattgtgtctatgtgaggatgtgagaatactttggatataatactcataaaaagatgtatatttgaattaaattttatttaaatgtaaatttgatttatgtattaaaaaaagtattcttcaatttctcttatattttagtaggctaatccaattacatcaagaatttcaacccattaacattttttttatacaacccacctcatacattatgggttgagttggattgggttataacccttatttcaaattaaaaaaaaataaatattaatataattaaattcatacttagaaaaatataaagttaaaagttcaaataaaaaaaaaaactcaaagtttaaatattacagtcatctaaatttcaaagtctaaaacataaatcttgaaagtcatttaaagttgtccatagtgattataaacttaaaataaaattgaagatttttataaaccatctgttggagaacattgtcacatatggattaaatgtaaaagtattgagcatatataaaaacatggaatactccactcattgccaattgattttgagatagagtcctatgattctcaacatggtatcannnnnntatccctagcgggctttcgatccacacacttatctagatggagcaaagacgcatgagatagattaaatgtaaaagtattgagccatatacatgtggtgatagctaaactccgtaggcttagctattttagatttttatacatgtggtgatagctaaactccataagcttaggttgttgaataagaagctgagttagacattccatcacagaacaaatagtaaggagatattggatcactcagtctcaaacccttagcccttttgaaatgttgttgtattttaccattcatcactaaggaataaatcgttcctgcacaaaaattattatccatttaacaaacaaagctagaatgcaatatgatttaagtgaaaataatttaaaatcaaatattaagtgtaattttcttaaattaaaaaaaaaaaaaaagaagaaaaactaggatgagagaggaaaatggcccaaaatgcttggtagccatttaggacccgctccataaacaaaggaatggatgcatttttcaagtttcaagaccataaaacccttgaagataaagaaagaaaagagaagaagacaatttaagaggagagggtaagaaagtaatttcacaaaagcaacgaaggtcgtacgacagtgatttaaggcgggtttcaaatattatctccacagactcagacagacagacacagctctttctttcttcgcattatcccttcggactgagcaaagcaaacgacacacatggctatctccaccgcccttatctccacctttctctccggtgaaacggcgtcgttcccccttcctcacttcaacttctcacctttcccttctcccatgcctgtccacttgcgtgtggcacgcacgcctactctcgccaccgcttccaagcaggcctccaccggcaagggcgaactccgaggcattatgaagccaaggaaagtctcgccggagatgcaatcccttgttggagctcctgagatttctcgtacacaagcccttaaggttatttgggctcacattaaggagaacaatcttcaggtccaacccctttttctctttcgcctttttcttttttggaaagatttctcatgtgggttttgcgttgtttggctgtttggataagactgattcatgtttcgcctttaaacctatttccttcattgtttggataaggttatgttcatatggatgaaaatgtgaaggctatatttcatagtttgttaatttcttcagggtcctatgtttgtctatatgttcactcatttatgtggttatctgtttctatatgaggccatgtttgtgtgactagaaatgattgtgcttggtattccaagttttttggttggtgttgtgcttgtaatacatttagtactgatgttactgtggataaattattgacatttctgttttgaaaagagtttggctgttcaattggatttgatgtgttgttttttgtgtgctgatgatgaatctaaacttttctggttgccaagttaagaatagcttactgacattttgtgcaggctatctaattcgttaaaaagataactcatattagttggggatggttgatttatggctatacttttctctttctgcaacagctgtaattatattatttttgtttgagttcctatgccaacatttgtagtaatgtaaagtattagtttaattaacataataacaatgcatttcattgcattagttgaactgggtattagttaacattagcatattcagttcttgcacattgcatattttagtgaatactttttaagacttgagttgtcttatcgttaaccatgttagagttcttcaactttgttaacagagtttctaagtgtgttcattgatattttaaggctgtaaagcttgctcttcttctgattacagttttctaaattcctttttcccataactgagttgtgattttcttctgtgtttcggttcaaatttttacaaatttttacagtctatgttgaaccgagattggcattttaaaaaaaggataggttttatgtgttttcataaaacttattatagtttcattcgccatataatactattaggagaatagaaagatagtgaaaaatacttgcaaaagttagttgagaaggttagtttagttgtacacaaccagtaagaagctaactaaaggctaaaaacagaaagctaacagtcttatcaaacttctaacatatattaactgtataatcttgggctgtccaattattcagtctactattttcatatgaatatctcggttctttatggctgtatcaaacgtatagttatctgatctgtcaccattgacctttctgtaggaccctgaaaacaagagaatcattgtttgtgacgacaagctgaagagtatttttaagggaaaggaccgcgttggatttcttgaaattgcaggattgattactcctcactttctttgatcgaaaactagcgaggatagcctatagcgatgcggatggtttatatgtagggctgtttttttgggtaatgatactagtagaaggtgggaactgctgaattttggatctaagaaagtgtcatagttttttattttttttttcttcttaaagaactagttgttatgtaagtgtttctgtttcagaactccttattgtgtagtaagcttttctaggcaaatatcattagtgactgccggtttgcatttgctttgctttggttaaaatcttaaaattttgttagaattctcttatagttaaattaagatagacatcatcgcaggttcttgttttctcttgctactcggttatttcatacgtttattttgacgattgagcttatgagtaatcatatgtatgtggtcacaaatccacagaaaacttaaaactcattatcctagttttcaaagttatgtttccatattggtttgctatgaaatattttggtgcatactttatcttagttagtgttttcagttgttaattttgtgacctgatttgaactagaaataatcatattattaacaaatcaattttcttctaaaagtaatcaaagtattcagaccagtttagttttctttttctttaaataaataaaaataaattattagtcagaaattcaaaaagatattagcagcacagaaggatgactacagcactttaaattttcaaatggtctaacagatataatatatatttttacaagaagataaatgtaagaagaggacatgtgaaattgaaaggaatttactgctcacgtgatacattacaaggcgtacatatgatataggataatatgttttatccatatgatatggattaaattttaagaataattacgactttttttcaacaatttttaatttattaaaaggtatctatatggtaccctatattttatctatttacaaatttggtattctgtatttttaataatacttatatagtattttgtattttaaaatcatacctatttggtacccttaatttaaatttttttgataaaattttatcaatataattaataatttaaaattttataaattatgaatttaaatttaattatttgattatggaggaggttccaatggttaaccatttttattgtaaccatcatggt

SEQ ID NO: 24603 - DNA, 1997 bp, Cannabis sativa
  modified_base (75)..(77): a, c, t, g, unknown or other
ccagaaagcactacaatccacacccatactttaatagacactttacagagtcgttttggtagatttttttttttnnnttttttttttttttgctttttaaataaatctaattaaatatcatttagtcttgattagcaaggcccattctattaagaaacttatttaaacaagatttacccacttatggtgttgttataataataaacaaggggttttttatactaaaattttcaacttttttactatggggcggaacaaagaaagcataaaggctcacacaaccaggcattttcgaacctgaattgacgaactataacaaagaaattctggacatgtaggttgaagcaataacgggcagtggtccgaggcaaagattttgagattagttaactgagcagatgtgaaataattagaccaacaatggcttaccaaggcacggtcaagacgaacttcgatccaatttgatgtaccctggcctctcccatgtaaacggatagccaataaggtcaagatcaacaagattacagtcgatgagtgtttggttaaagccatcgactaatgcttgaggatagttgttgccacctcgcttattcgcctaactagtaatgttattcaaatatcttatgatacaccaagggagtgttgatgtttattttagagttcgaataaggttccatgtttggtggcgtaaacctttgttgggctcatcataaaggtctgttagttccatgggattgaactaggtttagtaatttgaatgtcaatgaaattaaatgaaaagttcagcaagtgggtttcaacactactcttccaaagcatggaaatacccttactatgaccccttacatccacagagtagaggcctttaaatctcaacttcacacgtaacctttccaacacatcaccatgacttaaagtttcacaaagaaataaaaaattgggtttcttttggatcacaagatccacaaggaattattaaaaaaaaaccatgtcccaagcccacggcaattccagcttagtatactcatggtaaatggtgggcctcgataccagcacccaccaaagactcattttttgagcccaccacatagttattttcatgcacaacaaaaatactaccatcttcttccataatttcaaaactaagcccatgagaaatagatgggcttaaatcagactgagccgcaacaggaggcacaatagccgccccagaatcattacgacgccgtttagaattaacaatcaaattctcttctaattcttcctccaaagcgtccacgtggatgttttcctctaagttaaaatacttgccacctatatttcccataatttcctcagccccataactccttttgacttactattattagccagctataaatttgatgcaccacatttcctccacttaactcctcaatcacagtgccctgatcgataacaattggtctgttcacactaccggttagctgaccagatggcaacgattcatatgcatcaccatttctcaaccacggggcttcgatgagattatttttatggtgtggttgggctctcatccatgtcccataaggctagacgatttgatccgagggtatatcgaagtttcttaaatagaatttcttagtgcgactgagaatcccgcatataaaacaaaatgtaggaagaaactcatatttgaatatggcccaatgcttcttcccatgtggtgcgtcttagtctcattttgcgcttcaatggaactgttatatccaaagctacccgtactcgcacgtattcacgccaaatacctcaaaaattcttaggatcagactcgacaaacgtaccaatgtaattaccaaccctctaaataacttgttaagatttgaatctgtattgaaggccatgtacctgaacccacatgtcaagagtgttgaaagtaaccaaccgtggatcatccctatgctttagtcgtgcaaagatgaactgaatacgattaaaagtccacggacttccttcta

SEQ ID NO: 24604 - DNA, 1871 bp, Cannabis sativa
aatatgtctttaggcgtcgattaacagtattaatcaacgcatttgactaaaatttcagtggagtgcctctttacagttgacactattgtgtgctcaataacttcagtcataaccctaatactaagacgattaataattgaggttgagtatgaagttaaataatgtgttttattacactcaaatgtgcgagctattaaccgtcttaatattaaacatgttggttattcatcgacactaaaaccaagtgtgttagcattttttaatataatcaaaggagagaccaactcagataaaaacatgaggcaactagtgaagggtaatgctcgtgatggaatactctatttgtttcaagcatataaggactcattcaatggtgaagttgaaacttgtaagatcaaattttgtaaattacaaaacaaaatatggctataaatagttagtttttcatttgttgtaaatattaaaagaacgcctatttaccaatatgtcaatcgaaagttgagaaataattaatcataatttatgctaaaattggcgtaaatattactagtgatgaattactgtaaaaaaaattactttatttgagtacacatattttatttaaattctccaagttttattcgaatgctcgaagtattttatgttattaaaaaaaattctccaacaataatatcatttgacaatttaagagaatctctatttatcttataaaaaaaattaatgaattattaaaaagttaagtgtagaagacataataattttctatggccagtgttgcatgtaagaatcacattaaaaaatgcatagtattacaaaacaatgcattgttcattgagtctctaattaaggattattgcccctttgttggtggagcattgctattatgtggataaataaatagattaaactttgcatagaaaacaacaacaaaaagagaaagtaaagaagaaaaaaattattattgaaagcaaaagactgttgtgttgttccaacttttggcaataaataaacatataattttgtgttattaaaattaaaatgtagaagagaacaatgcccattccattcctatgctataaattatgaataaagatatgtattgtttgtgattaaaacaataaaatatttatgttatgatgttgtagtggggacataattagtacaattgcctacttattgtacctatttaccaaacaccctcaactcaaatcaaaattattacttcaaccatttcttttttaaaaaattgttatatggtagatagttaattaatagtgttgtaaataaggatgagttgtgctttttgtcataggcacgagtatgattttatggcataatatagtacgatgttgtaaattaaattgacacgatatgacaccaaaatatgacacaatataacaagctcgaaagtacagcacgtaaatataaatagaaaacacaacaaattatcaactatatatttaatcaaattattatgaaactaaaatataacactaaattataattaaaactaaatattgattagttttagagttgtgagttaaaatttgagtatttattagtaaagatttaatttctaaaattataaactttttgtatatgattgtgtgaaatatttttgaaaaattataagaaaaataattaaaattataaaaaaaaaatacataatttaattagctcattcattctcttaaaatatatagatgattattcaattgttacattaaaaatgtaaccatgatgattacatttcttataacctattatattaagttaccaatagataaaaattttatttttaaatttaaattaattataattaactatataattaaaataaattaacttttaattgatatatctaataagat

SEQ ID NO: 24605 - DNA, 2919 bp, Cannabis sativa
  modified_base (1570)..(1570): a, c, t, g, unknown or other
tatatatatgctactaagaaaagatagctaacaagtgcatacaatatgtgtaaattaattacaatcaagctatccaatatatacattgtgattcaaaaaaacaatatagtttttttcttgaataggtgaactgttttattttagattattatttttcattgactatagacaagctatttttgtaaataagaagttggagatgatttttgaaattaaaatgcaaaaaatctcataaaatgtaaagttttcaaattaaataaatacagtaaactcaatctgcaaatatctttttttttttttttttagaaaaaagaatgatatttttctaaaagtgttttcgaaaatattacaaagaaatttaaaatatactattaaagtcaattatttttttttttttgacaaattataaacttgagtatttgattgtgcaaaaaaaaaaaaatcactcaattgctaaaaatacatttactaattgttaatagttttatttaaactaaactaagataaaaaaaaaaaaataatccaaactcatgaaaagctatcaagttacatgaaggctcttgtatcacataatagatatgtaatgtagatcattaaaaaaaaattatgtaatgtagttgtaaacttttatttatttgcttatcttttgaacaaatttttttattaattttctttctacacaatattttgttggcaggaaagtttaagtagtcttccatttcgaaacccccatcccccacaaaatcaaaccaaaattaatattccaatcaattgtacaacatacggtatcatagccagttgcccatcaaattattctacggcttacaatccaaatttagatcaagatcatccattgtctcccacgtgtccagactactttcgttggatttatgaagacttaaagccatgggcccagactggtgtcacaaaagacatggtggagaaagctgaaactatgagcctagcaaactttagacttgtaatagtaaaaggaaaagcatatgttgaattttataggcattcctttcaatctagagatattttcactctttggggaattctacagttgttgagaagatacccaggtagagtccctgatttagaccttatgttcaattgtggcgatttaccaattgttcagtcagcagtatttagtgggttcaatacctcagtaccaccaccagtatttaattactgcaaggataataccacacttgatattgtcttcccagattggtcgttttggggttggtatgaaattgtaaacttctttctttttgtttttccttttttggaagatgaatttacattaaaactattttgttgatttttactcttgtaataggcctgagatagacataaagccatgggtaccattgttgaaagaaataaaagaaggcaacaagaagaaaaactggatgaaaaggaaaccttatgcttattggaaagggaacccaggtgttagtctcaatagacaagaccttttcaaatgtaaggcttctcccttacatgattggaaggctcgtctttatgctcaagtaagtaattctatttatttatttatttattnttattattattatatttaaattttatatttttaaaattttggtgttttattattaaattatttaagtaaataaatttggaaaaatatgtatttagaaggttattttgataatctttatttgttttaacatgtaagaaaaatatttgagtgaaatatgttttcaaatgatcacataattgtagtttttgtgaccattaataaattttaataaaatttttgaatagtttataatattaaaaataatgttcaacaccagttatttatcacacgtggataaaaaaaatagtcatatataataaaataatttaaccattcaaatatatttgaaaatttacttgtgttttgtcagaaattgacacattgataatgcatgttaatataatgttatatatataagagggatgcgttactcctttcattgagataaaatttcatatatcttataattttaatatggtataaaagaataacgagtatccgattcaaatccaaataaccaaaccaaaaagacgagccaaaaccttaccatacactcaccctattttatctttgccactacacttgttttaaataagtataacatatacgacggtgaaaagaacaatagaccaaaatgctctgtcgaaacaaatagctaggaattctaaaacattatttttaagaattgtataatagaattaccaaaaaaaatttatatatcagttggagataattaatgtaggttatgttatatatgtgttggaaattataggactgggatcgagcagcaagacgtgggtacaagaaatcaaatttggctaagcaatgcacacataggtttaatattatacatgatcactttattatttttgttataatacaacaaaatgtgttgagatttcaaaaatcaattagttgtgttcttatttcaggtttaagatttatattgaagggaatgcttggtctgttagtcataaatatattctttcatgcaattcagttacattaacagtaaaaccacggtactatgatttttttgctcgagctttgattccaaggcaccattattggcccatcaaagttaatgacaagtgtagatctatcaagtatgctgttgactgggggaactttcaccagaaagaggtaatcactgaaaagctattttttttttaggctattagaattttctcctcaaattttgatatggactaaattatatgctttttaaattttaaaaaccgttaaaaatctcctttgaattattgagattaaatttagtggacatgatttgacacatgttaaaatttaaaagacatgatttggtagatataaaaaatcaaacaacatacatggacaatcatcgaattagt

SEQ ID NO: 24606 - DNA, 1534 bp, Cannabis sativa
tttatatattacatcagcataacctgggactcgaacccaggacctccaatacacacgcaccccctatggccacttgagctagcctcaagtggttgaatacaattatataagatcttattatttttcatgtaaatttcctataacattctttctaaaaccttggagttatatatgagtttcagtatacttacagagattgtagcacaacaaaatatcactcatctcattcaatgatctaacccttgttcctttacgtgtagagtattatcaatcattaaacttgaatcaaagcactaatttctacaattttccagaactgtgtgggcaattgttacaacactattgtatcacgaaatctagagagagatgagtttatggcgactaggtttttcgagagagaaaagagagcagttttttagagaatctgaatctaaaaattagtgtgtagaatgctctcctgtaactttcattttataggcaagtgaagagttattttttctcattaatcaaataaaaaataaaaagaagatacgaatggaaaagtagctacggtagtcgcccctcgcaatgggcctaggtaagattttcctcatttgttcacttaagcctaataaacttaaaaatatgtcatctttttatttttactatatttaattaacattttttatatgtaaatactagttttaatcgtggaagaaaatacaatattgcaagaggttataacctgcaaaagataaggtgaagagcatcatgtgccaggacaagttcacatcagaaaaatacaatattgcaggaggttataacctgctgcaacctatttttgagaagcaaatctggtgcagaaccaatatacctaaacacagttttattctttggttagcaatccaagatagattgaaaaccaaagatagactacacaagcatacatcatcgacaatgctgtatgtttgttctgtacacagctgatgaaacattagggcatatacttttctcctgcactttctcacaggaggtgctggagcagatgaagaattggctctgctagaatatcaaatcgaaggcctaggataaaattataaggaagattgagaagggaagatattcgaaaaaccagaaaacaggttttcagtgttgttgttgcagctctggtttatgtcatgtggcttgctcgaaatgagagtctatgaaatgagaaatagcaacatgcaagccatctagtgcagcagatcaggttgttagttaaaaataggatcagtagtgtcagtccaaaaaaagttacagcaaaaaacaaaagttggattgatagtttgtgaagattgttttaattcttgcacagaacatatatattgtatagaatacataaaggcctgtttggttcttttaggatgtaattgtttgtattggagtaataaaattccttattcataaaaaaaaatactagttttaatgtaacgcccgtattttataattaataaactcgaaagttaattttaataatttatatcttaataaccaaaaggatcgggatcccgaa

SEQ ID NO: 24607 - DNA, 5462 bp, Cannabis sativa
  modified_base (1678)..(1678): a, c, t, g, unknown or other
  modified_base (3522)..(3526): a, c, t, g, unknown or other
aataaaaatataaaaagttattactgcattaataagtgacaaaagagtaaattaaaaagtgatatttattgtggtataaaattttgttcgtgctatattttgtgctaataaatttagcacaacttttagcatgtgttaaccacattatacactactattagggctcgtttggtacgccgcattgtattgtgtttgattagattgtattctattgtattagtattatttaatacagtaaactcgatcccaacactgactacaggttgcgtccgggtcccgggtcctaggtcttgggcctagattcccgtctgggtcccaggttcaagtctagatctaggtcccaagtctgagtcggagtctgggtctagttttgggtccatgtccacggttctgggtcggagattggggttgaccgtggatcatttgtaaatattataatacaagctaatacagaccatttgttatgtattaaatactacaacttacattatatcaaaaaatttggtcttaataattaatacaatacattggtttatccaaacatagtgttatttattatttaatacaatacgactcttatacggcgtaccaaacgagccattaaattttaattttataaacataaactaaaaatgcatatacaccactcttataacattttattagagacactcctagatgcgcacgacattttttcttgttgtaggggtatgatctattttcatgtttcaagaaattatagctcaattttttttacctcataatgttgcatattgtagttataatagatattttgtccatttttaagaaattctggacacttaattaacagtgttaaaaataaaattcaaattagtctgctatacccgcattaaaattgaggcaagttattttgtattttacattacaattgaatattcaaatcttatttttagcacttcttcgaaagtcgatcatataaaaaaaaaataatttattataatttcattatataccaaatacaaattttgttatacatataattgatctaatagtatgtattggcattggatgcagaaatgtaacttgtttgtttcaatttcgggttcgggtagtaatggggttggttacataacagctcaaggaagagagagttctaacgaaacaagtgggtatgtatttcatagtaacaccatcaaaggtacaggtcctaccttattggggagggcttatagaccccattcaagggttttgttttacaaaacctatatgagtgatattgtcagccctgagggttggaacgcctgggaaagcaagggtcacgagtaagtaagtaagtaattattattattattatttaatattccaaactaaattttatatttattaaattattagaaattatgtgatgcacattctaaaataagtatatcgatgcacttctttttatattctcagtatttagatatagttttggaaaattctataatgcacttccgtaaaaagagtgtattgatgcaccttaatttattttagcatttgagaagtttttttaatttaatttttttttcatggtcgtgttcattatagttatttaagatatcctgtaaaagttttagggattcgaaaaaaattaacatgctgaaaatagagttcaaattgtgtatttgatcttgtttttatattataaattattttnaattttttaaaattttataggatatcttaaataattatgaagttcacgactataaaaaaattagattaattttttttttctaaatgctgaaataaatagagatgcatcagtgtacttattttagagaggtttattgtaaaattaattagtaccctattttatgtgagatgagtctcaccacttgttatataaacatatattatatttatttgtgatttatctatgcttatacatcattattctaaatttataatatatagtatactaaacattaattaaaaatctataggaaaaccataacttttgtggaggagggatgttttggacctggatcaaatcaatccaaacgagtgcattggttgaagaaattatctcttcatgaaaggaaacaattgataaacataaataaattcattaatcaagatggatggctacaacagcaaccccgcccaacttaaagcatgcaacaaatttaatttaatatcgagtgtacaatactatatttcgagaacgaaccatctctcaatttattgtggaactagtcagaaggactgtaaattactaagaagtagtttgtagtcctcccaatattagtcccacattttgtttgagaaatggcttcaatcggaatacaaagtatttatgctcaatatttagtttttagattgttggttattttatatatttttgtatctattagatcggttatgttttattacgtttttatgttttaataaatatggtttatattagctaattatgaattagttttggtattagttaaataattttgatttaacaattatgtttcgtgtttgacaatataacacttatcacccgacaataaacatctcgagatacaagtcgcgactaatttttgacatgaagccgtaacatgttcattaataattaacccgtttagtaacactcaacatttatatttagtaattgcatttataaatccaaatagtgatattatatatttattattaataagtttcctttaataaaaaaaaaaacagatgtatttttctgaaaaaaaatgtaagaaatccacatgttaccaattcaatacaataattaccaaaatgttattaatattcttccttataaattacataaaatccagctagcctagcatttaaatatcaatgcaaaattttcaagattacaaattaggaatttaggattttttgctgataagtactaataatctttaaaaagaaagaaatcattaattatatggccctaacatatattttccttaatttatatttattaattatcacaaaaacaaaaacttctgcctatatatataatcaaacaatacatacaaacaaacagtaataatctggcaaagtttttttaaatcaagattaataattcatatttctattatcaaatacaaaatacaggtgtgtatatgataattaagatgaagttgaataatgacaacttcatatttttcttaatactcatcttcttcttcttaagtggtactactacttcatcaccagctcactatagtactactaaagaagttacaatgaaaaccataacagttgacaagtcaggcaaaggagacttcaccactgtgcaacaagccattgattctgtaccagaagataacaattcttggattcgcatccatattaaagccggcacttacaagtaagtaacagatttcgttacggcttgtgttttggccaaaaatacgttcggctcgtcttaacttagactttcacctaaggtccactcagccattaagtccaaaaaaaaaaaaaaaattctctttttaaaaatgggattatttcacaaaaatataaaaacaacaaaaaaattannnnnatacagttttacggaattttaaacattttttacgatttttttttttattttatttacagaaaatacggtctttttatcttgttaatttgttgttgattttttgttatatgtaagttattttttgttgttattttgatattacttttacgtagttttcttgttgattttatgttgttttcgtattattttttgaaaaaccgtaaaaatataaaaaatcattcttaatttgaacgtaaaaatgtaattattttacaaaaaatggtgtcttataaaatagagattatttcaaaaatacaaaaaaataataaaaaaaatttaaaaatatagttgtgcgaaattttaaatatttttacgggttttaagattttatttactgaaaatacgatcttttgatgtatccatgtgtatttttatgttgtactcttgatattaattaacaaagtataaaatttaaacaaataactgtaacaatttctcaaatattatatgttacaaaatcatattaattacattattagttgtatatactaatttttcagttacttattatgattatttacagtgaaaaagtatcaatagaaagaaggaaacaattcatatttttggaaggcgaaagacgcagcaccactatgattgcatggggagatggcggagacgttgttaaaagtcctacattttcatctcacgctgataattttgtcgcaactagaataacattcaaggttattattatagacattactgatcagtagaagagtttctttcatctaaaaaaatttattgtcgtccaaaattataacttatatttaatatattatctaattaagtacatttttattattaattaattaattaattaattaatacgcggtgcagaactattataatcatcctgtaatgacgaataatggtgattattataaagatagggatggaaagaagattttgtgggcaccagcggcacttgttgagggagacaaagctagcttctacgattgtgctttcattagtgtacaagacacattatttgatgctcttggtcgtcactattttcaaaattgttatatcgaaggtgcaatagacttcatttttggcgacgcacaatccttttatcaggtatatatttattaacttgatatatttatatattattaatttagcttaattaattgatacatatttataattgacagaaatgtaacttatttgctgacactgcacttttgggacctgggcaaagttatgggtatatagcagctcaagggagaaagaatcaaagtgaaagtagtggctatgtattttttggtaacaccataaagggttcaggtcctacattattaggcagagcttatagaccttattcaagagttttgttttacaaaacctatatgagtgatgttgttttgcctccgggctgggacgcctggaactacgtcagtagcgagtaagtacttttattatatataatgatgtatatgttcatacaaaatatatatatatgcacatttaacagtactgtgaatgcttagtcacacacataatatttatttaattactaaaattttattacgaaagcgaatgctgtcttaatcagtatgattggctaaaaattattggcatgtcattatattttgatgtatattttgtgtccatgtgatacattaatttttgttgttgttgttgtttatagttagtattatattagtgtacatgtacacaaaatatgcacagaaagtgacataataatattatttctctaatataaaataacataaatagtatattcaacactaaaatattttaaggtgatcatcgtcatttattcttcaaagtgactttgagatgtgggaaatatatattttttcattattattgcctaattatcaaagcaattatatagttgctcggtaccaattatataactataattggttac

SEQ ID NO: 24608 - DNA, 2721 bp, Cannabis sativa
tccattcccaaatcggcctttctttaagcaacggagactctcgaaaccaagaattgcattatcttgaatctgtctccctttgatgaatgcactctgattctcagaaatcactttttccatgtgtactttcatcctattagcaagacatttggaaatcgccttatatgtgacatcacataaactcaaaggcctgaagtctcctaccatagtcgggttcttcaccttggggataagacatagaagagtatcgttcaggcagctacagtccctacctttgtttaagatctccaagcaagtagttatgacctttttacccacttccttccaatgattctgataaaacaagccaagcagcccatatctccccggggctttgagagggggaatctgttctatagcttctttgacctcttcttccgtgaattcctccaaaagcctatcattatcatgttgagacaaccggtttggcacacatcgggttagagtatcagccaagtactccttctgtcctgacgaggaaaaaaaatttgaataatagcgaaccaaaatttctacaatctcactgtcctttttgcaccacctcctttgttcatcaaataacccacttatcgcattcttctttttcctttgggaggccttatgatggaaacacttagtattgcggtccccgtgagcaagccaaagagccctacttctttgtttccatagaatctcttccttctcatccgcaacattcagatctctctctatactcctttgaatttttcagtccgtaaccccacttgaagaagaaagatttttcaattcctctttaagttttttggttctagccctaagttccgccttcttatccttgttccaatccttgaggacctccccacaatgattaatcctcctccgaagcccttgaggggatccccaattggtgctattaagccaaaccgattcaactattttcccacattgctcctcctcggcccaagcctgctcatagtggaaacgggatctccacctaggttctttgttggacatgttacaatctatgttggcacaaataatcaaaggccgatgatccgagttccaccaaggtaggagggtgactataaatgacaaaaacctccgaaaccactccgggttagccaaaatcctatccaatttctcaaaaaccaggttgttctgtcgaccattacaccaagtaaaatcgccccattccgccctaatttccttaaaattgcaataggaaagggcttttcagaaatcacgcatcttagattcttgtttcaagcagcccccttttttctcattgacctttacaatctcattaaagtcgcctccacaaatccaggctccatgtatcatatctctgagacgctccaagagttgccaagagaattttctatctcccggatccggacttccataaaacccagtaaatctccacataaatcccagaccattttccacaatagcatctatgtgagacacagtaaaggacttaatactcacttcataaggatctttccataagagcgctaaaccaccacttttacctttggccgccaccacaaaacaactatcaaaccccagcacaattctaattctctccatagccgcttcattaagtcgagtttcagataagaaaatcataccgggatgatgatctttcacatgggaacaaagagtcttcaatgtccaggggttcccaagcccctgaacattccaaaacatggcattcattgttctcggcgacccagctccgtcggattcgctgctttcaagttcacgccagagaccaaatccaaaatattagaaatgtcccctggatccttctccttccccgagtgttctaagtgttcctccgaagcctttatgctagtcgaacatggtgtgttagtcttcatatcaatctttttattccttttagccaccaccctcttcatcctttcacccttctgccttgagtttacaccccttacatttttccctagagtgatggggatatcaatccactcactcccttcattagcagatcccatatccgaattcgccaacattgttgagttctctctatgtattctctttccagtgactatctcaggcccttcacccctgctcgtagactcccaaacctctgcccttcttttacagccagtccccctctcattctcaaaatctttctcaacccgtttgacatcaaaattatccattagattcataaaatcacaaggtaaggatgggttgggaaacggtacctctttatgtatggaattctgatttgtgattcttggaaccacttcaatccccttcaattcaccattcgaacacccagaattcattatcgtggagatcccatctgctttttgtgaataattcccttcaacgtctgtcgccattggagacttcttgattggaattcggttcatgtctaagtttccatccccttcaattgattttttccctctgttttctttaggtttatcatccactttcaaccataaaccatacgcagcagtgctactaccttctccatcagtaattttctcagggtgtttgtcgcaagccctgaagtcatgtcccacatacccacaactgaagcacataaagggtaatttatcatagcggaatggcaaccaaacccgactcccatagctcggaaaaagaaaccccggacaaagaggtttatcgattgaaatccatactttgaaccagaaaaatccgttc

SEQ ID NO: 24609 - DNA, 3364 bp, Cannabis sativa
gcatcatcctaagacaaaagatgatgatgaaactaaaaatgctaacatagaattgcagcattaccaatgggtcagggacagagccaagagagtgtcaaaggcttcaagaagatttggttatgctgacattgtccatttttcctggaatgttgcagaaatgagtgacaatgaaccaagatcatacagggaggccatgaactcaactgacaataggaaatggggaacaacaatggataatagaacctagattccagtgaaaagacccaaagacaagagaataatcagctgcaattgggtttacagacataaagacataattccaaggtgtgactcagccagatttaaggctagactggtggaaaggggctttacacagaaagagggtatagattatacaaaaatattctcaccaatagtaaagcacacctcaattcaaatgttgctagctttgacaactatggataacttggaattagagcaaatagatgtagaaacaacgttcttgcatggggaattagatgaagaaattcatatgaagcaaccggaaggttatgaggaaaaggggaaggaagactatgtatgcttgcttaagaaatcactttatggtctcaaacactcctctaggtaatggtacaaaagatttgatgagtacatcaccaaatctggatttaaaaaaagtgtttatgactgctatgtctatgtcaaaagtatcaatgtcaaatttggggtgtatctactattatatgtagatgatatgctaatagcaagtaaaagcagtgaagaaattaagaaggtgaaaccattgttgagctctgagttcgtaatgaaagaccttggtgcagctaagaaaatccttgggattgaaatactgagagacagaaaagataaaagcctaattctatctcaaagtgagtacatctcaaaagtgttgcacagatttggtttttcatatgcaaaactagttagtgcacctttagcacaacacttcaaattgttaaagactcaatcacctaccacaaatgaagaattgaagcaaatggagtttattccctacaataacctagtgggaagcctcatgtacattatggtatgcactaggcctgatctctatcacaacctaagtgtaatcagtagattcatgggaaatccatggtaagaccattggaatgcagtgaagtgggttatgagatacctcaaaggaacatcaaacatgggactcaagtacaaatcagagacattcaagcaagaagtgcaaggctttcttgactcagattatgctagagatatggacactcgaaggtctcaaactgtttatatttttactctaaacaagtgtgttataagctggaaagccaacctaaagtctatggtggcattgtcaactactgaagtagaatacactgcttgcacagaagtaataaaagaagcaatctggcttaaaggcttcagcagggaaatgaacattaaccagaagagcaccacaatcttatgtgatagtcaaagtgccattcatctaagcaagaatcagatgtatcacgagagaacaaagcatattgatgttcgactacacttcactagagatatacttacagaaagcaaagtaagactcgagaagatagcatctgaggacaacccatctgacatacttacaaagatagtgactacagcaaagtttaataaatttcgacaccaacttggaatttcagaactagcttaatcactaccatgaggtcaacactaaataacaactaaggtggatatctgtgagatagttgttagttatttttgatggttgacagtaagtttcctaactgtctaatgtcttaagattagttagcatagtgtactttgtaacaaactaaggtcaactaatataaggctcttagtccattctagttatgttaatctagtcctatataaggcatatgtatatagtgtaattcaacacaatttcatcaatacaattcgaatacatttcttattctctcatactcagttttctagttttactggtgtgtgagagttctgtccaagaactcaggttttatagctaatgaccgaactgtattcttaacaaaaatcattaattaaattttattttcatttgattataacgatcgcacgagacacgatatgattttaaagatcgcgagatcgcacaactaacttcatacggtacttgtcattttaattgttgcaaaatagtaagacaaataaaaatttcattatggaaataattaaacatatacatcatgacatcccttttcatcattacaatttattaaggtataaattttacatttacataatttattaatattaatcctcttaattaaatatttcatatagaaatattctatcactaatatttttatataatctctcattttttagtttaattatcatgccaaattcacttttggggagatgacattctacggacaccataaaacaaaatgtaaaaaactttcataatattagttaaatttttttctttttattaaaaaaataaaatgtctaaacaatcttttaaaaataactacatcatcaatctcaatcctattttattaaatttagaaatgttaattttttatttattttattagaaaaacacttgcaatttttttagtttcacagtttttaatatttgttacaaaatcactacatttctaaatatatcttaaaaataaaattttctaatttcaatactattgctttgtttgtaatacacacattagattaaaccaaagaattaataagtataaaaaatatatatataaataaaagaataattataaaagttgaataacaccacactaaacgcggcttaattttctagtttaatagataaaagatagtcactaatggccacaataggtaaacaattgtctcttatcttattttgcaacttttaaacaaattgtttaggcattcaaaaataaaagttgaaaattccaaactctccaattcatctttaatggtttaacgaacaaactagaacatgcatgtacgtacttagtttttacatatatgattggtacatatcattatttgagcctaaagggaggaattagatttcaatcttcactaatcactccaatggtccaggatatttattatccaacatgttatccaagaactcatcccaatccatctgagaaaaaaaaacatttgttagttatatataaagcttattcataatatctatttataaactaattttattgaaaatttactaaaagttactaattggtcaaattcaacctcattgagcttgtgtgtgggaaaattaatgaattgttcagcagtagcagtggagttaagaaattcttccattccttgttgctgcaagcacacacattta

SEQ ID NO: 24610 - DNA, 1816 bp, Cannabis sativa
aatggtattttgaagcccatcgagattgataaaattatgacacatttatgaccatatgttgatgccttttcaccactgaaattaagtccaatctcgatgagcaccaatagaccgatgaaattggtggctttagtggtcaatttggaaacttttgggtactggaactgagaatgaccttttttagcgatccgcatgaccaccagacctgttgagactggtaaaaatagggagtctttatatttttatttgttaaaattctctaactttccaactccaaatcacaaaagtaacatcaagacgcatgtaggtcttagaaatggtaaaactcaaaagaaattcatgcgtccacaaattctttaaacaacaacccaattactcagcccaacctaaattaatcagcaccctcaaaccctagtatacatcaaaaaaaaccttcaagatacactcacacacacattcacagtggaaaacttagggcttctagatcaaattcacacacatagatcacgataacaatcaaacagagaaattagagagattagggtaagagtaattgtggtgttttaatcacctcaaaaataatcaagaacacaaaattactattagtgcaataacatgaactaacaaattaagagattaatgaaaacagaaatcaaatcacactaatttaacgaggttcaatcagttgcttggtagtggcaactgtctacttcccgaatggaacaacctttggctttaatctttaatgattcacacttgatattgctacaatggtgataatcaccaacaggtatgaactcgcaagaggatcaagttcatatctttatttatgtacatagagaatttagaagaggaggatgaagaagttttgaaaagggggttgtctctgactgtagaagaggttggtatttaaaggcaatgtctaagagtgttgaagagacagtaactaaatactaatcggacataactaactttaactaacaccacaaatccacctttagttgaagttagtgaaatcagtattgaatagactattccaacagcctctaagggtactagctgctagtgtctatacttagcagctttaggcaatgcctaagcttgctaatagagacccctttggtgagcatttcagctagattgttcttagtattcactttgcttacttgcacttcatttctgctaatgatgtcttgaatgaaatgcattttgatgtcaatgtattttgacctctcatgaaacaagggatttttcatcaaatgtaggacacttttattatcacattacactgtgatattttcttaattgaagccagttccctagttaagcctttcacccatatgtcttctttgattgattcagtagaatacatagctactatcttttgtagggttaatttccaacttatgcatccactttgagctgtgaaaacataaattgtaagtgatctcctaatgtttatgtaccaagcataatcactatccacataccctgcaacttccccttttggattgcaactagcataataatctaaataagtgtcaatggttcctttaacatatctcattatccattttagagcttcccaattgtattctccaaggtcagatataaacatgcttgtgatgctcatggcatgtgctagatctggacttgtacaaacaacggtatacacaggcttcccactgcacttgcatatggcacactatctaggaactttctttcctcctctgtttgaggtgactgatcttatgagagtttgaagtgagcagccaaaggaatggtggctggttaggcactgctcatgttgaatttg

SEQ ID NO: 24611 - DNA, 4142 bp, Cannabis sativa
attgccaggggttccaatgaattataaatacgcgttgcttgtttgtaagatttgattggtaagacacaaataagttacataaccctattccaccacttgatttctaccaacaatggcaatgaatttcatcaacgaagcctatgaggagactgaaagaggcctctcttacttttcccaaggaaacaagataattcgaagtaacaatgggaacccccaagcttaacaactaaagtcacgcatatagtagggcaaatgaagaccgaaaagtaaaccaaagacttagccaaattcaaaagctagtgatgcctcctcatgccaattccaaaattttaaatcttgagcaaatttctaaagttgcttaaaaaaaaaaaagaagttgtcatccccgaagaacaagtgagagatcatatgccctttccacccacaaacaagacccaaatattcttcacttcaatctctctcataataagcgaagaaagcccatcaacacataataaaaacaaaaatagaaattaagggtgcccttgacgagtactacaagtggaaataatgttacaaaaaatttctccattcacatggagtaacaaacagaagcggagcacttaagagtcagtgaaatctaccccttatcaaatgcgagtttctccatcatgcccttgttaatgaaaaacaagattaaagatctgttattagttgttagttacataacagaattttgttatgtctgttattttgtttttccagctgtaatcagagtactttgtactctataaatactttgtatttttgttttgttgtataatgaagatttctcttttcttctgctttctttttcatctcttttactctctcatgaatttcgcatggtatcagattgccattgatcctctccttcaaaggcgtccacttctgctgatcctgccactcaagcttctactggtcatactctgaccaatgatcctcctactgtccagacgaactccaattggaatccttctctcactctttgcaatcaactttgacaattaaacttgattgaactaattttctttcttgaaaatcgtaggttattcctactgtaattggtcatgaacttgatgatattctcttctatgggaatccaccacctgcaaattttgttactggtgcaccaaatcctgtctttgctcaatggaaacgaaaagaccaattactcctctcatggcttcgttcgtccatgactgaaggaatccttgcctctattgctaacttccaaacctctatcactgtttggagagctcttgaacacaagttttccagccaatccaaggcaagactcctccagttgaagagtcaattctccacaattcgaaaaaagaagcttgtcgatccctgacttcgtcgacaaagttcaattcattgcagactctcttgcagcagctggctctccaattcctaagcaagatatcattcaacttctaaatggtcttggacccgaatttgattcgatggtgtcaggaattactgcaagaagttatctattgagtcttaaggaggttcaagctctcttgctctcccatgaaagtgtcttgaacatcacagtgccttgacagatctgactatgcagatgaaagccaatatggccattggcaactcacgaaatggtgtctacagaccacctcaaggtttcaagaatggtgaccgtggtttctttcgaggtcctaacaccaacaacaggccacaatgtcagctttgtcttcgctttggacacactgcaccggttttccattatcggtttgataagaactaggtacccctaaaacctccctccaacacaactgtccataatccctctccaaaggcttatattactgaacaagaatttgagtatgatccacatgccttttctacatccttcttaccagactttggtgatgattctggtagtttggtgatacaggaccaaccaaccatgtgtcccaaggcacggataatcttgactccttaaccacctgcacaggtgctgaagggctggctgtaggcaatggtaagaaattataaatttctaatattagttcagccactctaccctcttctaattcttatccaagtaagttgaattccatcttacatgtcccctctattactaaaaatcttgttagcatttctcagttaactaataacaatcctgtgtatcttgaatttcacaaaacctgttgttttataaaagacaaagcaacaggagtgtgctgctcaagggaacccttaaagatggtctatacttgctaggacagtcctccaatgcctcaagatcaagttctccaactcactccaagtctcattttcttttcctgctgctatgatctgtaataaacaaaattccacaaatgtaattctcaaatctgattataatactgttgacaacaataaaatagatcattctccttcttgtttttccaatcttgtcacgtttcataccagcagtaaaataaacttttatatatggcatcaaaaacttggtcactgttctttacctgttttgcaaaaaggtcagtctagcataagtaattccactacccccactcaattatctttttgtcatgcctgtcaattaggcaaaagtcacaaactatcatttcctatatctaattctagaggctctcaacccttagagttaatacataccgatctttgggggccatcacatattgattccaaagatggatataggtattacatccatttcttggatgactttagtcgttatacatggatctactctcttgttcaaaagtctcaagcatttgatatgtttacaaaatttaaaagcatggctgaaaagcaattcaacttgcctataaaacaagttcaagaagatggaggggggaataatgaccatttgctaagttcctttcagatcaaggaaatgtcttcaagcacccgtgtcccaagacaagtgaacaaaacgggagagcagaacacaagcacatgcacatcacaaaaatgggactcacaatgcttgctcaatatgattttccattcaaatattggtggaatgccttccatagtgctgcctttactataaaccggtaacctacccctattttacaccagcaatcaccacttgaatgcctttttggcaacatacctgattacaacatattgaagccctttggttgtgcttgctaccctcatttgaggccctataatagacacaaaatggagtttagatcacaaaagtgtcttttcttgggatattctgcatctcacaaaggatacctttgtggaaaccaagatggcagactttatatagcaagaaatgttgtctttgatgaacaatcatttctagcaaaggactgaacaactccctgtcaggtacaatcttcctttactatgcctattgttgttttctctactaattctcacactactatgcctaaatctaatcatataaactctgaaaatgatgtctctgagtactctatcccatctgtcagccctacaccagatctttctccaactactcaatcccctaatcactcaaacacaactcctcaacccagttcgaacttgaacaccctaccaattgcaccctcaaactcactaccagataacactttccccaccatacatcctgctgcaacagaacctcaccatgagtcaccatcctcaataccaccaactattccaacagcgtcccaacccatcccacataatgaccccatatccactcaagagacatcattacctacaggtaccagagttcacaaaatgatctctagatcccagaatggaatctacaaacacaagtcgtatcttgcaacaaaacatcctccatatgattccacattgcccactgaatcgagaacactcaaagcaaccttaaataatccaaagtggaatgctgctatgaatcaggaagtaagagcccttgttaagaacaatacttgggtgctggttccctacgattcctccatgaatgttataggatgcaaatgggtccatagagttaaacttaacttggatggttctcttaacagactgaaatcacgacttgctgccaagggctatcttcaaatggctagcatagattttgatgagacgtttagtcccgtagtttaaccaacaacagttcggcttgtcttgtccttggttgtatccaa

SEQ ID NO: 24612 - DNA, 2060 bp, Cannabis sativa
ttcttccggtttctaataatttgaataccaagaacatagactttttcttatcatatagattgtaatcttacttttaatgataaacctatgtttcattttactggtttctatggttcacttgtctctagtcagcgccctattacttggaatcttttgcataaagttttttataatgatcccaatcttccatggtttattgttggagattttaattgttatctttaatatagtgataagattggaagtgactttactctactgttgacatggagccttttgctctttttcttgataaattcaatctttctcctatgtcctttgttgggaataaatatacttggaaacaaggttctacccatgagagattagatggttgtttgctctgagtcttgatctaatcttttttctgatgctattctgcatcatttagccttttatggatcagattatgggtcttaaaatttgttactagtcttgagagtagtattaatcctgttttccccaaaaagcatttttagtttgagaatgtttggttggaaaattatgcgtttttcaaactgttcaagaatcttggtccagctcttgttctcctcctaataatagtggagctttcccctattttcttgccaagcaggactcttgtatttcctctctcgaatcttggaatgtctccacccgtaatctgttcaaaaataaaatcactgcccttagtaaagctatagctaatcttcagaattctcttcctatggatgaaagtaatgttgctcaaattaaagtttggcaatcacaacttgatgcttttttgtataaggaagaggtgtattggatacaaagagcttgtgttagtttgcttaatgctggtgataaaaataccaagttttttcactattttgcttcgcataggaaaaaaactaacactatttgtttcctcaaaaatgaggatggtgaagtcattactgactttgatggcatttgtaatattgtctcctcttattttgctagcctttttcaaacccagggctatgatactgactctgtagacaaaattctctctactttaggccctcccttagatgattatgagtctgagtgcttaggagaaccttttaaggttgctgaagttaaaagggccctttttcagctgtctgtggataaggctcctggccttgatggccttaatgtcttttttttatcaaaaaaatcggtcaaccatgggccagtatcttattgatgatgtgcttgactgccttaataatggtaaggatttttcctccattaattctactcttattgcccttattcccaaaaaacaacatgcacatactatccaggatttcagtcccattagtttgtgtaatactctttataaaatcatttatccttcctaataggttaaaatctgttttggataaggttatttcaccttctcaaagtgcttttatttcgagaagaataatttttgacaacattcttcttgctcaggaagttgtccatgctatcaattcgaggaaacaaagtaaggtagtttgggctgctcttaagctggatatggctaaggcttttgatcgagttgaatggcatttttgtagaagtgttatgtttcattttaatttccctctgagttttgtatcactcattatgaaatgtatcactaccactaacatttcttttatgattaatggaactgttcatggcaatattaaacctactagaggtcttaggcaaggggatcatttatccccttatttgtttattctttgtgctgaaggattatcttgccttcttaaagctaaacaggatagtaatgtgctaaagggtatatccatctctcgtagagctccctccttaactcaattattttttgttgatgatagtcttatattttgtactgctagtagaacctcttgcgctgcccttagagatgttcttactgtattctacggcttcgggtcaagctatcaatttttgtaaatcctccattctgttttcacctattgcttcttctcatatcaaagacctttttctcactaatctcaatcttcaggatagacccttcattg

SEQ ID NO: 24613 - DNA, 2404 bp, Cannabis sativa
  modified_base (865)..(870): a, c, t, g, unknown or other
acattattcttctcagactcatgtgttacttgttcctgtcctcgcatgaagcatattaagagcaaccaagtgcatatagaaaccatgcaataagagaaattttgtaattagcagagttcaattacttactgaaatcactaaggggtagctcaaatagtaagacatgtagttttgtctctacaaagcttgaggttctagtcactttttgacacctattatagtcaatgacagagccagagcaaaaccttagacagagaatctagttttcaaagaaattgtgagaacctaccttgtaattctctggactttcctgaccctcaaaaaaagattgtagtattggacaatcatttgaaaaaaatatgtatctgaaataatttggggacccatgtgaccgtacttgaatttttacatgcctaaacttcatacaacataatatacagaacaaaattcccttgaatacactgttaaaactatcatgttaaattgagtcttttgttatgttgcagaaacaagcagcagagttcatggaaaaagttaggggagcggttcttaagtacatgacagtttaattagttttcaggtgagtcaaatattatcttttttctcattctggttatatatactgagaatcccatttctatatattgtctatttcaaataaacattatttatttattaaattaaaatagttatattgctaacaactttactgatttttggatgtaggccagcaattgtgaatttggaacactgaagtgaaagttatgcttcaatcaatttgatgttctttccaaataaaaaaaacaatttagtgtaatgatatataatatttttttagaggaaaataaattattattattattannnnnnttattattattattattatgttgggttaccaaaagtaaaatataagcattattttaaggctatctctaatagaactttaaaatgttaaagttgtgaagatttagtactaaatctattcaactataaaacctaatttatatatagtattgtctatattattccattaaatttaatggggcactatagatagcactaaaacttttttttatttattaattgcttttttctttttatttaatattatagctcaaatatatgtatattttttgccatttttaataatataataatacaaaaatattatatttaattaaaaattattttggtgtaacgtgttgatggttatagtgaaaaaataatatgatactgaaattacataatttttatattaaattaacataattatagtgtttatggttagaggtgctctaagtttttctctctaaagaaaaagcattattttaagtactcagtgcatcatacttggcagttgatgatccagtgtccaggcaggagcactgaaaatcgtgtcattatttgctttagtgtataattgcatccttatcttatcttttgacaacatacatgtaactgtggttgagtcagttttaaaccttggaatgattttagaatctgcattaagatgtaaatctatgtttttcctgtataatttaaacctgtacattattttattaggtgtgttaaactcctttataaaacgtttagcaaaaaaacaaaaaattaaaacaataataaaaaaaaatcctttgcaaaattatgttttttatttttgttttttctaattacaagattgaatggttgcattgcatgacacacaacgagagagtattattgtattaattatgccgtgaagattttttaatctctgtctctttttcctttttctttttttttttcaagaggtatatttatatatttatatatatacgtcatatacaatcattttgttgataaaacttcatcacaaatttttgtcttaagagatgagtaaattttctaaacaaaggtcacaaacccttgttctcaatcgatcttatacacccctgaaatgataaatacaactttccacgttatcccacccctgaaacaagaaatatgtacattagctgaaatagtacatattgcatttatgcctttgaccagtcgatattaataatggaatgtctatgctttggtccccaaaactcgtttggaaatactatttgttaaaacacatagtttggttctgttatgcatattaaaactaaataatagattagatagtagttaggcacctcttttatccgtgtcctgttcttgttattattacatcacgtgagttagaacttagatctaccaattcataatgatcatcactaaacagtaaaagatacacaccaaaaagaaagaagaaggaaaagagtaaaaaggaatattaaaacatgtgaacttttgacctactttaactaaatctaacaaaactctcactgtattcaatctgttgctaaatagaaaactcgaaccttcctctcat

SEQ ID NO: 24614 - DNA, 8598 bp, Cannabis sativa
  modified_base (1602)..(1609): a, c, t, g, unknown or other
aaatttgaacgatttccttcaagaggtacatattcctatacatgatcatgatcatcacaagtaattaatcatgatataatatttacttctttttaagccaaataatgaagaagataaaaaaaaaaaatgctaaaatgttcacttggggattaccatattacgacatgaaagataactttcaccccaaccaccatcctcattttgtattttaagtagaaatttgactcctttgcgtattgtttcattgttattataagtcttgccagcagctgctaatccaacaagaccaaaccatgcaccataggtgaagcaagatccccattttccatacctttaaatatatgtataagaaaaaaaatattatgataatcacactactagaagaattttccattaattaattctctttgcttttttcttctttagtttttgctagatagtctcacatcgctaatgtgtggaaagataatagaattataagagaaatgtgctactactcctgagatgaaatcccattcaccttatctcaaattataacattaaatttgagaaaaaaaaaaacctctagtatgtgactatctaactcaaaaaaaaaaaaaataataataataaactgatcgaagtagaacaaaaaaaaaaaaaaaaaaagccactaaaaaaccataaaaaattgatccaagagccaaccaatccaaaaaatagcaaaaagagtcacttgtgaatagaatatataagaggaacgtgctattcttccgattgctaatgtcaattgattttgaaataaacctcattcatcttattctaaattctaaaagcttctcttcatgaagtctatccataactctttttctttagttattattatggaataaacaatcatacacaaaaaaaataccatttatacttagtatgtagaagaaaaagaaatgatatacttaccaagaaccatcatccctttgtgtgtcttcaaggaattttgtagctttaattatgaaattttgaatttcttttgttctatgttgtggatataatttgttgaataaaactaaaccctgaattgttgctgaagtgcattctacatattcatgctcaatcacaatgtccgcgaaaaattcagttggattaaatatctgaaattaaattgtagtattaaaaaaaagaaggttaaatgtgatctagaaaatttgtgattaagaatatataatatatatatatatatatatatatcttattattttatttattttcttacttccatccacttttgtcctcttactggctcccaagctggtacaccgccattcttactctgcatttatcaatataaatgagattagtttaatagtttattataattttatattagtggtaggatcatgaactaattttgtgacaattgttagtaaatcacacattatctgagcttcatatcttatatataaatatgagctaatgtgatagaatcatactttacattatgcaactcacaattccaaaatgatatatatcaaagtctaaactcaagcttttcgtgaccactatttagtcataatataatttttttgtgattaaatgtaacttttagtcacaataaaaaattannnnnnnntaaaacataatatttagatacaaactgttattaatttaattttagtcacaataagtattgcgactaaaaacgtacaacagaattgtaatttttgtgactaatatctttagttacggacattttagtcacaatattagaatgatgatttataattagtcacaactttttatatttagtcacaagttttattgtaactaaaagtaatattttttgtagtgactctaacaagcatatatatagtaagtaaaaaataagtcatctaaaattagtgagtaaaaataactacagtcttataaaaagatgtcagagagttccgcttttataattaatattataggctactctactcatacatatatatgttgccatgatatagtataataatttataattagaaagtttgacatgttacagaaaatattacctgtaaagagagtataacattaacagaatcatacattctctcaagattaatcctctcaccaactatatttggtggcatcaatgaaagcagcaagcaacactgtataatatatatattaagttaattataggattatatatatatatattaaaatatttatataaatatgttaaataaatatatataccttcaaaccttcagctgtggaatctgaaacttgccatccttgatcttgatccgaaaatgtccatgatcccttagaaatatgacggtacatgctcttgaagtcaccagatggattgtctttaacttgagattcttttacaaatttgtgaccttttgctagggtttctccaatttcatcagtgagattagtagcaaccaaagcttgaatgacaaaactagtatcccatgcttgactaccaaaactctgtgaaatcaatatatgactcttgtctatacatattagtatcaaaaacttaaccattcatttgttttagtgcataatttaaaatatttttatactattttaaataaaggaattgtaaatatagaactttttttttttgttaacaaaattttacaaatttgtaacaatgtagttttttattttattttttttttaactaaattttttttatgtttatattatgatcacatattgcaattttgtaaataatatttacagaataaataaaaattagttacaagttgttatgaatttctacaaactattatctgcatatttttaattaacaccttttactgtaaattgttaataatttttctaaaaataaggggaaaatttaactttctttacaatgtatatatattaccctagttagctataactaatttaaaccatggccacttacatccatatagtgaatttagtgaaattatgataatgaaaaatagtagtaagtatataataaagaaaacaattatacctgcattttcattccatcttcagcaatccataagtagtctgggattctagcaaggtgttttctaaaataaactccatttggattttcaacccaacacgaaagcataaataacacctactgattaaaataaaaaatgttaaaaattaaattaaatagaatctatattacttttgatacatattaaattcaacaattgaattacatatacataaaatgtatttttgaaattgacttgtaaggaaaacaaaataatatattcttatattactttttcaatacatccaattgtaatatatcgactattctcatcttcgtaatgaatatgttccattgttacttgtagagctttctgtctaattaatttatttaagggccatcgagtaagaagaggctcggtacacatgtataaactgtcccaaaataactcttgcacccatggatgaggataatataggtcttcctacattgaaacatacatataatactcattataagtatcttattaaactataaaaatatcatttaattaatactacattaatttttaattaaaatctgaagataattgctacttcgactcactttagcacaaaaatggcgtactttcttccaatttatttcatcataaggttgagtgaaaagttcttccctcaattttagaataagaggtgtgattggaccaacaaatttttttccatacaaatatgacatgggcaaatacactgttcgacagtaacaccacattttagctgcatgcatatataaattaagattaattttggagaaaaaaagagcaaattatattgattcatttgtgcatgattttcattttatatattaattatgtgtgtgaacttagtacttaattataagatgcatatgctagatactcttccattgctaatattttggttttaagataaaattttatgcattttattatacactctattttgttttgttttatcgcaatttgaaattttaagaaaaaacttaataagagataaattttttcaatgctaaaaaaacactttgtattaattaacctgggtttattggaaacagattggaagggagaatccaaaattcagggggcatgggattgcatccttcccaactaaaaacaccaagtatctatacaatgaaccaaaaataaataaagtataaagttatttacaatgaacatacatttttcaacaatatatgaaaataaaatatactacaaatcttggtatgctgtagcacattttgaatgttgtatagatgtaaattagttgtttttccttttctttcttttttttaataataattgttctaatttacatatgctatttgactcaaatctttgtgctcatttgaaggtaggttacggatacaagttcatgaatggaagcttgaggatcaccaaaggttctttgataataaataaaagtgagaagatcaatggtttgtatgtttttcaaagaggaactatttcaaccggagaagctagtttggtaaaaggtcaagaatcagatatgcaactgtagcatcacagacttgggggcatacaaagaactgcacaaacaaggtataattgaaaatttaaattctcgtgccttaccattttgtgaagcttttattttagataaacaacataagttgaaattcacaccaacaagacatacaacaaagaagatactcaaacatgtgcatgctgatctttgggggcatacaaagtgcctactcactctcgtaagtaatattttcttttatagttgatgattatagtaggtgtgtttggacctattttctagcaactaataatgaatgcctagaacaatttaaaacttggaaaacttagaaggaaaaccaaatggaacataaagttaagaaccttagaatgaataatgggttggagtttgttaactctaaatttgaaaagttgtatcaagaatatgggatcactaggcatagaaccattgttaagactctggagcaaaatggtgttactgaaagaatgaactgaaccctgttaaataaagttaggtgcctacatttcagttctagattagagactattttgaggggaagctttagctattgcaacctaccttataaatagaagcccaaacaaagttataggcctgaaaatctcttttgaaatgtagtacaacataaccctaaacctaatgcatttgaggatatttgggtgtacatacgctatatacacaccaacctattgacaaaatagaacctagatcagttaagaaaactttcctaggttatgccttaggtaccaagggttatagaatatgcatttccaagaaggatagacaaaaggtagtaattgctaggaatgtagttttcaatgaattggaatttctccacttaacagccgagaaaggtagtgtgtctccatgtgatgcaagattatctaaaaataaggatattacacgcatggaaatggagaacggaacaaaacatccaaaagaaggtttgcaatcagaagctatggtggaaccgaaagatatttcacaaaagaaatatggtgttgaatcggaagataacgcagaccaaacaaatgttttggaaggatttagacaggcaggtttggaaggttatcagttagcccgtgatagagcaaggagagggattaatccttctgcaaggtttgcgaaagcaaacttgatagcatttgcactggcagcggtataatagactaaaattaaagagcccaaaagctacgaagaggtaattttaggtggaaacaagtctaaatggccctagcccatggatgaggagatggattcactctgaaagaataatacctgggtggttgtatcgaaatcagagaagaaaaatattatggaatgcaaataaattttcaaggtaaaagaaagaatcaatgagaatgaaccagtacggttcaaagccaagttagtggccaagggctttactcaggtgaaaggagttgactacaattaaatgctctcacttgtggtaaagtacaagatgataagattgaacattgaaaggccctcaaatagttattaaggtacttaaagggcacttgtgattatggtctgacctatgagaaagcaaaaggagaacttgaattgaaagagtttgtggatgttcattatacttcttaacagagataccagaagataacccacaacttacatgttcatgacaaactgaatctgtatatcttggaaagcccagttacagtctgtggttgctttttccgtcactgaagcaaaatttatggctagcataaaagcgttcaaggaagctttatggctctaagggattttgcaggaactaaaatagataaaaggaggagtgactatgtacttggataaccagtcatccatccatctttgcaagaacccagtttatcatgaaaagcacaaacatatagatataagactctactggattagataaaagatcaaagaaggcctggttgaattagaaaaggtcaagacagaagataatcctgctaatgttggggataaggtcttaacagtcaataatttcaagcatttcttggacttgatcaatctcaaaaattagcatattttgatacctagaacacccaccatgatgattgcatactttcttcatcaccatcacttttaatttaaaggaactaggtggaattttcagtatagttcctctaaatgaaaagatctccaaaagatgttcatcttatagaaagttagatgtcatccggaggggcgctcccatattctaacttgttcatccagaaggagtctccagggaagctagtctatcttcgaaaaggtgttccaaatagctagttgttccatcctagaaggaagttttgggtagtcaactccagctatctttattcctatccaagaaattttttcagtgttataatataccaaagtatttattattagttctagtacgttagtctagatatcttgatgtgtaaataataatttcttagaatacagtattttttaaaaaaaaatgtttaaaatggtatttatttgataaatttggacttggataaattagtatgagctaccgattattagaatatttctaattaaagaataaaataaagaattgattttgtgataaatgaatattttatattcattaaatctagaaaaaattaattacgtaatattctatatgtatatggtcagatttcaatattcattatctgatttgatttcctaaattaattttcaaaatattcttacaattgatgtgacacaaatactgaggaagtatctcacctataaatatagggtcttggtgtctccgagttcttcactgttcaaaacagtaaacttccatctaaagagagttgagagagtgaggaagcccaaattctcatactgaagctatcgtagggatcgaagctcaaacatcaatggctagaggtatttcgatcatttcattgcatatacgttttcgatatgtttacagtttattccgcatcacatatcgtttatatatgctttacaatatcatatagtctaacaattggtatcagagaaatttttatatctctgtcttgatttttcattgagtttcgtttttcatatatgtatacgtgttctttgtttatatattttatatatatatatactttcatagttttaataatcccaattatatatatacattttaattcaatctacgtatatacatatattattcatattcataatattatattattgagtttcgcatttaacgcttgtaaataaaatttatatttttataaaagtacgggcgttaccagtgtacgcttcagttctttgtccaggaagcgtgcctctaattcacaaaagttctaacctgagctgacatggagatattgttacgaggagtttataagtttgttaagttgtaacagacttaacaactttgttactacaactaccgacttagggatccatgtccctaatctataaataccaccatactcatcatttgcaagcatagagttttttggagaagtgactttgaggttaaagattgagaacgcagagtgagattgagaggtacagagaaaagagagagagagattgagttttgggatttgtatgaagaatcttttgtagatattgaagaagatcctagaagattattgggtaagagtgtgagagataaacacttttagagaatccaaacaaaggcatctcgattgtattgtacatgtgttcttgctcaatcacttcaatctataagacttgaactaatagatatcttggtgttgattttattatttttgtactttatttatttatcactgattcttagtttataattttgttaatcttgttattgctaatcgtttgatgattcaattatagttaaatttattctgcatattagttctaattttcccacaaagtacaaatgaaatttgtatgtttaagccaccttaggttagcttaggtacagaattttaaaacaaattcagagaatggattcaaatttagtgagaagaacctagtattattagactatgtcaatgactattgtaacaaaacaaaaaagaggtacaagaataaaatctaacaaattcctaaaacaaaagagatatttaatatttctataatttcataacctaattataa

SEQ ID NO: 24615 - DNA, 3339 bp, Cannabis sativa
tttacatatgacataaatagtacccttggagtttaataaaatcttcagaaatgataaattataactctaatgtccatttttaaaaatgggatttgtaacaaataaaatcgtgcataatcataaaatatcaataattgatgttaatcgcctttagtaatacatattctaatcatacagtcattacagaagatctaaggaatggcatggcccttctctactaatctgtggcagtatagtttctgtaataatacttgaagatcccattaaacacttgaagtgagagagaaagtgagtaataactcttggataatcatccacaatatggccattctcttcaataaaagttataatcctatttgactcccttttttcttaatacaagcatggaaataggttgaatttcatctctaaacttcagccaatctaccttgcttttttgttttaagaaactttcaagtagtgtactgttgttgcttagcttctctcaggcagcagctaattccccttgaagatttaaactgtgaaggttcttttagacttccaattgagccttattgtaaatatcctttgccatctcataatcaactttaacatctccaatcttttctctgttaaagatcctaagatcttttcgaaatcttttcaacttgaaacaaacaacagctagatctctccccttgacttcctttctccagttgttgagcaaaatttcactaaactcaagatgcacagttcaaatattaaaaaacttgaaagaattgtaccgtaaattacccaatttcaagtttttgattagtgcataacagtgatccgagatgtcttcccactggaagtgagcttctatgtttggatgaagatcaactcattcttcatttttaagaacctaatcaatccttaagtagtttcttactccattctcatggttatttatccatgtgtagtgagatccgcatctcttcatctcatctgctaggcccaaagccatccacttattggcttccaaaatttcccaaaatgatatcggtttccctccaattctatcaccatgatgaaacacagtgttaaagtcctcacaaattagccaaggtttcactggcatgtgtaaaccagctaacctttgccaaagccattacctttcagttatgaaattgctcccataaacaacagtgaaacaataatcttcatttaattattgtcattctaactctacagtgtacaaactgcttattctcttctaccacatcaacatatacaacttacttagccaaatgattagtattctgcgtggacttgtataatactcccatcctacaaaagaggagttcattatttcttctactttgctacctctcactttagtttccaaaattgttctccaattcccactttatttttatacagaatttctttaactttctcatgcttctttcttttattgaatcccccaatgttccaactcagtatattgtatttattcattttgtaatacactgaatttattcccttatttagccacccatttctaaattcttccactctttctcttttggatctcccactacccttctttgtctttcacatttctcatatgttcttttcttcctttctcccttattgcagaatacgtctctagctgcgtattagaatctgtcacaataatttttagcttctaaacatcctcagaattagatgtagcagtagtaacaacttggtgtgagaaagaatcaacactagcaggatcagtaattgtaacagcctcagagtcagctactgttgctttttctttttcctgagtgtcatctttaacttcacttgaagtagcagcatcaagagctattggtgcttcttcctgagtgccagccatatttgcaaatgaagccgcaacaatagtaccattgctggtttttagtttcccttttggaccaactctacaaacacccatcctatgtccatagcctccacagttggagcactttgttgggagccattcatattaaatgggcacagtgtcaagcattcccctttcattttcaaagtctatggttgatggcatattatcttgtatgtctatatctacaaggactctagcaaattttacttgagtcctttccgttgttatgctatccaccattattggagttctaattgtgcttactaaagcactaagacaattgttcccccaatattgaagacctagaccatagagctttactcacactggcacatactttactagtttaattgaatccaaatcaggcgtctaaggtttcatgataacaagcttattgtcaaaatgaaccaccccaacctctagtacataatcacaagttgcctcatcactgaatttgattagagtaaccccattgttcattctaacaatttgttccacaactagatcatcctaaacccttcttgcaaagccctcaaaaaccttaattgggggattagcacccaaaacaaaacatagtaatgacgtactccaatatttagactcaatctaaatttcatcaagattaagtttagcaattacctttcctccttttgtcaatggttgtgtatagtgaagtctggctcctacatacttcatgtttggctttaacttctcccagtgctgtgaggcatgttctcgtagattcacatcttccttccttccttcctgaaattaggtctgagaagttagacgaatctggaagatctttctcaaactccctgctctcaatctcctcatgttgtaaaggaagactatcatccattcatcgtcaaatacacatgttgaatttttattgccttctattcctagcaagtcaaatatctgatcagaacgttgtaatagaactagcttatggttggatttcttcttcgtcattgggagaggaaattgtcacctcacgccattgtagtaatttttaataaaatacataaatgaatattcagtgctttatttctaacccatgaatgatttcaaaatgtaattgttcaatgttttagtgtcttttttataataccctaaaaattattatgtgctaaaattaacgccttcaatttatttattccaaacattacctatatgctcatctctataatatctcgggattagtaaaatggattagcaatcaaaattaaaataaattagctataattgagtaattatagtattagataattagttatatgaaattattgcatttaagacctcatttattagtcaggggtattttgaaattttgacccctgaagggtaaaatcataattttgatatttattgtgctaatagactatattattatataatatgtttttattgtcttactgtaggtgattcttgataaattggcacgg

SEQ ID NO: 24616 - DNA, 1528 bp, Cannabis sativa
attaagagcatacccatatttatatatatgattccttatcagaaatgttgtgttttcagcagtagtagtgtggtgggtcatgttgaagtggtacgtataggaataactatttcaattagttagtaaactcttggttaagcaaagacattgcttctatgagtgaaggaggattagtccctaaataatcattttcataatactttttgctttgagtcaaagcattctccccaaaattattactgatgttttttttagtgaatataagggaggacataagtgagagtccctttaattgatgtaacaaatgttagcagaccatacaatccacacacacacttgcaattcagcaaaaggtcacatttaagtaagtcatcgtcttacctgcaaggatacttgatgagcgttggatcgtccagtactcataatttgtacgacaacaataaaccacctacaatttctttctttttttctttttctaaaggaaaatttcaatttcatttcgatggcaaaaattagccaatcagtattattattataatattacatatattttacaacttgaaatgagaattgataaatttcagtcaagtgaagtcgtttgaaatcatcaatactaatatatatttcaattatgattagtctccattttttgttaaagagtaaatggaaatttttattaattggtaaattggataataatctaatattacataataatatatcacttaaaaggaaggatcaacatgatagaccgtttacaaaaataagaatgaaaactataatagcacattcaactaaaataacaataagctgtgagtgttgaagcatgaaagaagctctaagaatataagatatccaattcaaatgaacatgtgataaattacacctatacttaactatcatctaaatatcttccaataaaaaattgagtaatgacgaccctattattcaatctaggataaaagaaaataattaaatgaccaaccatattgataacaattgtaacaaataaatgcaccataaatcatttgggccattaaatattggagaatttcctaaatctgaacatagataagcatggtcatggtactaaaagagacagactacgaactaattgagatacaccaaatgttctaagaaaataaataagactaaaattacctgccataaatggataaagtcctattaccataacaatagcaaggtcgtgtagcaacactattattaaaaataaaattaaacatagaaacaaaacatagcaaataaaaataacacactaagatgattaatactagtgaagattcaatccagatcaattaaggaactcaaatcattgagacacaccttttatgaaggaagaaagagagaaaaagataactcagatagaaagatagaaacaatcccaatgaaatcaaaaatattgtgaaaatcaataagaactgactaaaggaatgccaaaaagtcggtgtaacgccctaatattttgccttattttacaaagtgataattttgatgcattaattaaaaa

SEQ ID NO: 24617 - DNA, 2647 bp, Cannabis sativa
ctatcaacttgtaagagatagaaaaagaagagccataaaaccaccaaacaggtttagttttgcagatgttatatactatgccctgaatgtttctgaaggagatgagcctgcatcctacaaggaagctataaagtcagcaaacaagcatcaatgagggcaagctatggatagtgagatggactccctcagaagaaacaagacctggatagttgttaaattacctgcaggaagaagagttgtgagctgcaaatgggtttataggcacaaggatgagattccagggattgaaccagctagatttaaagccagactagtggcaaagggcttcacacaaagggaaggtattgattaccatgaaatattttcccttgctgtgaagcacacctctatcagactgcttctcagcttagtggcctataatgatttagaacttgaacaactagatgtcaaaacaacctttctacatggagatttggaagaggagatctatatgagacaaccagaagggtatgaggagaaaggaaaggaagatcatgtttgtctattgaagagatctctctatggcctaaagcaatcacctagacaatggtataggaggtttgatgattttaaaaccaaaatagggttcaaaaggagtgcctatgacaattgtgtctatgtgagaaaggccaaaggattggtgtatctgctgctatatgttgatgatatgctaatagctagcaaggataagggggaaataaacaagatcaagaagttattgagtaaagaatttgacatgaaagatttgggggttgctaagaaaattttgggaattgagatcaacaggaatagagaactaagatcccttaagctatctcagcatagctacattgcaaagatcctgaaggaatttaatttccttgattgcaaaccagtaagcacaccccttggcctgcaattcagactcaatagctctcgatcttcctgtacagatgaagataacaggtacatggagactataccatattctaatgtggtaggcatcataatgtaccttatggtgtgatctagaccaaatctcagtcatgcagtgagtactgtcagctggtttatgggaaatttaggcattgaacattggagtgctgtgaagtggttactagtatttaaggggtacaatggacataggcctaatctatggtccaaacacaactaacactgagataaaagggtttgtggactcggattatgtaggagatttagactcaagaaagtcacaaactggttttgtgttcagaatgtacaacaacacaatcagttggaaggctaatctacaaactgttgtagctctttcaacaactgaagcaaaatatattgtttgtactgaggctgttaaagaagcactctggctcaagggaatcaccaaggaacttagtatcgaccaaaagactgttgtcatccactgtgacagctagagtgcactccatctaagcaagaatcaggtcttccatgagaggaccaaacacatagatgtgagatatcacttcattcgagacacaatagctgaaggaaaagtcaagttccagaaaatttcaacacacgaaaacccctctgacatgctcaccaaaccacttcccacagcaaaatttagtcattgtttagacttactacaaatcacaacttagcatattatttttggtttgatcttttgttgtaagtatgtaatttttttgagtgtttttcattcttgtacattaggttcctaggtggagatttgtaatattgttagtttcctaatatacacgtgttagttatagtcaggtattgttcggtaagttagttatgttaactaactcctagctagttctaggatatatatataagtgcctaattaatactgcattgtaattgtaacaatgcacactcataatatacaatacaatattcttttactgttataaaacttggtgttcaatggccaatcggcctatgtccatgtaaattgatcttgagtggttgagagagatcaatgctagactttgcataacattctttacaaagagaaacatgccaatatccacttagaagtgggtccatctatctttggacatagggatgcacattcaggggtgaatatgagttgtcgttaaattcttagatgattactctaaaatataccttatgcaaagaaatttgaaatatttgagaaatttcatgaatttctagcaatggtaaaaactattaaggtaagtggttaaagatcttgcaaacttataagggtggaaaaatatttggttatacagtttaaagatcattaagttgaactttaaattgtatccaaacttaccttcccagaaattcggtttgcattttgatgaaaatgaaaggtctatgattagttactagcacctgcctgagtccttctaggaaaatgcctcagagattaaaaatgacattttatgttgttccatctaagtctgatcccaagaaaatctcagaatgatggaatggtcgtaaactcagtatacaccattactagattcagggatgtcctaatcattaactaaacaaaatcaagaattgttaactaaagtttgcatgtttgatagctattctaaaaagattaggggtggaccatcctatggtcattaagataagaaagtatttgttt

SEQ ID NO: 24618 - DNA, 6036 bp, Cannabis sativa
acattattgttacatgtaaatgaaccatgagactgatgtgtactagtggaaacaattggaatggttggaataatggatgatggataaaaggatgctataacctcaggtgtaatagtggtatgctgttgagatgcatatggaaaaagtgtttcatcgaaaaggacatccctggaaatatagacacggccagattgatcaagacgcttaaaacccttgtggttaatgctataaccaataaaggtacaaggagtggacctatattgcattttgtaacgattatagggtcttatattaggataacaagaacaaccaaaggttctaagagtgttgtaatctggtattatatggaataaggtttcaattggagatttgttgtgtaaaataggtgtagggagtctattatgaatatagacagctgtcctaaaagcttcatcccaaaactttaagggcatagatgcttgagcaagtaaagtgagcccattctcaacaatatgcctatgtttgcgttcaactaaaccattttgttcatgagtggtaggacatgggtgtctatgaatgataccagcttctttaagtgtgtttgtgaatgatctatactcaccccccccaatcagtttgcaaaactttaattttgaagccaagttgtaattcagcttcggctttaaagtggtgaaatgtttttaaggcttcatctttggttttaagcatatatatccatgtaaatcgagaaaaagcatccacaaaatgaatataatacttgtaaccattaatggaaggggtgtgagatggaccccaaagatccgagacaaccatttggagaggggcagtgtaaacaatactagatttcttaggaaaaggaaacttgtgtattttgcctaagcaacaagcttgacatatagaatgaattgttttatttgcacaagaaatattacaagaattaagaacagtcttgaccactttttcagatgggtggccaagacgattgtgccaaatgtcaaattgagaaatacaagatttatttcctaaagaattggtactgttacattgactagaaggagaaacagtggctgtaagtgtttggggagactgaagatgtgtgtcttgacatgtgctagagtggacaggtgtggctgtgggagacaattgcagctgggagggactaaatgaatacaggccattctggtatctcctagtcatcaagatttggtgatgcacctagtccttaacaaaacagaaatcgggatgaaactcaaagaatacattattgtctctagcaaatttggacacactaatcaaatttttggttatctcaggaacatgaagcatattatgtaaaagaagaggataagcattaggaggggcagataagaagctagaatgaccaatattttggatagacaaacctatgccatcgcctacaaacaattgctcagatccttcataggtggagcttgaagccagattgtgaatgtctggggtgcagtgatttgtagcgcccgaatcaggatacctgtaaaaaaagtccacagccgtgtgcccaattttgtgacataattgacattggggtttgtttgaagaagcattggttcgaccacctctgttgaagccaccacgagtaggttgagagaattgaggcattgaatagtgaggaaccccatatccaggacccctgggataatagaactgagcaccacgaggagggggaattcctcttgctgcagaaaactgaggagaataagtaccaaactgtaaaggaggccttgtggattggatggatctgttgaatcgattctgataggcaagattaacttcaggttgtagctcagtatcagtggtggcaagattgactgtaagatcagtttcttgatcgatcttttcgattcgcgattcagaggcgagtaatagagcctcaatctctcctacagagtatccttcgatgcgggtattggttgatataacaaaggtgtcgtagctgctgaggagacctttgaatatggctgcaatgtgatcacgatcactaagaacctcaccaacagaagcgagaagatcaacatgttgttcaaccttgagcaaataatcgttgagagatagagtgcctttcttcaagttctgcaacttagtcttgaattcaagaatctttgacgatactttcaaggtgaagtgtttttccagatttgcccagatctgtcgagccgtatgacatcctaccattcgagtaagaagactctcagtcatagaagatagaagccatgaaacaagcagctggtcttgcacatcccagtcaagaaattcaggattatatgtttgagaggcacggtcagcatcagtgagaaattgaggtggagtggctccttcttggatgaatttcagcaatctatttcctcgaattgcagcaagaacctgctgtttccaaagaagaaaattatggtcatttaattttacagagagattatgagtgaagtgtaccggagtgaactcttcagactcgcgatttcgatttctctgtgaactgggatgcgaatttccaagatttggaggattggcctggttttgagctgcaacagtcgccatgttcgccattaatggcggaaaaggctctgataccatgtcatgattatgattccttcggttcattgtaacaaagatcaaaaggaaagaacaatgtaaaatatgaacaaagaagaacaaagatgagcaaagagaggaaaagacagagcaagtagaagaatcattctgttgtattattcactgagtacaaagagtgtgatatatatatatcactgatgaaaaggaccaagactcagtaactaacataacagagaaagataacagactacaactgacttataacagaaagtaactaacttgaaccatgtgtccctaataccccattacccatgcacaaaatggattagtagaaacaaagcataggcatgttttagaaaatggcctcactttacttgctcaagcatctatgccactaaaatactgggatgaagcctttagaacctctgtttatttgtgtaatagactccccacctctgtcctacagaatgtctctcctatagaaaaactcttctctatttcacttgactacaccatactcaaaacatttggttgcaaatgttttcctaatataagaccttataacaaacacaagttgcaatttaggtcttcaccatgtacattcttaagatatagcttaaaccataaaggctataagtgtctagatgcctcaggtcgtgtgtacatatcaagggatgtcatctttgatgaaacatcctttcccttctccacactaccaaaacaagctactaactcttattcatattctgatttttatacttctgttgtgattcctacagcaactaaggcctcacctgctgttaacaataccagacatgcaaccattaattccattgtcccaaatttggcatgttgtttggtgcctatgcagggttctagtacaagtcacacaacaccagaaaccactattgaatcaccagtgcaacccattgcatcttcaacaattgttcccacagttacaacaaatgttgttgatgaagttctaatgcctatacaagagatatctggttcaagctccagagatgaccatacagagattctaataactgaaaatacactcccaacatccactaatgaacaccctgctacacttgatgtgtaaaatattgctccacctgtgcaaattgttcctgctaactctcagcctgctgctgctactcagaacaccttggtcaattctcactctatgcaaacttgaggaaagtcaggcattcacaaaccaaaagtttacatggtcattaaaattcccaagacagtaagggaagcagtacaacatgagcaatggaatcaagcaatgtctaatgagatgctagctttaatacgaaatgcaacatacacattggttcctttaccctcaggaagagagcctattggctgcaagtgggtgtttagacacaaagaaaactcagatggcaatcacaacaagttcaaagcacatcttgttgctaaaggctttcatcaacaactggggtttgacttcacagagacatttagtcctatgtcaaaccaatcaccattttcattgtcatcactttagccttgtctcatgattggtgcatcaagcaactcgatgtgaacaatgcgtttctaaatggtgatctcaaagaagaagtatacatgggacaacctcctggccttgaagtaccctcatcacctcctcttgtctgcaagcttcgcaaagcattatatgggctcaaactggctcctcgagcatagtttgataaattgtatcactgtctcattcaattaggattctttccatccaaatctgaccattctctattcattcagcacacttctacatacacattgattcttatctatgtggatgacatattagtcactgggagtgatcccaaagttgtctccaattcaataacatggttcaaaacaatttaacttacatatcaaatgtaatgaccgcattttataatatggattagtaaaggaaaatagcgttaattattgataattctattaatttaattaattgtgggtcccatttttagaaatgggcattagagttataatttctcatttctaaagattttattaaactctacatgcattatttgtattatatatgaattatgctatttttatgattttgctcgacgacaacagaaaatgcgatggatgtctattttaatcacatgggtaagtctagaacctttttcttagtgggatatatattggagaaaatagaataccgagtttaagcagggttatggtttttgactattatacccctaggcttaaattagtttaagttcatgcgcattttggtaatttggcaagtgggggaaataggtggctgcttagggagttgacacctagcctatgttattttagcaaagggttagttaattaacctttattcaattaagaaaaaaacaaagaaaaacaaaatagaaaaaaggatcatcttttctctaactcactcttggctcggctcccacacaaccagaaaaacccaaccttgatttctttagtttttcttgaattcagcaaggattcaaggtgttgaaagtgaaggtaaccctagaaacctttatctcatgaatttataagttttaagttgagttttaatctatgaattgatgaattgttgctgtggaagttaggtttgttgtgtgtttggtttatgatgtttagtaatagtgttttaagtctgaatttactggttttgaagcttatttcttaggttgaggaagtttgagttctaagaactcaaacttggctcaataatggcatgttttgattttgtatgtttttctaaatttggttgattggattatgttttgggaggtcattataggtattctagaaggtttggtgggatttggacatgttttgagcatgtttggaattgtttggggaacctggtgcaaacaggttaaccaatttgccaggacatgtaaaatcggttaaccggttttggcaaattcctcgaacaatttattttcctcgattcatgtccattttagtgcttcggtgattccctatttcttagggtattgtagtttgaattagtaataacagaaccttaaattggaggtttaggtttcccagattagggttttggcgagttatttacccagttatgttgtgtgattagggcatccatccagcatgagactttctattcaggtcagtctactaacttgaattcagaaacgaggtaagaatagtgtataacatatgatatatattcgagtgtatgtatgtgtgaaatatatgtgcatgcttgttgtgattcgtacactaccaacacttgtacggcagtggtacagagtgctttggtaaagtgtacgatgtctgaagagtacattaccgtgttaccagcactagtatgagtaggtacatggtgtatgtagtacaacacttaacagtactcgtggtacggttcataccctacctacactagtacgatggtggtactaagtgcat

SEQ ID NO: 24619 - DNA, 8098 bp, Cannabis sativa
  modified_base (7410)..(7415): a, c, t, g, unknown or other
ttgaagaaacaataaaggaaagaaagaattgtttctgtacattgctcaagagaagaattacaagtgtttatatacagaatgagaaaggcaaataagaagctgttacaacagctaaaacagttacaaccaataacagacaaccaacaaatactgttgtaactaataacagaaaactaatcaattgaacttctcttgacagtgtccaacttatataatcaagtaataaacaattaaaatctcacactcttcaatccatctcgactagttttttatcattaggataaatttagaaatattttttttttatcccttaatcaaaaatactcttgtattttattaagatgtacttacttttgtgagtggattacctaatataccatcattctttatttaagtctagttacattatgatggagacattatttataaaaataggtatatcttaaaaaaaatataaaaaaataaaaataaaaattaaaataaataaaataaaatgagtatacaatataacttttgcagactctagtaagcccataaaagctccatagggtctttagcatgacacttttatcctcttaaaactaaattttcttttttgaattgaaacatggtcaggcctatatctaaagaccttaaactgacataaagtcttttagcacattcctaaaatctaatcaatttggaaaatatttttagatagtatatctcttttaagctgtgtttaatttttaccctctctttttatattttttatttctacccttttttcaacaactctaccaattatgcccctatcatctaacgatattctgactctccattcaactctaacttgtgtagctgtgaggttataatcggtaatagttataaaagtggggacatttcaatcgaatttaaaaaaaagctatttttagttaactaatgaaaaaacaggtatatttcaacttatcccttgatattttccttgtactaaatgggccggttctaatccagttgtttcagctatgggccaactcggcccgaatttgatcatgtcaggccaacccagaaagttacggtttcaaaattctgacaattgttaatagggacagggacccacttacctaaaaactcgaacaaagtgatctcaaatgtcagaactcacaacaatacacacagttccacttctgtaatacaacgaaactgaaacacaagacattaaaaaccattcaatcatatattatatgcataatatatgattgccaatctaatcttccttaacagattttgtacacccaactcaatcatctcttaaccaggttctttctttctttctttctcttccatacattacttattgttttgcttatttatttctcttttattatataagaagatattcttacctttgtttaacagaaaaagcataggttgcaagataagtctttcaactccaactatttcaaaagtcttttttcctttggtttactttttattatcatggtaaatccaatcacttcaaattatttgttccaatgattaattcagaaaaggggttgggttgaattagttttaaatcattaaattagctttaaaaatcttctttgattgttagttaagtggtttgtataaactgaatttcaatgaagaatttcttgtaaagggtttttctcattcttttatctttcttacatatagaaagaaaagatgatatttaataaggaaagagttgggttagcttcattatgcacagagggctctagcattagttgcagcagaattgaaattagaacagtcaatgagtctcagcatatcaaagttgatgctgttactcattcctatccttcaaccacaatctcttgtattgaaaaagtacctcaagatgatcaaatttcgagtatcgaaatcgccaacccaaaagatggaacttctaactcttctactagtacagaagcatcctcctcatctgtgatcctgagagatgtacatatagtaagaattgatgatattatattgtattgtaacagagaaaattggtggtattgaaaataggaacacttcattatataattgtcatatcattttgccagtcagctcaattaatggaggattttcttgagcttgcaaaggagaatacaaagaaggatttagagacttgtggcattcttggtgcctctcttgtaagatttagtgtttgttataaaatatacattcaattcaataaccttgttattggtgtttttgatgtttatgaaatttatccaatgattatttattttgttgtagcttaagatatttttgtttcaactgtgtagaaaaagaatcgattctacgtaaccactctgatcataccaaaacaggaatgcacttcaagctctgtaagcatctgagtgttttttctctctgaactttgattgttttgagtgttgaaatctcatttcggttttcggttttgctgctgattttcaacattatgtggcagtgtcaagcttcaaatgaggaggaagttttcaccatacaaaatgagcattcattgtttcctgtgggatggattcatgtatggactttggacctcttttttacaattagaattgtgttaataattgaagctcttagctctaactttggttatattttttttttttccagactcatcccactcaaagttgtttcatgtcatcagtagacttacatactcactactcatatcaggtacttttgtgtgtgtgttgcttgcttcttagatttctcctcacagtatattacaatggtttgattcactgtccttacaaccaaggcttgaaacactatataccttttaatttatgttccaaaattatgaatctgaatgctgtttgctaattaaccaggaatctgatgtttctcttctccttattttttaaaatttttcaggtaatggtacccgaggctttcgctattgtcatggctcctactgattcctcaaggttccttttactcttcacttcacttctgtaggaaatttagctctgatacatagaaattaacttctgtaattccagcttcaagatcacacttaaacaaataaaagttaaatcaaaacaaacagatcaaaaacaaaaaccaacaaacacattaaactagaaaaatataacatagatgaatttagatagcttccagacacaacaacacacgagatttatactagttccgatcttaagttcaatgttaacttagtcatactccagtttgaaagcattgccaccaatctttattgatagtgagaattagagatatcaatctcaggagctacaaggaaataatcacagtaagtcattcatagtataatccctcaacattcattaactaattaacccgaaccaacataatcaacaatgttgctaaatacaatttcccaatcccaaccctctctctcagatatctctctcaatttctcactctaacttctctctctcagatatctctctcaatttctcactctaacttctctctctactgtgttgtgtctctcttgttcttgcccttatttttatgctgtgaaatgaaaggagtagttctctttatataagccaaaaaatccaataaactttttgtcatatttgagttaagttttaacatatttgagttaagttagttaaagactaactaactaaccgaatgttggttggggatttaaggaataataccacaacttccaattcatgaaactatagaaaacagttcacttccttatcaatggcttccaaatgccaactcttttggcataccctattcacattcttgtcaaaaatgtttactcccaactaaattaggaaaaaaaaaagaccatgcccagtgtgcttgagatatgcagaaataagttgttgtattcatatttcatagttttcttaagtataagatatctttacatgacattggtaaacttgttaatgaggaatttacaggagctatggaatatttcgactaactgagcctggtgggatgactgtactgaaagaatgccaagaggagggatttcatcctcataaggaaacatcagatgggagttccatatacgagcactgcaacaatgtgtacaagaattcgaatttgaggttcgaaattttcgacttgcgttgattttgtgcatagtggttgaataaacaaagtgtgactcaaaacagcagggctcctagtttaccttcttaagtaacttataaagcctttttgtaataatgtttgcagtgcatagaatatatgcaactgtgactatattttttgtcctctgtggttggtttaatcttctcaaaggaactaaactctgtaataatgttaattaagtttattatgtaaatttagtctttcgaaacaacatattcatgagcttcacctacctcttgtcatttttacttttggattagagtctaatttgctcaacttctagtttggtcaatatttggttgttgaggtttgacataggctttaatgtgtcttgttctgcatatgtaatatgacactattgttgtggattttatttgactttcaagatttgtttttcgagagagatttgactatcaagctttagaccttacattcccatgaaagaaaaataatcgtataaaattaggataaataaaaatctgtagtttacttagatatgtatgaatttctagaagtaaatggtggagactttttgaactattctttaaaacaaaaagagaaaaataaatgtgctactgacatataaaattaagagtactgaaagctatggtggtggtgctaagtatattatgaggatctccaatggttgtattctttgaagttgctttatatctccacattattcaaaataaatattttattttatttttcttctatatcatttttggcacctttacttctaaaaaccctccaatagtataatactttttaaaaatgttataattacgatatcacatattattatatatatataatttttttttctttattaaactattatattgatatatatatctattgcacttttaattttttttgtataaaaaaaaaacatagcatcaatgccattgtgtggcgttaatgcaaatttcaagaatagcattttttttttatcaccaatggtatagtattcctatattttgtcacataagatttccacttcatcaagcattctccaaaatattaccattggagatgctctaaagtgtcatatcgcatcactatttagtagaataatgattcgtttggtacgtcgtattacactatattgtattatattaaattgtattttatgtaatattattatgtaaaactatatgtggtattaatttttatggatacttaaatatataatattttagtataaattaaaatttaagataatattatataaaaaatatgatgtataactaatttaatataataaaatacaatacgagctaatatgattttccaaactaccctaaaatatcaatttaatttaataattattattacaaaataggtaacgacactagaaagtagtggtaccaatgcattcagaaattacttagttagatttgaggtttatttttcctaagtatatgaattaagtttttctaatgaatctttagtggttacacttgcaactttagctagcaataatttaatgtagagcaaataagaggggacagagaagagaaggttcctttaagttatttatattatcatttcataataaaacttccgacaaaagatcataatacaattatgctcacacagttaatcacggagcacagatctttaataaattactctgaatttacaattcaccttcaaattgtttacacatgccaaaaatctttagtaatttaactgtaatttacttattataatgatgattatgtcaaaaaaacgtatctcataattaacaaacatgaaatgaaacattgatgtttgaaaaagcaaagataaaaagatctatttgcattttgtgtgtacaaaacaaaagtattgttagacaaagaaaggctacttatgattttgcccatatgtctaaataacacattttttttaatctctaaagacaacaacattagtattctccaatcatttacataaaattaattaataaatataataatattctaaaattttgaaccacccccaaaaaaaatttaattaaaattaattagaaaggatgaacatttctgcttaaaccgttcacattggtgaaaaagccaacgacacctggcctgtaaggcaaatacgacttgtgtttattatcttccttagctttattccttacgtaatatctttcgtgagccgacgacgccgtttcacctctctttgccttagctttgacttttcctttgaccatcgtcgcagcctcaactcctcctggcgccgctttcttctcagcttttgccgttttcttaatcgattccacgctttgctttggcgcgttgttagtggaattagggtttaggaacacgaaagcgtctttgccatcgctactgctccgtacaaccaaatctctgaatctccatagcttcgagaagcctgtggagttactcttcttgttcatctcaggtgaagcttccaccgcctttttggaccattcgcagtaagtaccgggaggaagcgcctccaattcgtcggcatcggaggaagaagacgatgaagaagaagaacgagatctttcttcaatgaagagtttctttaacggaagacgaagagacgaatcatcggtaccgctagcgccatcttcaccgtccgcaaacagtagagattgatcaaaaatagggaaaatcggtcggatctgaccgtcctgaaacaaatcgtcagcagaaatcggcgatccatctggattcgtacacgcaaaagaaaattcttcctcctcttcctcttcctcttcctcttctacctctaattcttctccatgatcatttacagctttctcttcatcaacaacaacaacaccttcgctccgcaactcctcctcctcctcaaatttcagctttgccctaaaatcatgtgtcattttcgatgaaatttcatcataatccattgaaaaacccatccaattttcactctgtgaaactaaactcgcttgcattttcttcaaattcaatccaaactcctcaaagctaaataacaaacaccgaatcgaatcaaccttgtaaatttggacggtgttttgatttgaaatggattgagagagttaaatatgtatatatataagtggttgggagagaaagaagagtattgaaatttaaagtctgaacaacacaaatatatataataataataaataaataaataagaagagaaggtcactggaaaggcgcgttgtcataaaaggagtttccttttaatttttggcctcttcagctttttcaagcccttaattttgacgtgagttatattcttggtaatttcttcttcactttttaacaaaaaaaaaaaaannnnnnaataataataatatatattatccttggctcacacgttacacgtgtaagaatccacacgtggtaaatattctcgttgacacgtgttaggttgtttgtttgttggttggttcatttcattaatcatcatctttcattaatcatcatctagaattttttttttttttttttggtttataataaagtgaaaagttttgacttttgtttataatgtcgtaatttttggatgaagttcagttgaggaaattaattaacttgttggtgaagtttgttggataaaatatttattttattttaaataaattaaagaacttgttagacaagaattagatatgaaggatttcatttacatcatgggtgatgaaatgggatgaatggagtttgttggtcaactataataagtataaatttgtttgatttagtcattagttcttgtagttaagcactggttattatagtatattttatacttaagattgttctatatagttcaaattttcaactatttaattaaacatattatataactgaaaattgtagtgatcttatttacttgagaggattatatttattaattatttaataataataatattatgatgatcatgatcatgaaggtttatagtcttttttttttttcctttcaattatgatatttttattgggaaatttgaatatctatactt

SEQ ID NO: 24620 - DNA, 2033 bp, Cannabis sativa
tatgatagacctacgtgttacactcacatgtctcttttacatttaaggccttactgggatttgtctcgattatagttaccgaatctaatccggttatgccctacttgcataactctactcatatacacataatccatacattatgctcttataatagtttatcctgatgatagtttattaggtctaacccagttatgtcttatacacataactcttgacatatatatgcatgtaatacattcaacatatactctactatatgaagttttagggtattaaccctaacttacataattttaatcattcactcacataatacattattgcatgctcaagagaatatatttttagggtaataatcctaattcaccatatttatatatatttagggtggtaaccctaatttacaataaatatatttagagtaataaccctaactcacaatatatttaattagggtagtaaccctaattctcatcatataaacttagggtaataaccctaattcacacttttatctaattaataatataatacaaatcgtgccaccacactataatctatgtgcttaatttattgtctaatctgatttctaatgtatgaggagaaatcctaatccgcgggtgatcttgaccaagtgctggtattcctagtcacaattctcgtatttttacataatagggttaatcccaaattacattttataaatatttacatttacgactcctattagaccaaaaaatagagcccaaaataagcttttcaaagatataaagaacatcaaatccgagttcagagtcaaaagttatgaccaaaacacattcggaaaaatcaggaatgctccctctaaggtttggtcgcggtgaccataagtctagttgcggcaactgggttcgaaaaacccaaaaatccaattttaaagctccaacaatacacaaactcaacccaaacttcacttaagtcatataactgattcacacatccaataccaaagcataataggtgaatttcccatcaaaatatacatgcctaaacacacataatcaatcaagctcaaatctctcataaatcacataatcaaagctttaaaaatctaattcaaattcaaacattcaaagctttaaaaacccaaatcattcatttcagaattcatgctcataacaaagtgacaaaatgacttgaatttcaaatgaaacaagaattaaacaacaccaaaggaacccaaactattaccaagattgaccacaaataactaatccaagattatactaatctttccaaatcaaaggcatgcaatttcagcttagaactcaaatattttcatatattaacaactcttttctttttcttttcaaagtttaaaaccaagattaatagattaaattttacttcaagtgtcttccttaagttccaacacaaaatccaacaccaaagctttaatttcacctcatgatacaacaaaaattcaagaatattttgagagagagagaggggtcgttttgagagagtaaaacccaaaaaattattttctttattttacacttagccaacaaatggcttaattcacttgtataattggttaaaagatcattttgcccctagggctaatatttctcatataacttaattaagggcaattcaatcattccactttcatatatacattcacataattatataatttgaattattgcccaaataacaaagtttataaattttggatcgtaaactcgatttgagccaaaatacccgattgtgactataccgagctaacttgacaaaaatcacctaaaataagacaaaataaacatactatataataatataatctattagcataatataaattaaaattatgattttatccttcctgggtcaaaattatgaaaatgctcctaactcataaatagactcttaaatgtaaattaatctcaaataattttcacataattaattatataattggaacggagccacgaagaagaagtttcgagagttacaaaggaaatttcgagctcatatgggtcatgtgt

SEQ ID NO: 24621 - DNA, 2100 bp, Cannabis sativa
tttttttttttcttttctttcttgattttattgttgttttgtttgattgcttttgggtgcttcattttccgtaggatgtttgttccttttttgtggtttttggttcttttgtagtgtgttttggttgctctttggagacaacagttataaaaaaaaaaaaaaaaattcaaaacattattttaagaaaatatattgatgcacttcttatttatttcggcattcagaaaaaaaattaatattttttttcataataattaatattttttttcataatcatgtatactataattatttataatatattgtaaaattttaagaaattatgaataatttacaatatagaaagcagttttcaaacaatctatttcacactgatataaaataggagtttttacactacatactgaaatttttaacttttttacttttctattatggggtggaattttttttttcttttcaaaatcaaaaatattaaaatattataatattatatatttttttttcaaaaatattatatttttttttcaaataaaattaaaaaagtctattttcagcgtataaattttttataaatttcttaatttttacagaatgttttaaaaaactacactatacacgacaataaaaaaaaattaaattaaacaaacatctaacatgtagagagtgttagtggttgtgtaccatcattctcgtcctttttttgtgcaattttaaatttaggatttaagtcttagtacatgtatgaattattttacttgaagtgccattttcccttagaatgttctcattatgcgaccattgacactagagaagtgttagtattcgtgtatcacatttctcttaaaagatattatcttgtccttcgtattcctttatttccaacaaaaacattttaactctcttattagaattcttctcgaattagaattttgaagtaaattacctttcttggataagaaagtagtcgtatgtctcatgttctttgtcatgtgtattttgtttcgtcttttatcgtttggctaaagttttctttgttaatttttgtgtcttcaaggtctattcccaacttaagggctctcatgaggggtgatgaatactattttttttttccaaaattaagtacatatattaataagtcattttttgaaaaaaaaaaatcaataataattttttttaaataaaactgagcaaatattattcctagttgctattttttctataacctagtaaaaaaactatgagttgatatataatgcggtgcgggtgcagtggtcttacggtactccacccacgtcaaaaaaaaaaaaaaaaaaccccaaaagtcaaagacgtcaaaacatattaaggcagtaattttcgagaataaattattttactaattaaaaaagaaaaaagaaaaagaaaaatgaaaggagttgtgaatagttgcaagacgagatccacctgaattgggcaggcaaatgcactcagatccctttctgtataatccaatggccttctctttgatccattttttctgattaaatccgaatccaaatccaaaaacagtcacaaattgaagatgtatatggcatatgggtggccgcaggttatcccactcgaacagggtctcgctccttcatcacagcggatcatatacctcaagctcattaatcgattgctgctcgttgtctctccttcccacatcgagctatggagctcttctcaggtacacttaatgtgtgtttgtataggaaatttagttggctaattgaattcgctttcaacttctatatatgggtgtgtgtcttattttgtgcttttgcgatggtttatagaggaattgctaattgaggtgttagtgtggaaatgggtactcgtcgttgcgtaattttgtttatgtggaagatgagttttggaaatgtctatgtcgaaactgcttgttttagagtgagctgtaggtcttttcttagtggttttaaccgaaatatagttgcgtatttctataattttttcacagttcaatgtgtgtattttgaggtgttgacggttatactgttataatgtggaaatgggtacactttcacttgtatatttgagtgtagttctatttttttt

SEQ ID NO: 24622 - DNA, 1114 bp, Cannabis sativa
  modified_base (1047)..(1048): a, c, t, g, unknown or other
gtaaaaatagttttatagaacatggtttttgaaaaatatttttattttttcaattttaaaaacagaaaattgattaaaaaagtattaccaaacgccaccttaattattagatagagattttgcatctttggccctttaaaaaaaccgaagaaagaatcaattatgtgaaagatgtggccaactaattttcccaccacccattcaatcacgtctctcactctcaattattcttcctttcaaacccttatgtaaattgtcaatataattaataattaaataaaaaaagcagaatctatcttacctaaagcatgtgatcagtgattacactagttagttcaaatatgtaactagagactattctaactgttaagcaacatacattaatgattatttaagtaggagactcaaatattaagtacatataattatttaagtaagagaatcatattttaagtacatatattatagagaatttagaccgtggggcataggttttaccccatttatgagaacacatttctaattctcaacatgggatgtgaatatgattattagataaggccattaattgtattcggagatcgatggtgcgaaactggtgattgtgattgaatttttattcatttgtttattgttttaaataaaaaccttataatagtgtttaattaataatcactactacccattcccaaaaaaaaaaaatcaatattacaaatatatcatcttgagcattactatttagtactagtagtgtttaatactttttaaaagtatcattttacaattagttaacgattgtaacgccctaatgctaaggcacgctacattgatttttcaatcgaagtggtgtctttgctaatcaaagaattttcataaaaattgtgtcaaattaaaacttttagtattaaatatgaaactttgtaaactttacacaaaagtatttacaagtcctgagatcccgttatttgaactttctacaaaatatttctaatacaaaagtcaggtcgcagagcgactataaaatggaaaccccagatgtcccgaganngaacactccaggtcgcgccgtcatgacatgtacaacctcattcttgctcaagctcactcctgttca

SEQ ID NO: 24623 - DNA, 5930 bp, Cannabis sativa
agtacctgcaacaatattattcatttccaaaattccaacaagttaaatacaccagagagaactcttttatttccaccgcagctaaactctcaacagatatttaaaagaatatcacttcacatgtctatatgtagagaatgtatccataaatataaccatggattatgattttaaatcattaagagaacacgtaaacaaaaccagagaactatgtaatgacattagaacattaaactacacagagcagggatgggaatcttataaattaaaattacccctaacaatgtggccaagatacgagctccactgcatccaagtgggtgtcccaatgatacagccccaccatgtacattaaggctttcctgaaatacccggaaattggaagggaaaaaaatgtagataaggatattgagcaaaatgaagaaaatcaaatgaaagtggacagatgaatgactatagcaaatgcagaaaatgtaggaatgatcagatttgcaatagcagatattttagacttatagcgcgctacaccaacttgaaagaaatgatctagttttctcctaactcacaggattcagaccaagcagcttttgattcgctagagctacaacctggagaggaaaagaacaaatataaatgaatgaaacccaaaaaaaatgcttactaaatcaggaacagagagagattataagtactaaaatcttacagaaaacgcttcatttatttcatagtaatcaatctgagaagcatctaaaccagcgtttgaaaatggctttcggaatcacaagggctggagcagttgtgaagaattcaggtgcctgcaaagataatcttctttgagctatgtttcagcaacagtaaaatagaactaggaagccaatacatttttaagagtacctgagctgcatcagcatatcccttaatctttgcaattacgtgcaatccaagttgaagcgctttctctccactcactaggactaatgcagcagcaccatcactattcatgataaaagaaccaaaccatattaaagcaacttaaaatctgcaaccctagaaaataaaccagttttgttgtagtataaactacaagaatcacaattactaaaccagttgctgaaatgtatatgaatatttagacagcacatgcctgcttaaaacaacatatcaaattgcattaccacacttgaaacaattctacattttatatttatgttgggggagagagaggggggagaaccttatgatagaagcattgccagccgtaacagagcccccgttctgcttgaaactcggtctgagttttctcaattttgcagcatcgaactatgaagagatacaaaagaaaaacaatatgaagcaagtattgcaaaatttggtatttaccatttagtataaaaatcacccatatcccattcttaaaaaacaaacgaatggaccttaggaaatccctagtacctaaaagcaatcagagaagaaacttctagttatggaataaaactgtctttcaaatgggcaagcagagaagaaatatggatactgaactgactataattttaatatttgcactgtgaaaaaaataacagaaattacaacagtagcttatgtaatttactgtcaaaagaacaatttactatttctataatatgtacataccttttccagaccttcatccttgtcaacaattatggatggcttccctcgacccccaggcacttcaacctacagaaaattgtgaactaagattgatattctaaattgatttcgaacataaaataatagttttataaagcagtaagtcgtacgggagctatttcccatgcaaataaaccatttttttgtgcagccattcctcggttaaagctttgtattgcataagcatcctgcagttaaaaaaacccataaaagcaaaaaaataattaaagctcaccagggactgatggtaagaacaagctaacatgatatgatgaaacatattaaatgaaactgaacactgaaaatttacagtcttattgttatccaacgtacatctatgtctcttccaactacttacaaagttttgggaatgattaataaactaccttgtgcaaaaataaatgaagtgaactcatatttgtttgagaaggttcatttgatttctgaacaacgtgtactatcataatatcctagacctgacatttgaacaattttttgcagaataatacctgttcttctctcgagatagtatatttttcagcacatatctccgcacaaactcccattccaaaatcattatagacatcccacaagccatctttaagcatgccatcaattatcttttcatgtcctaatcgagatccttttctggtaacaaaatgagtcataatggtttataaaagtgtaaatgaaagggtttagacaaatacacaatgaaattatttcatcaaagaaagtcttgcttgttgaatcaagtaccataaaaacataaacttttcaatcaagtgaagcagcaatagatccaaaactcatgtatggtctaattgagttgttaatgatgaatttccatacatgaccaatttaagcatattgaaccatttcataactagactagagtttttttttttcctattcactcaagcataactagactagaattaactattcatcttccaattttattctgttccagaggcaaaatggtctaaccttacatctggaaggtacttaggggtattagacatactctccattccaccagccacaacaatgtcattggaaccaagctgaatactttgtgatgcaagcattatagctaaacaaagtaaacaaaaaaaaaaaaaaaaagagggtgatcaccagttaacttaaaaaaaaaatggcacaaatggaaattagaaagcttagttttattttttataattaaatcagtcacctttcatcccagatgcacaaactttgttaatagtggtgcaaatgacagaattgggtataccagcaccaagggcagcctgcctagctggagcttgtcccaagttggcactgaggacattgccaaagaagacctcttgcacaagtgagggatccacttttgccctggtaagggcagctgcaaagagagagggaagctatttcaatgaatactcttccgaaaccaaattgagtgaaagttttattctttaaaaccaaaaaaaaaaaaaaacacgttgaattaccacgaatggaaaaagagccaagctgagtagctgagaaagaggagagggaaccgagaaaaccccccaagggggttcttgcaacaccgactatacaaacatctatgtccaaatagaatattaaaaacaaggatcttccataattaacgataagaataagaagaaataaaaaggctgattaaaatagaaatataatacctcgtggttcaatagaagaagaagtagaagatggagccatgggatgattcgagttttggtttttattaatggaatgagaaattaggcgaaagaacaggggatgtgatctgatcacagttgtagtgtttttcttttcttggttttgttttcgtagtgttattaagttgtattaattttaatgtttgtaattggcgagataagaataaaaatgatgacgttcgatcatttatctactttggaatgctaaatagatacgtctccactctgtcaaaactaacaacaagaaatagagaaccgtaatttctataattcaacattttaataactaaactctactatacttaactgcataaaataatttttttgggttaaattattctatcctcacttttattagttagttattctttctgataagtgttacggtatacatatcacacaagtataccaaatttttagtaagaatagtaactataaaactatttaaattctataattagtgacgtttagtcatataaacaaattttttaatagtaaaatcctccaaatcttacttatattagctatttatccttttcgttcaaaatgctttgttaagtgctctgtgattagaaccatcagatctcccccgttcctttttcttcttctacaacaaacccactagaccacaacgaatccaggaatgaacctacgaacccctccaaccgtggtggtattgacgaagagttgcgggagagagaattagatctggcaaggtcgaggcaagaaagagaaatttaaaagaagagttgggtcttgaggcttagagggaggttgaagagttaggtttgtaaggttgggaagtcactcacaaaaagaaatattttttaacttatcatctaaaaaattggtttatataaataagtgttactaatcatagagtttagatgattttcacgtcaatatccatttataaattaaaacgtcaagggattaaaaggcaaaattttaaaaataattaatattagaattctaagttaatgattccaatatttcatttcacaaattaaaatttccgaaaatgttttggatggtgattttattagaaaaatgaatgattattccaacttaagtaaattggaatggaatcaccattctaaaaaaaaaaaccggtactgttccaaaaaaaaaataagaatgatgattccattcaaaaaggtaaaatatgggaatggaatcaccactccaaatataaataattaagaattgaattacctttccataaaaataattacgaatcgcccttgctatatatggtttccatactaaacatcagaaacgactagttgaataagaacaatattatactacggaaatattttttcgattctaaaaaaaattactatcttacccgaactagtaaatgtaaattattattattattattattaatatattaaattaggaattcacaacacttaatattattatcacagctaaccaaactaattaattatgattcaattgtacaatccaaataaaaattttctgaacatactagccaagaggggtagctcaaatcatgagacatgtagtttgctcccataagatcggaggttcaagtctctaggtccccaaatattgtagggttgggcaggattctagtttcaaaaagaaattttaaaacatgtttagtaatggtgattctattgaaaataatataataaaactgggacaccattcctaaataatttgtaatgaaatcggccttccaaaaaaaaagaaaaagtaggaatgatgatcccattcctataaatgtagaatttcttacatttggtttgcatattaaagattggaaacgtgtttcaaattgaataaaacttgtggaataagaatgtcagtctactgccgtggaatgaaaagcgcctagtatattataacatataagtaaaaagtccaataacaagggatgaatcaacaacaaaagctacatagaaatatggcaagttatatagcttaatcagacaggttaattgtaaaggtgaatagcatcagcagacaccaagtgttacacaaaactaaaaataatatacctcgtagctgccaagccatgctccaaatgccaaaaacggcaggtgatacacaaaacaagcacagcagatgaaatgagattatcccttgattccaaacaccatcacacaacatgcctaaatgtaagattaatacgagttgcaccagcttttgcacgcttaggcaccgaatgaagccaatccctttgagtgtaacctctcatcactagaagtgatccgtgcttgagtgtgaaagagtgttggtcaacttgattaatgcttttctttaatcgtttgctggctggctcttcttcatttcttttttctgaaaatcacagcaaaacatagaagcaattagctgtgttaattgcagaaaacagtaccatactaaattgatctaccataaaaaggaaatgtacaacacaccaaatgaaaatgttgtgtccaaacttctctttcaaacagaggaaaaatatcaaaataatcaagagatgagaccacg

SEQ ID NO: 24624 - DNA, 3470 bp, Cannabis sativa
tgtgggcacttctctaacactaagaatttcgaaattcaaggaagaagagaagagggagtggtcagccaaagatagagagagagagagagtttaaactcaaatttagaaacaaataccgacctcgtcatcttcttcaaagtaaataccgtcaactgcactattctgctgaaattgccacccgagattgttttcgagtagctccttcagtctcctcgtctatgaaaattgaaaacatggcattcagatctaacaacattattataaaaggcaaagattatgaaatatcacgactaatgaaaccacaattaaacaatttctagcaagtgacagttaaaagttgacctaacacctagtgatcaagtatccactctagtttgtttgtcatatgataatcatgaaaaatcaaatactaactttgtaaataatatatacaagctttagctataaaagtttatctcacaagggaaccaaagttgttcccctctattctcgtggaatatgtgcaatgaaatagtttcacatacccatgacaagagatcaccatcaacaacggatgcttcttggatcagagaaaagaaatcctgaaattcgaagagttaaaagagaagtagaagtggggagaacaaaattcaattcatgagtacaagatgagttagaaccttggataatgtttttcaaaataattgtaatatgtacaaatatacacagaaatgcatgtccggaaaaattaaacattaagttatcgattcgatacaataggtctgtaagcataccttgcagaggtggtgtaagaagctatcagcagaaaaccatgaatcatctatcaaagctgatgcccctacaactgcaccacttgaatctgcattgtctttctgaagtccatacttcagttgatagtaaatgaccttaataaactgttaagataacatcaagcgtctcttgtcaacagatactcttctcaaattcattttaataaaaaacaacaatgcgggtgtatcaatagatagcaatttactaggacaagtataaacaacaaatgcattatcaaattacagacaaataagtgccccatgggaatgtcaagtggttcagtttataactttgggccaggtctctaataagttgaaggtaaatttatatacatatacatactaataatataccagagaaaaaagattgaaatcttattttttaaaagagaaagggccacttgtcaaaagagattgaaatctaacttgttggtacagatcaattggtatagtaagaaccaaagtcataaactgagatctacagattgcaatgcctctaacaaagcctgaactggtagcaaacgcccgaagggaatcacaaaaaaaaaacacatgcaagcttgagaaaaacatattatatttttatgaaaggtggttccatatctattagaaggtagggaagaatagaaaagttattaaacaggagtactgttttggatttagtcaacaagtgaggcaaaatacataatgtttatgcattaaccaaaagagtcataaattgaagatcttcactcaataggctattggcacaaagttatttagtttaacaaacatatatcaaattacagacagtagtaataatggaatggttgtaactttaccttcacaaagagccgactccttgtatggaaaggctgcatttaaaaaagaaagaaaaaaaaaagctaataatataaactaaatattcaaaaacaaacacccttgaaagacaaagctgaacatcaaaagaaaacttgatgacataagatgacaggaaaactttaataataccacccccaccctatccagaatgtgacaggaaaacttcccttttccttctttgcagattttcttataccaaatatttgtaattagtaacgcaggaatactggcacatatctttacatacccagccccaaagatggaacaaatctaattcaccagtaaggaaaccatctatttcttccatttctaatgatcaatgcaagaacaaaccacatttttttcttgattaaagattagaagaaatctacccaaacaatataaaatacagaaaaatcatcaaaaaagcaatctataggaagaaaaaaaagcaacaacctaaaagttaaaacaaaacaaaacgtgcagctcgtacccacaaaggcatgttactagaaagtacattttagtttcatgccattttaaattgtagattttcccaaataaagctatagactagttgggaatatgcaaaagcaaatccttacagcttcagtgcatccaaatagaaggctgactatagacttccactgtagaaatgcttcgagtgattgtcccatctgcatcctttagatgtcataaaatctggctttatattaaatgtatacaaatgaacataggattttacacataccacaaatgcaatgaatgcaaattgcagttctccaagaagcaaatcctcagaacctccatactcttttaccagcaagctttctaacaaatgggtctacatagagaaattagataggaaaaaccaataataacccactaatatttgagaaaatttgaatgagacttactttgtcaagattcaaggccgtaagttcttgcccctgaattcctttttgtttgatgatgcgaggaattgatgtgtaatagcatcctgtctgctgagagttttcagcagatattgagcacttgctatctttcagttgctcatctagagctttctccactgttgttttaggagtatttttcatcattgcaggttcactcgcaacagtaatttctcctccaataggttctgtaaaacaaaccaattgaatttcacatgtgtccagcataatacactatgtgattcgttctagttttcttagtcagagacaaacattattaccaaacaaaatgagatacaattcactgtgtggtagctttctttataaatgtctcaaaacccaaggcatctttcatagtccatcataggacaaaatcatatccaaaacaaaaaaggcaatacaacagacagaaaatgctatgaaacaataaaattcaactaggaaatagttaaaacacaacagaattcagaccagtaaaaaatgaatcaaaggtttcattaatttgcaaaaatggaaacaacaatgaaggaacatgatgataatatcaagaaaacaataaataaaaaacccttgaaatagctattagatagtacctatccgttctatgatgtccttcgtaatgtaattagataaactcttccaagttgcatactggcttaaattataaggaccaaggtgtctatcaaactccaatcttctaactgcttcacaaaacctctcttccttgattggaggaaaggggcaagaaagggatagaaaaaatattagtaatacagatcatagttgtataattcaagcaaagatgaataaaatttatgtttagattttgcatcacatattttcagtgatataatacacttgactc

SEQ ID NO: 24625 - DNA, 2819 bp, Cannabis sativa
tccacacaaataataaatagatagggtgatattgggtcaccttgtcgcaaacctcgagtaggaataaaaggtcccatctcatgcgccccaagcatgaccatatagttaacaattgtcacacacaggcaattagatccacccaacactgagaaaaccccaacctacacaacataagtcttattcatatctaattttaacaccatacacctgttcgtcccatgaatttttcgtttcaaataatacaccacttcaaaagagaccatgatatcatctataatgagtcgaccacggtgttgaccgagatttttggcaaccagatatttaatgtaataatgatagctagcttagggagaattaatacatatatttttacgtggttcagacattaatgagccgtagtccacgagtctctattattaataggttggtatttcttacagagaatgttctatgttctttttccgatcccctcattaatttggttgaggggtatttatagcgattggtaggaagaagaaaggtcttaattgtctttaggtgccatccttgggcacgcacaagttcccaaatgtataaaatagggcatgcacaacctacgtagtaggctgcctaggttttaggtgagattagccttcatcccttcttgattgatgtaattcttcataatagagttgtcacttgcacccttaattattgtgtaatcactaaaagacgggtttatgacatctgacatgtcctcttatgggtgttcctagacgcttcctccatgttgcatcaaatgcaaagtgacagtttatctccagtttcgctagtctggaggggttcatatgcctgtcacctcccgaggaggaagtagggcagttcttcccacatccaggagcttgctcttggactagttattggttcctttagaggggatttgcttaagtagtttgctcatctccaggtaatgagtcttactttgccacatgtcttatgctgagactgccacgtatattgggaaaaacttggggcaacatttacccccaagtcttatttagttgtagataaataagacttgtacactgtctctggcctcaatgaattctgtgaccatcattccctgtcttttagcaggcaacgattcgttttctgcctattgacagacccctccatcaatgccaatgtcagaaagatactcaaacgtttcaaccaccctttcttctcatcatgttttttcatcttgtctgttggattaggggatttgaaccgttgtgaacccccaccgtgtaatggtactcattggataccgtttcataccccaaatggcctataaaaaccagcacttctcttgactaggttattttcacttcctttcaatttttagattttcaaaccctcttaacaaaattccagactttctcgatttcctcttacttttcctccgcctttgctaggcaaagcactaccgttgtacggtgtcctctgcccctgccttgccctcatcgtgtaagtccttctttctgtataaatacctcttctttgttttctagggcaagtagtggtagtagctttttattgggaagtattggttgttcgccataatcttgatgttatgcatgttgagaaatttttttgtaaaagcatacctcacacattattggattgtaaaggaaaatcaaaaaatcactacaactcaagattagatttaacagagatgggcattatgtctcatctccatccttatgaagataagggcattactggtcttcctgctgcagcatacactctttcaaaattagataagaatttattttgtaagaggctatttgacttgaaatttccttatggatatagttctaagattagcaactgtgtagatattaaaaaacagaagctaataggacttaaatctcatgattttcgtgtgattatgcaacaattgttggctatttctataaggggtttgatggaagatggttgtagagagacaattcttcgactttatcgattttttatggattgtgtcagcgtgttgttgataaggaggagattataaaattagaattagaagttgttgaaattctgtacaaattggaagaatattttccaccttctttctttgatccaatgattcacctggttgtccatttagcacgagaagttagactttgtggtccggtgtactttcgatggatgtaccattttgaaaggtacatgaaagtattgaaaggttttgtatctaattatgcacgaccagaaggatgtattgcaaatcactatcttgctgttgaatgtgtatgcttttgtgagacatttttgaagcaaaatgatgatcaagatactatattaattaaagaaaatccactattagctggtgaatgctttgaacttaaccaagcaaacatttcaatagcacatcgatatgtgttgttcaattcagatagtgtagcacaccatttctcaatatccatatggatgagttgaatgaaatgcatccaggattgaagaacaatcaaactttgttgtggaatcgacattctgaaagtttccccttatggttttatgagaaggttagactatattgcaaaaacagaagagaatatttagacttcttatatagcttgatgaccataatatttttattttcaaatttctaaatctaacaaggtagatgatatgctggcacaattggctaaaggcccaagtcgtagtgttacttcctacaaaggttacatgattaacaaaattcggttccataagaaaggagttgaaaaaatgactcaaaataatggtgtatacttggaatctcatggcagtgggcgattgaatgataaaga

SEQ ID NO: 24626 - DNA, 2167 bp, Cannabis sativa
taaacttgctcctcgagcaagagcttgctgcattttcataggctatctagaagaaaacatgaaagcatacaccttactagacttgcaaaccaataatattttccattcacgagatgtattttatgaatccatttttccactcaaacagaccaacacaacaactagcattgacaacttctttcaatattattcaactactgatcctatttcttctagtgctgcagacaccagtatatcttatcctaaaatttcaaatgtttgtccaacacagcagccttccatggtttccaaatatggcagaccaatacatgcacctgcacatttaccatattacaattgtgattttgtttattcaactaatagcacagctcatcctcttaccaactttctctcttacaacaggttaacacccaggttcagagctactgttctagccacaacaaaaatctcagaacctacctcttatgctcaagcctacaaacagaaggtttggaacacatcaatggatgttgaaatagatgctttagaaagaaaccacacctgaatcgtagttactctaccagatggattgtatgccatagacaacaaatggatatacaaaatcaagtataatccagacggctcagtcgaaagatgtaaagccaaattggcaaccaagggctacacacaaccaggtattgactactttgatacctatgcccctgtggcaaaatttaatacactcaaacttctttttgcccttgctgccatcaacaattggacctacatcacatagacataaataatgctttcctccatggagaattgcatgaggatgtttctataaaactacctcaagattataccccaagaggagtgatacctaaaaatgatgttggcaaattaaaccaaagcttgtatggcttaaaacaagcttcaagacagtggtatgctaaactcaacaccactttactacaacaaggctttattcaatccaaaaatgaccataccctgtttactagacaacaatcaaaagttttcttagctttactcatttatgttgatgatatcataattggtactaacaatgttgcagcattaccaacttttatgtccactctcgatgcacattttaagctaaaagatcttaacgacttacacttcttccttggtttagaaattgctcgctgcaacaaaggtatttcagtaactcaaagaccattcaaactacagctcctacatgatacaggacatcttggttccaaacctgtcaccaccccaatggaaccaaacatcaaattaaacaacgaaactggtgatcttctacaaaatccaactcagtgtcgaaacttaattggcaaactaatgtacctcaccattagacctgacataagttttgcagtcaacaaactcagccagtttctccaagctccttgacagcctcaccttcttgctgccaatcgtatcctacggtacctgaaaacatcaccatgatagggtcgattcttttataaagcttgctcctctacacctcaactacaagcatttgctaatgctgattggagaacttgctcagacactagaagatcaatattatgctattgtgtattcctcgatcagtccctcatctcatggaaatctaggaaacagcccacggtttcacgatcctcaactgaagctcagtacagggcaatggcaaatgcaacatgtgaactcacttggctccactccatcatcaaggacctccacatcaacattaagacaccttctctcctattttgtgacaacataaccgcaatccatattgttgaaaacccagtctaccatgagagaacaaaatgtattgaaatcgattgtcacatagtccgggaaaaaataaacaatggcaacatcaagatgaatcatgttccttcaaaaaccaacttggcaaacatcctcaccaaacctctcttccccattccattccacaatattgtatccaagatgggtgtaaaaaatttctacactccatcttgaagagaggcgtgttaaaaccagttatttagttaggattgttcagctcaagttagttatttctgttatttactttcttgttctgtcatctcctattttttttttcacctatttaagcttcaatattgtaaacaagaacaattcaatttcatatcaataaagagtaaaaccactt

SEQ ID NO: 24627 - DNA, 7863 bp, Cannabis sativa
aaattagactaaattttttttttgaatgccaaaataagttaagggtgcatcaatacatcccttttaagagggtgcattgtagaatcaccctttattttattttacaaaaaaacacaaaaatgtttgcaattggttttgtaaatgacatttttgtaagtcaatttctttgtaggcatttttgtaatttttcaactctcataaactacacaacagatcctctctctctcctcaaactcaaatcctctctcttccttctctctctctcttccacccgatctacaccgacggcgaaattctcatctgcatttacctcctccgcttcgttcacggtaatgatctctctgttatacaactgaaattttggaaaaatctgttgtatgctcttaaaatttcaatttcaatttcatttgtattgttctgtacaaggaaagataaggggagaaccttgtgagttgtgtaccatattcgtagtagttagcttgattcgattccttaaaattttagtgaaatgtaagaaatagtactgttgtagctgtaatggtgatgataattcgaagagaaattggttgtcttgtggaatttctttgtagattattgttgcactttttagttcacagtctgggcatggatatcatatccttgattggtttccaatcctaaatcatcttcttcttcttcctggatcaaggctagtcttttcgacattgctcgctctttaattgtctaatgatgttaatctaccttttttgattattcggttgatttgtgtaatcatgctcaatcgtagtcaagtttgggttgtttggtggttttattgctattagtatagtaattagctctggtttgattgggggcacaaaattggatatgcatttattgtcattggaagaaatagttttttttaggaaaaattaagtttgtagattgtgtatgtatattgcttgatgaaatgtctgattgaagttatcctaaataattcacacatctgaatttttcttaaatatatatgtatttgatttttgtatcagttgcatgtttttgtttttttatacaatgcgtatcaatctctaaacaaagaccgtgttatgtgaatatttgttttttctgtagtctaatattgtttattgagaatatagtatagcgagaaggctttttgttctttgctctatctaaatttgagcaattaactttttttggtcatttctttgtatatggaatgagttttggagatgggaaagttcttgctttgtcattggatttgattgttttgaatcaggttgatgagagtgaaactttaatataattgaaatttctaatctgtgttttgaaagttaattttttgtttagaatctgtgttttgcctgagccttgttcgctttgtacttgcttatactttgctcttggattctcatccattggagttgaatggtaatctaatagtttctccttatgtcaacatgtcttattatctcatttagtgcttgtcatttctaggcttaagcgccccactgtgttgagattacatttatttgacctaattgggctatggagatcatttgtgccaatcccaatttgtttaaatattgtactagtttttctttaatcgattcttaattatctttaagtgcaacataaattttctattactttagataattgtagtatttttagatttatactgacagctaacttggtttcctcagataccttcttcatgatcaagaatgtcaaaagtcagagataggactgaggattttaaagatgctgtaaggcacactgctctttctttgggatatgacgaggtttggtttttcaaagcatttggatttgttcaaattcattcatggctcataatatggttatgttatagttaaatccttatgatcaatgctgtttgctctttgacagtctaaattggcggccattttggcaaattttatcatccacaagcctcgccaaagatcagctttcactagaggtgcactgaaaacagtatgtgaatcattgtcttgcttattttttgatgacattgttagaaatttcgcttcagtgttgacttgtttgtttttctcccctcaattagcttgagagcattggaacactggaacaatttatgttaaaatatcgtaaagattatgtggatctacatcgcactactgaacaggagagagatagcattgagcatgaagtaagtcatattacggttttgttcaatggtattttgtcagtttgaaagtttgccacttacattgttaaatcttccagtggattaaatatagtcaatattacaactagttttaagatttcaacatataattacaagatttatttgaagatgatttattctctgagataggttgggggttctattctctgcctgtatttttattccctaaaaaatctctatcggatgatgtatttgtctctcagacacatccactacagtatgcagtatattttatggtgttcataatttataacttcattaatgcctgtcagcctgtgcaagttttagatgcttttgaaatctcttaagtgtggtgatttgtttcattatgtttgtatctatgcctttgatgattggagtttggctagttttttttttttttttttattattattttgtttttttttttgtaagattggctagttttcttttgaatatagctgtgatggcaatatgtaggtgtagagcgtagtgtaggtttgtactcaaatgaacgattatgaaaaagttcaacatgaaattgaatattcaattaattttatgcaggtcggtgccttcataaaagcatgccaagaacaaattgacgttttaaaaaacagcattaatgatgaagaaacaacttcaaagggctggcttggcattcagaccaataaatctaatgctgatactgtagcacacaaacatggggtggtaagattcagtttgcattctatagatcgttcatgtctatagtgttcttaattgcagaaatcattcacttcactttagtagtgatgtcgcgattataataggattttctcacattttatatggtatcttactcgaccgtatttagaaaccacatatatgaatattgtaatttggtcaatcattattttctaaacctaatttcataatttcagattttgagtttgagtgagaagcttcactctgttacctcacagtttgatcagctaagagccatacgcttccaagaagccattagtagagcaaccccaagaagaaaatttaaaccaattgccaaaccaagttctgaaaatttatctcaatcaaacaattttgagcctagagaagctgaacaatttcaacctgagcctctaagacttaagcaacagctcttggacgacgaaacacgtgctcttcaggtaatcattgtgatgaccaaccaaccagtggtgtttatttcagtgcttcatcatgtctgccttgtgttgttcaaatctcagtttttaacgttcccttaaaaattgaagcttttgttactgatttgcaggtagagctgagtagcctcctagatgcggttcaagaaacagaaactaagatggtcgaaatgtcagcattgaatcatctcatggctactcatgttttgcaacaagccaaacaaatagaacaactatacgatcaggtaagagatgtttattcaatatatatccttttagttttttgaaaaatacaacaacttctacttcaaatttttgcctggaggttcacgataccataaacttagtccataggctgcccatgtgttgcaccgttgtgaatgttggttgattttacaatatttgaggaacaaaaagctataacaattgctacatagataccataatgcttaattatacaactcatgataaaacttttagatgggcagtgttaatttatatcataatgctttcgaaatttcatactactttctcttgcgtggacaggcggttgaagctacgcacaatgtggagcttggtaacaaagaactgtctcaagctatccagaggaatagcagcagtaggaccttccttatacttttcctatttgtacttactttttcaattttgtttcttgattggtatagttagtcttcttcaatcaactaaaaattatagttttctttgtacttattatattgaaaaggaaaaaaggaataggaaatgggaatatagtcctgaagtttttgagttaaaattttatactgaattttatatgctgatcaagtgaacaaattgaactctaaatgccatgccaatgtcataaataatgctcacattttgtaattagtgttgtcaacagaaaaccaacacttgagtttatgtatacaatcataaattaaaagcatatgactctcgttaaagttcacgatccttaatgtcgtgacaatagaatccaacccaaaagatgttatccaaactaaggaattaaaaatcgatattttccacctatatttccatgatgttatctttttgaagctatatatttttgggtagataccgttttgaatcttaacttgcattttgtaaaaattactgattagattatttgttttattaaataataaattaaatattgtatttttcaaaatgatataatctaaaagtgttatgataaaattatttatattttttacaactgttcgtactgaaaattgttttctagttagttatattataaaaaaaatattaaagattaagctcaggtcacagtattcattttgttatttaacaaaataaagagttcgatcggtatcttttataaaatacaagatataaagttgtattaattaaactctaaaattagaaatatttctccaaaaaatcaatattccccatgcatatattatttatgattattttctaaagactttcagtactttcaaaatatacatgaatattctttatttataaaaaaataaaaacaaaaagtaacatgtttaatgaagtgataggtgcaggaaaataagatcgttttttttttttgaaagaaacgttcatttaaatagatttcagacctcctgatcgttacaaaataagttcataggaatagacgagatggcaagacgaccaaactgattatggccaaaagttcacttggccacattatgagccataaaattacaagttctagcagtaatacaaactaaacaaccaacaaaggaagaaaagatttttttacaaaataaggaatagttctcaatttcctatctaggatctaagccgttgaaggagttgattaccactttaaaatcgctttccaccaggataaagttgtggccttgtccttagccacttcaagagccagacaaacagcagcaacctcaccacataaagcatctgaaaaatccaactttgtcgtatgcacccaaagcaccttacttagtctctagcaacatgttcattttaaaaaccttctacatgaaataagatcgttcaaaccttctacatgttcattttagtatattaacatttgtggtatgaatatgttcaacttccaatttatgggtgcagaaagttgatattgaaagatgggcatgcatgaatggtgaaatggaaccatgggatatgaatcatattccagccttgggctatacagcaacaggccaaatttcctaaagagggtggtgatcataagtaaatgaagtctcatctcttttgtgctctgccgcggtttgcttggctcttgaagtggcaaaggacataattttatcctgatagaaagcaagtgatcaaactcgctcaacgggaagttgaaaactatttcttattttgtaatagaatcatttcttgctttattagttgtttattttgtattactatcagatgagtgttttcccataatcgctttgggtgccttgatgtagcatctatacctatgaacattttgtgtaatgatcaagaggtctaacatttttgattaatgaacattgctttttaataataaatttgttttgttattatattttcatttaatacagccaatgaaagtaggggaggttgggtatgcatcaaattagagaggtttgatgtaattgaattaaagaagaataaaacaaaacaagataaagcaaaactgataatttttgaatgagaagataaacttttaagtgtttagacattgaattagagtttatgtcaagctgtcaaaaaatgacccaactcaaaaaagaaatttcccaaaactttgatgtaaaaaatttccaactgtctcatgagtcttacaaaatcctaactttgtctaaaaaccaaaaaggaatcaaattgttgatgagaagattagtcaaacaaactgaatcccatatcatcatcactctcttcctttggctcttcctgcacatacaaaatcaaaaaaacaaaacccataagagagcaagccaaataagtagagctacttacattgaaaccaaaccgaactaataataccatgctcatatcaaattgactaagtcaaaaagaaactgtttttgatgaaacaaacgtggtcatttctagttagtcccagctgggattgaaccccaaaactttactcactcactcatagacaaccacttgagctcaacctcaagtagagacttgcattgaaaccaaacgaaactaataacaaggagttcatgcaaattgactaaacatccatgccaagtcaaaaagaaaccattattgataaaacaaagttggtcatttctagttagtcccagctagatttgagcccaaaatccctactcactcacacagacaaccacttgagctcaacctaaagtggcagtggcagtggcagtcaaaaggctactattgtagtcaaccaacatcccaataaccataacaataacaatggacctaagactaaacagaattcaagtaatttctatgtctaaagtgtataaaagtcttaatagattgaaaatacattcatggggttgagttatatagttggccaatcatgaaataaaaaagataagagcaaaatcagataatgggcaatgatatgcgtaccttcttcttctcctcaactgccgcagcagcaggagcagcagaacctgcagaaggagcagccatggtagcaggaccagcagctccaccagatccagcattcaaaacaaggtcatcaatgcttttcttctcagccaacttagcaaaaaggcctggccagtagggttcaatttctacattcccagctttcaccaaagttgcaatcttctcagacttttaagttcacaaaacgtaaatttatcaagaaatgatcaaacaacaaaataaaacaagaccaaatctaaatcacaagttcaataaaatcaagatctgggcattgcaggaataagttgaaaatgaataaaaacattgactttgatcgtaatgagattgaataagaaatgggtcttacagtgattgggattgaatcatcatggagaatcaaagtggcgtaagtgcaagcaagctcactggccattgttgtactgaaaagagaggaattgaaaccctaaacttttgaagcggcagctttgacctctggattgacacagcgaagggtttttagggcaaaatatacggattgtatatataggtggagatggctagggtttttgattttgatttaattaggaattagaatagtgggaaagaggagagagaagaagttgaagaagcagttacagagctttggtatatagtgggccttaattatcagtacacgaaaacccaagcccagtataaaagctaaggcccaagcccaaacaattctaacctcacctattaccactacttgccttaattccttttcttctattatattttagggaaacttacaaaaatactgtaatttgggttaatttttacaaaaatactgccacacggaaattttttcaaaaatattgtgttttt

SEQ ID NO: 24628 - DNA, 1493 bp, Cannabis sativa
ctctttctctcttcatcttcttcttctttcctctcatctactttatattattttataacaataacgattttataacaaatattaaagaggcgaaatcaacaaataaattacatgtatttttataacaaaataaatgaaaaaaataattgtctttatttttttttttgagaaaaaattgttattattaaaaaatagagtcattaataacaacagaagaaattggagaaggaatttcccccaacaaaattttatcttcatccaatcgaagagcaaatttagctaaagcatgagctgcttcattagcatcttttttagcatgagatacctttgctccaggaaaatagaataaaagataggaaatatcatctaccaaatcataaaaagggattacaaatctagtagaagacgtcttattaagtgcattaactaccacaagagcatcagtctcaataatatgaattggtagttgatgctgaatagcccaattaacactaggaaaaaatgctgcagcttccatttctttaggagaaaaacaccctcggaaaggcttcgagagaccagcaatgacattgccatagtgacctcgaattaaagctccaaaaccaattactgctcctgcattatcacaagcagcgtccacgtttaatttgaaacaaccagcttcaggtggatgccatttaggtcgtgtcttcgcatgtggagacccttgatgagcctgagagttgctgttgttgaatttcgcaccagttgcagcaggttgttgtgatgtagccttgtgatattgagccaaatgagaggcagcaaaggtatggataatgtctgcggatttcggcttagtaccatgaatctccttgtttcgttcagaccaaatacaccacatgagacatgtaatcaattctaaatcagtatcattatgggcagcagcaacgtgggaaaaaaatatcaaaacctttgatgttaccaatgttcaggatatacacattgaaatgacactttttccacactgacttagctctatcacaacgaaaaattgcatgaccaactgattcccagctgcatttacaacgtgcacaggcagtagaagaagtgatttttctatgagcaaggttaacagaggtaggaagtgcatcattgattagtctccaggcaaaaatttgacttttttggggaactttaaagaccaaaaccagttccaccattgtgtatttgaggatgatgatgaatgatcatccattgaatccgaacttacagcaaggtgatatcccgatttcaccgtataaaaaccagtatctgaatggtgccaaataagcttgtcttcttagggaaaaggactaagcgaaatagagaggatacgctcaatgtcaataactccaaaatgttgctctaatatctgagtattattcggttttgtgccctaaataaaatccatttcagtataatcagatctacttattaataaagatcagaaataacattttatgttgcattgttca

SEQ ID NO: 24629 - DNA, 3055 bp, Cannabis sativa
  modified_base (3015)..(3030): a, c, t, g, unknown or other
ctcgattaacaacttatccaattctcaaaacaaaccctaattcataaccgaaccaattctaactctccattgtttcaaaataggctatacaattcccaaataccctaaaccaggtcttgaaaataccccgagccaaaaatcatgtttgagaaaaacccaaaattttccccctgctagtcaaccagttaactggttcaccaacaccctaaaaaatcagttaaccggttctggcaggcaaggaaaatgctggttttttaccccgaaactaaacctgagctacatcaaacctgctcaaaccttccagaataattccatatcataaaaacaaggttcacaatcaaacaattctcaaaaattcatcacaatgcccaaatcaccatgttagaaccaaaacgaagttcttaaatcaaagtttcgaattctaaaccaaatagccataaaattcaaccaattagaacccgaacaatctttgaattaaacttaaaacaagctctaaacttaaactaatcacacaatcctcaaatcacaagtttccccattcaaaactcaatctaaaccttgaagaattcactataactagatgagaaacttacctcaagattttagacagcaacaagtatagatttcttacaaagactgagctgaattaagatgaaaacttgattttcccttgatatcttctatggccgaaaagaggagagagaaaaggcttgagaggttttctaattttaaatttttcttcttatctttcaaaattttactaacttaggaaaataaaataaaatatatatcactcctaattttcagcactaatcatccaaataaaacaaaataacatttaacctatgaaataactattctaccccttcaccacacactaagttaaaaacataacttaagggcattatggttattttctaactaatcttgccaaaccgataatttaaaattctaaattagtccggaatacattttgattccaattcaattcatcttatatcgtcgtgacttttttgaccattccgtcaagtttccacgaccgtcgggcccaaaaacattttatttcaaaaatgatattcgatatacccacttaatctaataaaatctgcgtaattaataaattacgttttatttgttcctttacttgtatttcactaattaactcgtaattagcttaagtaggattataatcctactctaatgtgcacttactcacatatttaataaaatatgtctaattaaacatcattatattttttaggatattacaatctgctcatgcccatcctgcatggttatcgttacattgctggtcgtgtgtggtccgtcgttgatacctgttcgtggtcatgtgtgggtgaatgtggatgctgggtgtggatgccgagatagagaaaggaatagggaaagggtttgagtttgagaataggttttagttttaggactgctagatgaaaataaaacatatatatattattattttaatcggttactgggcgggttcagtttatactcgaacccgaactttagttttaaaggacactcgaacttggcccgattatgactcgggtttcatctgcacccgaatcaaagttttcaaaacctaatttttttagttttggattccgatcaaccgctttaactgagtaagactagtttcgagtatatatgtgttgccctaactcaaccaataagttggtttgaacaataggtagacacctatgattagagggttaggcttacctaaactgaactcatagtagtaactcctaaatcaaacatacttggaaaaataaaatggaacaaccatggtgacaaatttttagaaaattttgaatagtttaccgttttaaaaataaagtttaaatgttttgttgcactcatgactgtattttattatatgcatagtaagtaattgtttgaactttattataggcactacatttggttaatggtgattatctttttcatatagcaactttgctaactcaggaggagtttgaaatgttgatctgcattatgtgggtgatatggacggatcgtaataagattattcatggagatagaaataaggatgctgctgctttggctttatatacaacaacatatatgaataattatcttaaagctaacaacaattctactactactgctactctattttctcctacagtaaccaacacttcacatactgctgcaacttctgcaaatgctgctgcaatgaaggctcgccctacagaaggtgtaccatggaagccgccattactaaacaaattgaagcttaatgtcgatgcaacaatcaatacagccgacaaaatacttggcattggagcaatcattaggattcatgatggccaggttgttgctgccttatcaaagccggttcaaggatgctttcgatcagacgaaatggaagccaaagctctatttcatgcactcaattggatcacacaactctctctgaaaattgattatgttgagaccgatgctcttcgtgtttcatcagcaatcaataatgcatcctctgatctatcttctttttcagatttaattttagatgttcgttgtcttctttcctttttcccaagcattgttgtttctcatgttaggagaaatgttaaccaagctgctcatggtttagcaaaatatgctcttggttggatgtggacacttgttggagaggagaaattccttctcctattttctctgttgttgtaaacgatggttgattataataacagtgaatctttcataaaaaaaaaagttatttagaatattttaagaatttatcaataaccttaaataaataaaaggtacgcagaatataaaaaaaaataataaactaaagtactctctttgatgtgtaaataactataacttaccaaagatttttcctatagaaaggcaaggacggatgtacatatggggttacagtggccgtggcccccccttattttttacaaatcatacatagtaattaatatacaattgcaactgttgaccgaggttttcggnnnnnnnnnnnnnnnnattataataaagagctgtaagaaag

SEQ ID NO: 24630 - DNA, 2014 bp, Cannabis sativa
caagaagggctagcaccgaggttcctggagcttgagggtatcctaccccctacaggggatttacaatgccctgttatcttggaaccatgatgtgcccatgcgcgaccccctgtctgagatagatgatcgagatacggacccactatcttagatgtctgacttagactagaatttcaatctcttcctttagacaatcacactcgtttgtggtgtgacccttctctccatggtactcgaattctttactctagtcatgtctatttcttcctccatgcaacatgcatggagattttctatagtggaccatattacacgttgctttatagatattctcccatgtgtctattaagctcgtgtattctgtatatttcagatcatactcctttcacggtttcttcgaggagtcattgcagttatggctctttccccctatcttagtctaggaatggcttgcgttggactttggaatctcagtttttgtttgttttggacctacgctgcatctgatatgtgtcagcctatactcgaaaaactaagtctgtgtaggggcgagactggaagtggtaggtccgtaaataatctgggtaaactatgttcagagtattggcaaggcttgagccaaaacttaaggtgtgtagcctggagcagttacagaaggagttagagccggggggactccaacagcttgtacataggcgtcttcaaggttaatggtaccttgcacctttgccatgaacacgcttagagtttcagctcttttccacttcatttctccccacagcagagagcctacgctattccgcattggagggcaatcaatttcatgtcatccctgacttttgttttagcagctgactccatcattctttgaataaaaaccttcaggctttcgttatgctgctacttaacatttgtatgcgaaccaacttctagatatgtcccgtgcggtaatgaattgtttgcgaatggctaattgtaggtctttccagctgtcaattgatttgggagctttccaccaatcctccatggaattagtcaagcttagggagaaacacaaacatttggcatcatcactgacgtgagcgacttgcatcatcttattgtctttagccaaatgcgctcgcgaatctgttttcccttcgtacagcctgatgtggggcatcttaaaattctccaaaagtagagcttttgcgatctttcttacgcagggttccaaatcctcatcttctgaatttgatatgctccactttgtttcttgaccaagttggtcaaagcagtgattttttcttccaacctttttgtatcgcctttagggagatcgcgtcccctcatcttaacactcaggtggtgcctaaggttacccccacgtggccttgcattctcacttttggagctttcgtacttgcatccaactaccgccagaggttcgcagtggacttactatgcttggaatgccccacgactgtcctaccatcttggctaactgagtcgctaaggtggttcctttgtcctttaggcgtaggtgccttgacacctgctcctcatggcgcgggattgcgtctagggtctgaagcgcatctgagtttgaaagcaccgacggccttctgcgtccttgagggctggccggtcatgtttacatttctttgagaaggtctaggtgtgggttttgtgagggctcgccgaccttgcctttgaccttatccttgcgtggattcatggccttagctataaggttttatgccctaaataaaattctatttcaatgtaatcttttctattcaattataaataaagaaacatatatattttcattacttatttagtatgaatttttgttcatgtgataattgatatgtttatttgatttacaaattcattcaaatccttatcacattgatattcttgtctactgtgtcgtcagcacagttgaaagtaatcaagattatataattaaatgtataactatgatttatcagtacacaaggtttaactgatatgataatctacaatgtag

SEQ ID NO: 24631 - DNA, 3109 bp, Cannabis sativa
gctcacgagctttggcatacactagaacaattgtttggcaccacctccaaagctcgattgattcatctgatgagctagctccaaaacacaaagaaaggttcctaacaaattgatgaataccttctcaagatgaagaatttgtttatggtttatgtgctgctaggaatcggatcacagatgatcaactcattctttatgttcttgctagtttggcccctgaatatgaagttgtggtggttaatctaacatctcatgacaatcttaccttgcaagaaatgcaactcttacttcagaatcacgagatctgcattgagtcttaagcagctgctttatccttggatatctctagagcttcaattaatatggtacaatccaagaaacctccatttcccaacaccaaccaagcaaatcgaagcaactatcaaaggcatagaggtcgtgggtccatttagtacaattgaggtagcggaaatcattgaggtcgagtccccaatcaaggaaatcgaccaatatgtcaactatgcaacaaggttggacacactgtttagagatgctacagaagatttgacatcagttacaatggtcctgatgacaatctcaactcggctccccaatcaaatcaaccacaagcatatgttacttctccatcgacaactttggacacaagttggtacttggacagtggtgcttcgaatcatgtcatagtagataactcaaatctccaacaccataactcctacaaaggcaaagaaaagccggtagtaggtaatgactcgtctttgtcaattaaaaatattggatcttgttatttaacaactcgtaaatctcttcatctcaaaaacatattacatatccctttattatcaaaaatcttattagcatttcaaaatttaccaaaaacaataatgtcattgttgagtttaactctaattgttgttatgttaaggacaatcaatccaagatccctattcttcagtgaaaattaaagagctatatcagttgtctacctccaaagccaactcttccccaatatcagtgaacaacacatctcagccagctattacctcttctaccaaaaatccttttcaatctttttcatgtaataaaaacatgtctcttgtaaacatgtggcaccaaagattgggccatcatcaaagattgtattgaataaaatcctcaattctttataaattatgactgttgctcctagtttttttcatgtttgtcaatatagaaaattacaccaattcacattcctttcatctcaacacaacacaatacaacacactcatttaaaattgtgcacacagatctctagagaccatcctcatatcccactactgagggattcagatattacattattttcataaatgattacacattatacacatgaatcttcccattaaaaatcaaatctgatacggtcattgttttcaatactttaataactatgttaagagacactttgggatcaaaattaagagtttacaagaagattggagaggagaatacagaccactcaaaccttcaaacctgttctagctcaaccagagattgtatttaaatatttctacccacacactcaccaacaacaggggagagctgaaagaaaatatagacatgttattgaggttgggctcactttgttagcacaagccaaaatgtccttaattacaattatgatggaattcttttttctcagccacttacctaataaatagactaaaaaaaaaaaaaaaagtatatatcaccttttgaaatattgtttggtcaaaaatgagattacacattcttaaaagtatttggttgtgcttcacctctttagatcatacaacaagctgaagtttgaatcggtattttatcttgattagtttttgttagagtggacttaggtgtttgagatttttattttttaattaaataatgttctcattcaactacttttatggtattattgatttttcattgaaaaaagacaaatagaaacacaaaggtacattctaactcttctttttttatttttcttgtgattttttaatatatattattaataatgttaaatattataataattagcttaatatgggtgaaaatactattaaacaatattatttgaatcttgaagatcttctaatttataatgcaaatttagatggattataattattttaagaattaaaatttttagaaaaatttatcaaaaagattgtttggccaattttatcctattttttaagtgtcttaatctataatttcttaatatttttacgtatttttagagcatatttatgtttgttttatttgattttaggtttaagtatacgttttgggacatttgaagcagaatgtggagagaaactgttaaaccaaaatcaaattacaagtgttgaaattgtattagggagttgttttacaaatgcgacataattagggttgtggcgctactgatggcatcgtggcgtaattagtatcgcgagacaagatattggtgtcgtggtgcgccactaaaaaaaaagaatgccaattttccattggtgttaggcaccatagcgccgctattcgtacgagtcaataattttcaagggcaattttgtctttttagaaaaaattaagagagatacactttttaatctcttgggaaaaaaaggccaagaaaaccttttagaacttagaacaatatgaaaaaaggagattggagatcaagctttggagcaatcgtgacaactccaaattttatgattgtttttcatggatttgattatcagtatgttaatggatattgttagctaaactccaatttaggaatattaatagagattgtttgaaactttctatggattaatgttattctgatttcttttttctattgatatatgaatatttattcatatttgtgcgtattatgtgtattcaactggtcatcttatgcatgatttataattttaatacaaaatctaaaaattgagtatttagaatgctctaattgaataattataagttcgatagaaaatagaagtattttatagttcggccaaggcctccaaagatggccttgttcaaaattaattgacaatgagagcggtagctcatgcaattatatatgatg

SEQ ID NO: 24632 - DNA, 4725 bp, Cannabis sativa
atcgaccattttattaatcttcccgatacatcaagttttgataatacctatcacaaatgctgatttgtcaaaactttgattcggtacacttgaaaatatggtcacagctttctcgaggtgtgcactaagttaagtgcgagcttatcaagtgaaggataccttgattctgcccctagtaatcgtttacttatatagtaaactggttgatggtttttgccctcctctcgcaccaaagctgcacttatggcattttctaagatggcaaaatagacatataacacctcttcagttactggttttgccaataatggtggtgtatataggtgtttcttgatttcttagaattccttctcgcattcctcagtctattcaaatttcttattgcctcacaaaacattaaagaatagaagacatttatcagttgatttagatgaacctgcttaaggctgcatttcttcctgttagcgactgaacttcctttggttttctcagggaaggcatatcgagcaaagcctttatcttcttaggttagctttaattcctcttgcgttaactataaaacaaaggaattttcctaaggaagccccgaatgaacacttcttggggtttagcttcatattgaattttttcaatattaagaagcattccacgcggtcttctgcatgatcctcgctcttgattaatttttctaacatatcatccatatatacttccatgttctgacctatcttgttttataacataccattcatgaggccctggtatgttgctccaacatttttgagtttgaacgacatgatcttgtaacagcataaccctatatttgtaatgaagcttgtgtgttcttgatttggaacatacatttttatctgaatgtatccataatatgcatccataaaggtcatcagctcgtgtttactatcgtgtcgactaattgatcaatccttggtaacggaaagcaatcttttagacatgctttattcaagtcggataagtctatgtagtttctccatgtcttgtttggtttaggaacaagaacaggatttgagatccatatgggataaaatgcttctctaatgaagttattggttaacaacttgtcaacctctctctttaaagcattttgtcgttcaagatctaaatgacgtcttttttggcgctttgatgggtaagagagatctattttgagatggtgaaaaatcacatttggatcgatcctaaccatatctgaatggctccaagcaaattggtcatgggtttccttcagaaatgtgattaattgttattttagttatttccttaaatcttttccaatgttgacacacatggttaggtcgtttgggtctaaattcacttcttccaactcttcaattggctggagttaattgttcatcttgaattgtctcacatatctcattctcttttgttatggttaccatcaattggtgggttgcccttctctttttcaattctacaccatagcattgtctcactgtccactggttgcctttcattgccccgactctggaatgagttaggaatttcaaggacatatgttttatcgagcttacttcccctattcttgttagtgttggatgacccattagtatattatacaccaaagggatatccaccatgaggaactcctgcatttaggtcgctgataatggaggttttctgtaacaccctactcgtttaggcgtgttattgtgattttatattatttgtgcagttcgttgctaatcaacgagtttattaaaaattgtgagtaattaaatttttgcttaaatactatcaatttgaaaataaataacttttatataatcaggatctcgagtttaaaatatttacaactgattcaaaaacttgatacaaaagttgttgcctagagactttacaaaatacaaccaactatctcaaagatcatacgctctaggtctaactaccctgacatgtacaatcttcatccactcgctctcactgctactcagtcttagccttgcctttacctacacatgcaacacatgcaaacaatatctgtaagttgacagagttgacagacttagacttagtaaacttagtaagagtaagaaaagtataatcataatcataaatataacctgagttacaattaggcttctattacacccaactgtaatcctatccccgtaccctaggcggtaccgagtctagaacgtttatacgataatactatcaaccataagctatactcggtactttagtcgtattgatgtgataacgtcaataaatatctgagccaaacatactctatcggtatccaatacaactctacgtatattgatactgctatcgatgtaatctaacaggcttattaaacatgtacgctaaacatgtaaacatatatgcatatcattatactaatcttacctcgtttttgaattcaggtgtgccagtcaacctaagtggaacaactgtttgacaatttacaggcccctaaatcacaatatttgtaaaattgatgagtgacacgctaaatcacttttcgtggacttcaaatcaaaactaaaattttttctatagatgtataacatggcaatgccctaaatatcgtaaaaatggaaaaaaaactagggtagcctaaaaatgccccaaccggaatatcggttctgtggggtctgcttggggacgaactagaattttggtttctataggtctcactaaactggtcgaccggttcagtgtagaaaaccccaaaaacaccacaaacaccacaactcgatcccaaatgattccaaaccttctagaccacctactcgcaccacaataagtagaatctatgcaataaaacccaacaattaactcagaaactaaaaacaccattgaagagcaaaactttgagctctaaactcaaacttttctcaaacacaacaccaagcatcaataaccacttaaatcagcttaattaatcataaagtaacctctgaaatcacaaccaacacaacttcaattctataaaactctaacatcaaaaaatgcatgaagacctaaactaaaaaccatgaaaatcataggaaaaaggaaaggagcttgcttaccttaaaggggaacttaaagatgcaatcaaactttgctaaatcaccaagagaggagttgaaaaatctaggttggttgctagttacaatggaggtcgagagggagagagattgaagagagagaaagtgcttttcttttttgtttctaatttgttttaacttgattaaatcataacataaaactaatgtttatctaactaaaaatccgaatacactcactattactaatccactaaaggacaaaacttaattagggtgaaagaccattttgccccttgcctaagccaaaaggcatccttatcacttaggggtaatttgctcaaaactaatacctcaaataatctcaacattatcaatgtctatctatattgccccgctataactaaaatactaaactataagaaaatgtcattctatcggccaaacgtcacgttctaatgtggcgaggcataaaatatgaaaaacatgaaatttcatatataacatgaataacacacatagaattcaaatatatcaccataaattcataaatcagaatttaaagtctaattctgaattaaaccctaattatttgctaattctcatattaaaattaagcggtctttatattttcccattgtaagtgggagttcaatggtccctagacttgcaacactatccccagtaaagccacataaatttaccatacatggtattaatttcacatcttcaagcccatcttctttaacgtttctttgtaaagaatatttactaaactctccttgttaatgagaacctttttattcttttattcgcgagcaaaactatgacgaccagaggatctgtgtgcaggaattgcacatgtgctgcatcttcgtcaatgaagattatcggcgcttccttgggttttgcatgcttgaggggttctggcgcaaaaagttgactcttgatttttaacctagttaatttacctcttctaggcactattgctagttctagcaagatgtggtccacttgaaataaccagtatatcctcgccctcaatagggggaggttgtacattatggttttgattctggttgttgggttggttttgtccattcctcctatttctcacatatttcctaaaataacctcaagaaatgagtccttcaagcttgtctttcaattggcaacattccttggtagtatgtccaatgtccttgtggaaccgacaatatttatttggatcttgcttactcgttgagtttttcattggtttgggtcttcagaaagtgacccgattctcgtttgtgggaaagatattttcacgagtttcattcaaatttgtataaatagaatatatgggaatatatttctcatgtttttttttgttttttcttatcctctgatgaatcttttgatttgtcttttttttttctatttgacccattccccctgctcgcatttcccaccttcgttgttacagtactcacggtagcggtacttaagttgggtttatctcttgagcccgacttgagcatttttatttcactacgtccttcctctttttgtacaaagattaatgctctgtcattgtatacatttattgacctgactgggcgacactataaatcattccacaacttgcctcctacgattgacaagtccgtagttataccagcttggagtg

SEQ ID NO: 24633 - DNA, 1677 bp, Cannabis sativa
ggatgacaaaaattcaatgtcaataaaaattagattggatcggatgggtccaaatccattagatgtgatccaatgaacacccctaagtcaatcctaaatggtactgaatattaatagtgtctagtaccattactctaataatattggggttatttcaaaaatattcgaaaacaactaaaaaaattataaaaatacagttgtacagaattttaaacattttataatttttaagattttatttacagaaaataaagtcttttgatgtatttttatattgtactcttattattttgtagtttttttatatgtatattattttttatgttgtttatatttttattattttcacgtggttttcttaatttttttattattattttataaaatactataataattaagaaaaaaaaagttaaaagtaaaagtgtaaaaaatttactatatatactttatttatttggtaatatgtattatataggtaccacttgaaggatgcaatacttgatggaggaatagctttcgacaaggctcatggaatgccagcatttaagtacaatcaaatagataaaagattcaataagatcttcaacaaaggaatgtttgaccactctagcattaccatgaaaaaaatcctcgaaacctacaagggtttcgagggtcttaactcgatggtcgatgttggtggtggcagtggagctgttcttagcatgattgtcactaagtacccttctattaaaggcattaacttcgatttgcatcatgttatcgaagacgcgcctccatttcccggtatgtacaactataagagtctcaccatttcaataaaaaaaaatagaatatcaatatatttatgaagttgtcatgtaagattttttttaccaattgattttgcacttgaatttatgattttgagtttcccctaaccataattactactaaattgtgtgtccccaaatttctacttcattttacattttcctcaactgttataactaccaaattatgcatacatcttaattattcagggcacatatatatgcaactcatcaattcaataacaattcaagggcacaactttgtagtaataatatacttctaggttgtaaaatagttacaacaaatagtggtaatagttttggagacaaaaatcatttttatttaattaatattattaattgttattaataggtgtagcccatgttggaggagacatgtttgtaagtgtgccaaaaggtgatgcaattttcatcaaggtgcgtcttttaaaaacagatacaatttctctctttcaaaattatgatttatttttcaaaaatatatatcaaattattaatttttataacctacacaaagggtgtcacattgtagaaaattattatctgtattaattaatgaatatattgaaattaattacagtggatttgccatgattggagcgacgaagactgcttaaaattattaaagaactgctacgacgcagtgcctcgtcatggaaaagtgatggtagccgagttcattctttcggttgcaccagactcgagcttggccgctaagtgtacagcccatagtgatatgatcatgttggttgagcatggtggcaaagagagaacacagaaagagtttgaggaattggccaaggcagctggctttaagggcttcaaagtcgtttgcaatgct

SEQ ID NO: 24634 - DNA, 2592 bp, Cannabis sativa
ttgataaagtgcttgttagaaaaaattaaatcttgtgttttatcctttttctattctatcacggttgatgtaagtctctaattggatataaaggcacttatgtgggagagagatatgagtttgaactttgtttatagagacgaatatgagtagatgttatactagtatttggggtgttggggttggcatgagatttagcaccaatccacaagtgtagctttgatttatccaagtgatttgtaattttctataataattctaagctaataagaaattactttttgtgaactttgtaggaaacttgagcttcatatccaatccaatgtcagcagttatagctccgccactaccggatgtcatcatcccaagcctcccaaacgatctgtcattgaacattctagcccgtgtgccaagacagtaccacttggtcctctcagctgtatcaaaatccatcagatttaccctttcatcgtctcaactatacacaacaagatctctcctcaacctcaccgaaaacctgctctatttcaaggtctcctccacgtccctaggttgttgtgagaactggttcgccatctatcaaaagccaaccgtctcagctgaccccatttgcaatggccttcttcgatttgcccgactcccatcaatcccatataaattgcatggacatgttgaagctgttgtgggccacaatatctacgtcattggtggccactacattgatgaatccgattttatcataccttcttcttacgtgtggatactcaattgtcgctctcacacatggcagcaaggtccaagcattggaataccgcgcttcgatgcttctgtagccgtagtggacgagaagatttatgtgattggagggtggacggaggaatcatgggtagaagtgtttgatccagtgataggacaatgggaacacattccaagtccacttgacgggtgcaaatccaattttacagaagtgaaagttgtgaacggtataatcttaatcaaattacgaagtaataagaatgagtttcgactgaatccggagactaggatgtgggaggtgtctgaacatgatcagccattctgtggtcgaatggattgcaaggttgatggggtcacttaccgttgtgagagtaataataacgggagaatcgaatggtatgatgatagtaaaaggagatggaaagaggtcaaaggtgtgatggaagggatgccccggttcgtgtgtaatgccaaattggtcaatttgaaagggagattgtttatgatgtttggagaggtgagttatgagagttctacaaggggagtttacaagttatgtggtggagaaattgaagtgagtagaagaaatgaaggagacaatgttgatttgtggggtgaggttcataagcttactttgcttccagaagggccttggcgtatttctaaaccaagctctgaatttaaggttttgtactacgaaagcaaatctttttctgtgaagatttgaattggttgttattagtttttcctttattacaatggttattattattaggtgttgaagaattgggttttttggctcaacttttctgtggatgcttaattaatttaagctggtattattatttttcttaaatgaaagtatatattgatggagtaaggaagacaagtttgattaatacttatagctttgattctaacctcaagattctgaatattttttcaaaacttatgcttcaatatgtaacataatgaaaatatataattgtatctctatagaatatttcatcaataaaaatgcagaagagaatatcacaaaagcactccaataataataaactaaaagtcttaaaagtttacaaaataaataaaattaagaaaattcttatttatgaaattattttattctcacgcacacgcttggtctgaaataaattataaatatgatcaatgaagaagaagaaaaaaaatcttgtttttgatagaggatagtgtgagcaaaaaagaagagagaatagtaagggttaagtaaattatgtatgcattagagaaagaaatttatatggtggagatgaataatcgcgcgacccgtccttaatggattggggattttccgtcttggtgattaatggggcagtgatgaagaataatttcaatactcaaagcgaggatggagcagaagcggggataatactatctaccatatccgaccccgatataaatatatatacaattttctttttattcttaacgtatatatagtataattttaattattattcataatcaaaattatatatcatatgcttaaagatctaataatgatagtgaactgataattattgtagactacaagtgtaaatatattttcttcttgattcttagttttattattattctttttaatttggagacttgagaggtatgagtttatgatactatacttgggttatgatttttttgttttaattttcaaactttgagacaaatttattttttttattttttattgggttatgctattttttttttctttaactttgaggcagatttgtcttttattttctatggattatgaaggcataataaatatttgtgagaatattgatttaattt

SEQ ID NO: 24635 - DNA, 5525 bp, Cannabis sativa
  modified_base (2172)..(2174): a, c, t, g, unknown or other
  modified_base (2491)..(2493): a, c, t, g, unknown or other
  modified_base (2541)..(2556): a, c, t, g, unknown or other
  modified_base (3212)..(3218): a, c, t, g, unknown or other
  modified_base (3304)..(3307): a, c, t, g, unknown or other
gacttgatttaaaacattaacagatggatgtcctagacgcctatgccaaatgtcttttagggaatgatgattaacatgagtaacgggtggcttgttaacagcaacagcagaaaaagggcagtgaacttgtgtggctttggtgatgagttgagttgatacaattcatctttaagagtcccttgcagaaccactttcccgatgctttgatccttaacacaacaaaaatcagagaaaaattcaattgagacattattgtcagctgtcagttttgaaacactaataagatttttggatatgctaggtacatgcaacatattattcaacagtagggagtttgaagtgtttgttggaatataacctgtaccaatgtgtgaaataggtagttggctgccatcaccaattgtgattaactccttaccctcatattcggtcttggtttgcagcttgttagcatcagctgttaggtgtttacttgcaccactgtcagcataccatgagtcgtcattgagcatctcaggtgttgctacaagagcagataaatgcttgtcttggtttcctgcagtatttggctggtttcccatgtagctttcgtcatgggaccagtgtccatacttgccgcacacctggcaagttggtttgggaccagtgcttctacccccttgacctcttcctctatacctacctcctcttgtgtaaccagtgttttgttgtcctcgaccatgatttcgacctgtgttgaacctcctctgtcctcccgtattggatgaccactcgatccaagtttctgggcaaaatttgcagaggcatttcctaccaacttgctacttgatgagagaacattaagcctctcaagtcgactattgaagcttaacaacatactttgcagttgcttccaagtggtattggcctgagactcaatcaggacaacaatggataaatactctgcatctaaaccagataaaatgttagaaataagatgtctctcagggtaaggttcacctgcaagagctaaggagtcagcccacatccttttcatctttagataatctgccatggattgagatcccttaataaattgataccattaaaagtccatggacataaaatcactgcaccttatcttagtgggggaggattttaaaattccaattcgttattatttggatgacactagtgataacctactatgatatgtgcaagaaatgaactttaaaaataaagtaaaagaaaagttactctaaccattcatatagatagcaataatttatcagaataatgagcataagataggaaaatttccaatgtctattcaaaagatttaagcacatttcctggtccttatgaaatattttatggtatctctattgattacttaatctaaagcaaatattttacattattgttaatactagaatgctatgttgatggcttagtcaagaagaaatttatatttttagattaatataaaatgtcacaacaagatatccctaagtatcaatagtaagaggttaaatgcacacttgtgtatgcattaaaccagactcctactgttgagtgggagccatcaaagatgtaatcaaataaagaatatttggagacaatcaacaaagagtctctgaaagtgacctatatgttagatgataggggtgtatatatagaatctttatatctacattcacttagaacttaatatcagagatgatggttactctctaagggggtgaagaggaaattattctatagaagggtgtaaaaacccatctataataatttagttccaccagtgaagctaaacaactgagtttcttttgaaagacactagaaagttattcaaattgaagaaagttcttgattgttttatctctattccattttagatagaattagagatgtgtcttccataaatccagatgcacttatcaaacagtaaagaattttagtatctttagaggagtaatacatataaggaaaataatattgcataatattctatgaacacaaatgaagtaatgatggagaaagctattgcttatcacagccttacagttttcgttatttgggtatagtgaaacacactatacttgatacggatatcaagacaatggatttattgaaatacacttctagttttatgttagtgcaagtgggaatttgttgggattttatgccctnnntaaaatctatttcaatataatcttatttgctatcaatagaagattagaagtcatttaagttaacatgttattttcatgattatagtttaatgtacaaaatgataaatccagaacatatagttattcacaattacaatgatattattagagtggaaggtaagtgtgattatatgcttcaaagtttatgtcccatgattcatcagtgcactagatttacactgatgtgataatcaatgataaagtttactgacaccttggataagtgttatgtcctttataggatattagtaacgtatgctagtatcggatgtatggannntacattagactggaccgatattaaacttggataagatatcataaactnnnnnnnnnnnnnnnntaagtcaatatcacttagttgattttagatcaatagatcttaatcctgagatagttaggttcgatctcaactgtgttatttatgttccttgagttgttctttaaagctgaccaattagatcgaccaaatacttatatcttgggaacatggtagtaaaattgagtgggagcactaatcatagatacagaatctataacttctatattgacatagaagtgaaatgataattttatttgagcttggcttaatagagataaatgaaagagctcttattttggtaataattttagtttactgaaatatcatttataggaagctaagtattttaaggataaaataatacattgaggcatagaacggtaaatttatccgtgctcgatgtaaattatttatggaggatatttgattatttggattataacaatagataattaatagtgtatctatatcttagaatatgtagggtgttttatataattaagagtgcaattctaaatctatagtggactcaggagaaatgaataagttagggaaaatctatttattggaagcttgattatataggcccatggttcccacactcgttgagataatattggcttgtggactcagttaattatttttaattaactaattagaattctaaattagactannnnnnntttatgaattttcactaaagaagggcttaattgagaagaaaaaaggttttatggtttatttgttaattgagagactttgtaaggtnnnnttaataaataagttaaatgaaaattttatttgataattaattgtaattattaaataaatagatttggtatttaaatgtttaaaattaaaatattttatttgtgaaagaaaaagatgaatcattaaataaatggcaaaattgaaatttaatggagtccactaagtggccggccacttaagtgaattttaagccattttttatctttttttacaccatataatttaaacataaccctagataaaagcctataaatataacatgacagaatcataacctgataactgttcataagtctatgatctgttagaaaatagaaaagagagactcctctctaattttcaagttctcttcttctctctctaaatttcgtccctatagtgataagagtaccttgcccactcatatcaagtcagtacccaatcatagtgtggaagattgtaaagaattccaacacttgaaggagattcaggttcacctcttgttattactcagcgacagaaaggaataggggttagagatttaaacggaaagagtcatattattccactaccaccaattaaggttttctacaactttatatgtgtttaatttattattttagaaaattcatatttagggtgttagattaatagaatataatcatacttgttagtatatctagattctggtaaaataacttccaacacaaggtagtgtcgcgacccacctgttttaaatgacgaaaattagggttttaaccctactgagaggctatatagtgaaccctcttgacacgttttaaaccaacaatcattagagacgaaaattgaagtagaaagtagctattgagacttttatcaatatttttcagcgagttcttttcttctacttctttcttatgttcttaattaattgttgtgagttatttacaatgattatgagtagctatactttttattaggttattaatggagattgtttgacactttattttggttttaatatgatttagttcttccccaattttctatgtgtatctatttcattcgtatttaattacttttaattgcttgatcaccaattaaatattttatggtttcaatgctaaatctgggaagtaagtattgattatgctatagtgaaatagacacaaattttgatatagcatgagagtacctataaggtttgtgtagcatttaagatttttatgcttaatgccacctatttgttaaatttatcacgagagtagaaagttagcatgtagattgagatttataagtcctagttcgaatataagtttctttagtaaatccactatcacatgaaaatcaaaatttgagaataaaattatattaaaccaaataaagtatattcaatcaaaattaatcaccttatgctttaatcatcattaattttaccttaattatttgttttctttatttttttagcagatataaaatatcttttcttatttttaatgtcaccaaataaaataagaaatttaattgtttggtaattaattatagtccttctgggatcgacctcactcttgtgagtctattacttgtgaacgatacgtatacttacgtgctgaaaagttcacaaaaagtatacttagtttttatttttgattaagtatattttttgatttttttttttgaatgttattcaataaatatcatcattttcaattgaaatatatttaatttaagagctatcacaaaagaaaaatctttgaccatcaactttgtcaggaagattttctacacaggccacattagtatgatattgtttgctttgggcttaagttctcacagttttatttttggtacttttccaaaatgcctcatactaatggagttgttggaacatgtattaaaggaaactcgtgcctattattttgatgtaggacagattgataccccaacactcctctcctcaaaccaaggactacatactcgtgacctcccctccagcgaaaccacattgtgttgtcgctatcactaacgaaaaatcatgttctaaccataaactatttcaggaagattttcaacacaggccctaaacaccaatctccatcttgtaccgcgtcataatcatcaacgggacacgcttcctgattaccgcaatatcatgtagactttcaatacaagacaccatataaatagagaaattttcatggtatactaactttcgccatttttttacaaaaatactgccaggcggtattttttacttt

SEQ ID NO: 24636 - DNA, 2831 bp, Cannabis sativa
atatatatgtataggtatttaattatatctaaattttgatcgtgtgactctatatatcagagtgatgggtatagaagcacaggttgttacaatcttcattgccccggttttgttcaagtaagcaagaaaatcgctctaggagctctactaagacctctttccacctataacgggaagcaaaaaatcataactattgtcatagaccaggtatatatgtataaatatatatattataaataaacacatagatataataatatattgatttaatattatttgatcatgtatacatatatataatgcatgcagcacacggagaatggagaatggtggctgaaatatgggaataatccaataggttattggcccaactccttattcaagacgctaggggttaatggtgcggagatgttgagttggggtggagaaattattaacaacggggctgatggtcatcactcgagtactcaaatggggagtggtcattttcctgacgaaggctttggtaaagcaagctattttagtaacatacagtacattgatgcttctaaactctacaaagatcctgagaaactcaccccttatgctaccaagccttcttgctacgatgtcaatgtagcagatgacaagagtggtgctttaggcactcatttcttctatggtggtcctggctattctgacaaatgtccaacttaattaattaattattaattaaagatcatcatcataatatatcaattatatattattttattgtgttttgattacattattatagcttgtatatataatcttctgaatatttttatttgataagtttgaaaagaataaagttttgatgtacttactaataatcctctcatctcaattctcaactatgtgaagtacagaagatgtatttttttaaaagaaagttcatcaatattataataaggcacttcttctagcaaaccattcaaacaaaagacacacatcacgctaaacaattaggcaatcccaaccaccaaacacacggtaactcaggagagaaaattagttatgcaagcgaatgagcattagcaatattattaacccgcttacaatgaaataatgtaatagagaaaaaagaatctcacacaaaaaatatcataaaccacaatatcatactcagaaaaatttattttttacaacccacactttacaccaaacgagaatatcttcacataatgataacctatttgaagacagagttagagagtaaagcagccgctttaggaacaaggggttcaaaattgctaatcaaaagagtagacattgagaacaaaatccattggcatgagacaacacaaccccaagtctcatcgctcctgcttctgctcaaacaccagcatccaagatcacagattgaattgctccaactgaatttccatagacaacaccatccccaaaggcacaataatcaatgccaaatcactattaaggccatgaaattggacctcgtgataatgcataattagataatttgaagcccaaggccctaccatttcatccttaagaagatgatgctcatgaaccatagtattccagcgatgccatatcatccaacaaattataagtaattcttatactttttgtttacgaagcaacatcatgatacaaccaacaacaaaatcatagaaagaagcggccactctaacttaattctaaacctcgaatttccctatttttttattgttagaagtggattaataaaatttaatgagacatgtttcctactttatagaatcatatattaaaaacttataaattttttcttttaaaaaatattatctgttcatgaacttataatacatatgtttattgacaaattgatttttcttttatataccaattctactactttcaatacatgcaattctggtaaatgaattttataaaaaatagccaaattatgtaagaaaaaaaaaaaaccgtgagatttctctctctctctctctctatatatatatatgccttaaaagttatagttttatgtacgatcagaaaagttatagttttattgagcaattctactcatcctgaacatagttaacaccaccttccatgttcaatcgctaaaacaaataaataaataaaaaataaacatgcattaatgatgagtacaagcaatattctaccacttcctttagttgacaaatatcaaattattaatagtttttacctttcaaaatagtaataattatggtccagtatatatatatgtttgtattatgtgtgaacaccgcaaaataagtgtgcagagatcaagctcgaatctatgtaaccaccaatatttgttgtacattacaatcaaataaataaatggctttaattagagataatattacatggtaatattattttttatttttttatgaagctcgcggtaaatattgaatatatacattaatgtgtgacatattttttcttttcttttcttctcttaagcaaatgtgagtatgaaagcaaaaatatcttaattattatttttttaacaaaaacatatcaattattatatacattatagctatatgatgattattaatatagaaagaaaggattcgcaaatataaatataaatacaaacaagtagacaaaatggattgtaatgtgctttaattaatttgcatgttcctacaacacaaacatcatgggcattgaaaaaattaaaagagtcgttacaaggagtaacatagtactactggccttggcattatatgttctcattctaaatattgatattgcagatggaagaaggctacatagtttagagttaggcaaacgcaagggaacaatcaaaaccattgaggttt

SEQ ID NO: 24637 - DNA, 2032 bp, Cannabis sativa
tatcatatctttcttatactatgtatttatcttattcttagtcaaactatgaattttcaattatatattacatcataattaaatgctaaagcatacaactcgaccaaattaatctcttaaaatattatatacaatcttgtgagatattatgaaaacaatttaagtataaaataagtaaaatattttgtataatttaccctaaaaaaataaatatataattgcaacattgaaaatattaagtatataccattattaggagtttgtgtttgtttcttctcttttgagaagtgtagtttgtttgtatttaacgagttgattaatgaagtttttttcttcttgatcaaaaaaatatatataccattagaaaaaaatgaggtataaacatattatatttaaaaatattaaatatttcaaccatattttactataaaaataatgacaaaaacttagtaataataaaataacactataaatatttgtcaaaataaaatttaataataacgagactgattatatttttttgcatttattcgtgttaaaaactgactttaagtgttggttatactaacaaaaaatcgagtctatgttacatacaaacttaaaactttaggtacttacattgtagatattttttttcttatcaatatgttgccaatattgacacttaaatgaggtggcccattatatttttttcaatgtatttttataatttttttgggagtttcacgttttagtactaaggaaagaaagaggaacatacattgtatactcactttactttatttgttttaatttttacctctattttcatattctttataagatatacccacttttatgactgatgtctccattaattaatgtaaattatatgctagacttaagtagagagtaagaatatattggacaacctaataaaaaaataagtatattttaataaaatataatataaagatatttttgactaatagatataaaaaaaaaaatattttttaacttattctgaaaagaaaaaggtcatattattttttactaacttagtaaaaagtcttacattatttaaaaatacttttaagtgttattaatattgacacctactagccagtaagataataattaattttttaatttaatttatactaacaaatattataaatatatatacatttatgttggtaggtaacacattattggaaagtcttatcaaaacaacacatctcaactatattggtatttttaatattttcgatatgtaaatgaataagttgcaacttaatttaatttataaaacaataacttagaatgtccaaattagaatttaaattgctttttgcacacatctatcaaaataagcaaggtgcatacaacaaagtatttgaattaattgtaattttggtattataaattatttaaaattttgtgaaatgtttttttcaattatattatacaatgtcataaaaattgcatcatgtataataagagactgaatacaaagaggatagccagacctccaaaacaggtgccgacaaaaagcatacttaaccaaagtgtaagctgctatgttaacaattttaagacaatacacaagattcgctatattaaaatatctaaatgacaaactaaaataagtcctaattaagactccaataaaatatggttattaaatttagacaccaaattaagataatcagactaaaaaataaacattataaaagctaagtaaataacattattgtgaggcagcattccttagagccaaagcttatttctggcggcttcccattatcaccgttattataagtaatacaactaaaagaggagtaaactattatcattattgtaaagtcgaacctttataaatctctatgttcttatttgcttaattattcattattcattattattaactattatctatttatttcaatcatttaattgactcaacgtcgttgactaaaagtgagatgttaacaaaatgtatcctaaatctatcattttctctacaactctagtttcagtaatagcaaaacgg

SEQ ID NO: 24638 - DNA, 1849 bp, Cannabis sativa
ttcccacgacttttggagaaaattggcttcgttcctttttagtcttgtcccaccactaagaacgatgtcggaggttcatcttcgaacgaccacatctgttataagaaaatctaactgtatctttttctttattttttttttgggttaaggagtctttatttctttgaaaatactgatcaacagaaagaagaaatttcccatagtcgacaaaaaatgggcaagtaaatcttgccagggtcccaatttttggatccataaaattgtaatcccatgcaagttgtagatcagactaggagaccagttttcttgtttcttctttgctaagtgaatcgattttgcagtggtgattcttcctgctgttcgtgcaagtttggagtcaaatttgttgttgatgaaacgactaagaagtaagcgatgcatttggagccttttacacaagagtaaacatataattgagctttacctgggtcccaaatgtttagcctatcatcttgataaattaggtcaaaaggttttcttttgtgggctggaccttgaacaagatagaagggggtgagctttttgtgatatggtttagtgactcattggaaaagaacagattatggatgattctttccacgatatcatctttcagaattccttctagagttggtttctctagtgaagataccgacttcccaatcagtggtgataacctcttagaagcgatttaggtccttgtcggcggcggtaacctctcagaagcggtgcatctcttttctggtggcgggtgtagactttctagtacattgattgatccttttgttaagagtagcgacgactgcaatcccagaatcaccagtcgaccagtccttgtgtctcgtccattctaatgatgaatcaagaatatcttcatttaagtcgcctttctttgtctcttcttgtcaatactaaaaaatcttctcatataagttccccttcgtggtatttctgaacatattcaagatcagaagtttcaagtcttcccaaaggaagattggctgatgccggtaccaagtccaaggccttactctcgaagctattcgttgttgcttccactgtatcctcattataaatatctagaatgtgtaccattgttcaactctatgtagccagtcgttgggggtctgttccatcatatttaggaagccccagttgttggagtcgcagatggagctgttccgagccaagctctttgttcatggccgattctctctctttcctttgtttccaaagaagttttcccatcatggagatcatctcctccttgaccaattatatttcatcctgaacaacgctgatcatggagctcagtgtctcctctcttcccaataggtccttcggccattcttggacgttcttttctacaaactttggtctcattttgtcttcccagtcgtaatgctcagataccaatactctaatgttttagttatattcttgaatgaattagaagaagggaatttcagttataacaaagaggaagttacaaattttcgaacttttcgagacactttggtatctccctgagtgatcttttactcactttcttgcgaaaaagttccccccaactccatacatatactgtctcttaactattttaacaacttaggactataggatagctcaatcaaagccactagagaatatgacatctcagcctctaaaatcgtagtcaattatgcaagcatctattctcttctatgctttagccagccaatgctaaacctcgctctgataccgatttgataggaatttatctatcaaagatgaatcttgaattgaatctgaaactacttctcttattgcttattgaaaatctggaggatag

SEQ ID NO: 24639 - DNA, 2718 bp, Cannabis sativa
cgttcaggtcttctatatgcccccgacttttctggatttgatgagcatgtcatctacatatacttccctgttacacctaatctggtctttgaacatcttcttgactagtcgttggtaggtagccccaccattttttggtccaaatagaataactttgtaacagtacaaaccaacatctgtttgaaagctagtgtgttcttgctctggtggatgcattcttatttaattatattgcgagtaggcatccatgaagcttaggatctcatggctgctgtagcatcaaccatctaatcgatccttagaactggaaagtaatcctttggccatgcattttttaaggttagtgaaattaatgcacacttgccatttcttattcagcttgggtaccagtatagggttagctatgtaggccagatagaaggcctcaattatgaatctgtttactcaaagcctttctacctcttctatcaatgcatgtgcccgctctttatctatcaatcttcttttttactagacgggatgaaagttggatcaatgttgagggcgtgagacatgacacttggatcaattcagaccatgtcttcatgtgaccaggcaaaaatttcaaggtttgctcttagaaattttatcaaagatgattttatttcgaggaataaacccttgccaattttaagtttcctagtcgcgacatagtaggatcaatctcaacttcttctaatgctttgactggatcaaaattttcacttagttccccaaggggaggatccatatcttcatccgcaccgtggggagacccctattttgcaatgcttttacccttctcttaactctagctggatctttcatccttttcggtctcgtttagagcatggttttagaatttcctgtagtcctttgattccctctcaaacaacccaccccattaaaaggctttcaaatcatatagagttggacggcccaacatgacattaaaagcataaggaaaatcaatcaccaggaattgtgccattaaagttatggttatcagagcttttcctattatgagtggtaggtcggtatgtccaagtggagcaatgctctagtcgaagaaactgtacaccaatttcatgcaaggaaccaagtctccgagctaaagccccatcttctcgtatgttgcttttaaaagaatatttgaagaggctccgttgtcaattatagtccaaaccattttatttgcaatttgttcgtcaaccaccagaggatcattgtgcgggtaaataacatatggtcagaatcttcttcattaaaggatatggatggttcttccttgcacgtttgtttaggctttctttcttccatgaccatttctgttcatgttgtagggtcgagcatccctctctctagctttttatgagcttccatcaaagtgagggtctttaataatcacttgtatgtgcccatccacaggtgggggtatcaactaattctgattattgtctagtagggtggccctctgatcttggtaggtatttacatacttttgcaagtgcgagttatttttcctgatgagaaatttaatttctcattttagattattgcactcattagtatcatgactgtagtccacatagtagtacccatatttggtggtatccgtcttgttgacatattttttcatgggagaaggtcttttgtacgacaacatggactgtgttgtcgtgaagatggattctatatcctcggtgatgatagtaaaggcagtgaactttgaggcattctgtcgaggatgctactttgagttatttttgaaattttctttcttcctattgccttgttggttaacattattcaaccttttaccacgttgactcaaactactgtggttttaagaactctaattttgctggaaagatgtattggcagtaatggtgtgaaactgacttctatcctgaccaactgtatttacacgttgaactgcttcttcaagctttataaatccatctgctcgatctaggaactctcccattgatcctacagtgagtctttttatgtcttcccatagttctcccacaggttcaataccttctaggatggtggccaatctcctttcttcggttatccatttccattatggcctttgtcataaatttgctaatgtaggttgtcaaaggctctcttgatacttgttatactttcaccaagtcctctaattgagatggatttttcctagaagaggagaaatgcacgtggaactttgccatgaaggaataccatgagctgaattttcctagagctatcttgaagtactaatattgtgcagcctctgccaaggtagctggaaagattctataccgtacatctccttttactacatgcaagtccattttcattttgaagtatttaaagtggggagtggatcttccttgccggtgtacatttatagtgttggcattttgaacatgggtggcaaatcaatggtgttaatttcttatcagaagggtgatcccctagtccaatcaagttctaggttcgtgaaatttgggctggttaggctttgtacaaggctcttaagttgatttatttaggcttgaaccactagatcaacttaacctgcctattgaccgacctgtgtcacttgtggatccctcagaacattaccaggcatataattgtttacattggtcggttgaacattgggagggatgtattttccatcatgtccccttctatgattaagat

SEQ ID NO: 24640 - DNA, 3662 bp, Cannabis sativa
ttctgggagcgtgtatgagagcttttggaattacggaccaaagcactcgcaggaggagcttcgtggataggaaagcgccaattagagtcgactatcagaaactcttttaggggaaacaactagccatttggaactcctttaatggaggaaggctagctttcctgaggacccttcctaaaaggacaagaaagccttctagttaggacctactttcgtgagtcaacaacttttagagaccttttttattttggaggaactattccacaaattccacctagtttctttaaaccaaaagtatggcgatgataaagaaagaatgaatctatcatagttggtgtttcaggattctcagtatactagaatctgagattgatcaagtccaagcacagcttgaacttgtttacagttaataccttagccccattagtaggattatctttagatctgacattttcaaattcaaccaatccttcctctatcttctctctaatctaatagagttttatatctatatgtttgctcttttcatgatataatctagattcttacaaagattgatggatgattagccatccgaatacatagtcactccccctttaatttgtttcaattcataaagaactccccaaagccataatgcttccttgaaagcttctgtagtcgccatgaattctacttccatggtagaaatagcaaccacgaaatgtaactagaccttctaggttatacagttcctgtttgtaaaaaaatgtaggaaatggttaattttctcgtatctctattcgaggcatagtcagtatccacgatcccttttaactataattctcattttactttctcatagatcagactataatcctaagtgtccttcaagtaacttaataaccatttgaggaccttccaatgttcaatgcctggatcggacatgaaccgacttaggattctagagcgtgagcagtccggtctagtgctaaccgtacattaaatatcctaagaccatatcatagggtacatccttcatttctctttctcctttgaattattcggacactgttccttcgataaaataaactgtccccctaacagaacggatgtactccttacatcttccatgttgaaattttgaataacttttcttgatgtacctggactgctttaggctaatagtcctttccttgtagttctttgagactttaatgccaagtatcttttgaactggtccaagctctttcatttcaaattctcttttaagtttggcttttatacttttgatcatagatttatttttcctcatgatgagcatatcattcacatagagcaataagaacacgactgtagattgctctagattcttaaaatataagcaatgatcgtatgtagatcttttgaacctgatttgttgcatataagcatcaaatattttatttcattgccttgggaattgtttcaaaccatataaagatttattaagcttgcataccaattaaactctttttctttcaacttgacacctaggtggttgcttaacatagatctcttcgtctaagaatctattcaaaaaagcagtcttaacatcaagttgttcaacttcaaaatcctttgaactgccaaaaacaacatcaaccttattgtcttctactttaccataggtgagaagattttagtgtagtcaattccttctacctaagtaaagcccttagccactaacctgactttgaactgcattggttcattctcattgattccctcgattcatcttgagaatctatttgcactccacaatatttttgttctgtagcttcaacacaacaacccaaagtcctgttctttcagagtgaatccatctcctcgtccatgacctgaagccattttgacttgtttcaacttgaaattacctttatgtagcttctgggctcttcaatttaaatttgttgtactactactagtgcaaatgcaatcaattctatctctataaacctttccaaaaggtgaatcactcttctagtcctatcacacgctaactgataaccttctagatctatctatccaaaaccttttggaacctcagtttggtcttcattatctttcagctgcgcatctgcttttgtctacgcatttatcttatggttccatactagcttctgtctatgaacattcttctaggagctttgtttcgtaattcattccacgcttgtagtatttttgtttcctatttttcctacatcgcaaggagacacactatctttctcagatgtcaagtgaggtattctaactgaaaataacatttctagtaatcgctacttttggtctactccttttggaaatgcaaattctataccccttggtacctaaggcataacctaggaaattttccttagcagatctaggttccaacttgttactagattggtgtacatgtgctgtacacccaaatattcttaaattcgttatgttgggggttctgttgtaccacatttcataaggtatttttttgtctataattctatttgggcttatatttataaggtaggttgtgttgctagagcttcccccaaaatggtttttctaatccgaaactgaacagtaaacatctaacattattcaacaggattcagttcatcctttcagcaacactattttgctccagggtcttcactacagatttatgcctagtgattatgaattcttgacacaacttgtcaaattcagagttaataaaatcccacctattattcgtcctaaggttcttattaattttaagatttgtttggttttctacctgagtttttgaaattctaaactgttcaaaacactcatccttagttactaaaaaataggtccaaacacacctactatagtcatcaactatggaaagaaaatattacttactggttaggcaccttgtatggctcccaaagattgacatgcacatattcgactatctttttagttgtatgtcttgccagagtgaacttcagcttatgttgttaccctaaaacataagcttcacaaaatggtaaggcacaagaatttaaatttttaactatacattgtttgtgaaattctttgaggccttgttcactgatacgtccaagtctatgatgtcatagttgcatatctgattctagccctttcaccatggtggcttcttcggcttggataattacatataaactattgatattttcacctttcatcactaccaaataacctttggtgatccttaagtttccgtgcatggacttgtatccgtatccttcatcttcaagcgcacccaggggtgtgaggtttcgtttgagctttgggatgtgatttacattcgtcaacaccttgattctaccatcaaattgtttgatggcaaccttcttggttccaatgactctagatgaatgatcagtccccattataactttacctccatcaactgatctataataaaaaaaaattgacttgggcacatgcgataagtgcacccgaagtcaagaatccactccctattcattgaagattctgagatggagaataattctccatctacagagcagtcgtcactatctttcacgagtgcagctgaatccttcctgtggtgatgttgcttgtccttcctatatccattgtgagatttgttgaagccttgttgctctttgtacttcttgtaaaaa

SEQ ID NO: 24641 - DNA, 4417 bp, Cannabis sativa
aaaaaatacatttacatttcttttaaaaaaaaacttctctctaactctctcactctccgacattgaatcccgtcagaactcctattagcaaacacacagactcagaaccccagtcgcaagccctcgccgttgtcttctctcacaaccactctcgttttttgccctttttttccttttagttttctaattttttacgatatttagcgatgtatttacaatgatagatcaaatctgatgttagggatgaagtttagtgatgattagcgatatttggtaatgttttgcgtatttagcgatgtattttttatgtgagactaaaaatgcacagtatatcactaatcatcttgaaacttggattcaaaattcattagatatattcaaaaaaaaaaaaaaaagaattcattagatagttaaatctatcaacgaaaaaggaaaaaaaaaaaaagaatcgtctgtgattaatttgtaaaatttataatacaccaaatagttattaagttataatataatattttagtaatttaataaatgctacgataattattaaatttatcagaagaaaaattcattagatagacatcatatacacaattactctggtccatgagttaacatttgatgaaaacataacacgactaaacatcaaaatatataacatcatatataccaacaatttacagatactaataataataataatttgtattgatttcatttcattttacactcattttctcttttattaatgggaccgcatcgtccaaggaagaagaaaagtatatataatatatgtgtgcgtatgtagatgtatgggattttggcggcagcaagtggagcccgattgaaacgaagcccctgagattacgccacatggatgagtgccacgtgtcatgtattgccggtattgacggttgaggcactccgttgtgtccctgggcggaggaacacacatgagattgtcgacgcagcccttgtcgggtgccccaaccttccacacattttgtttggtgtagaccccacatgtgtgtttcacgactcccattctctttttactctgttttaacatgttatccttgtccttatatattaatataccctaccttcattcatttcctaaatattatccactatccatctccatcttcctttctcattgacttaattattttattttcttttataaaacaattattagaagatgatagctaggttaaggaaattcaaaaaaaaaaaaaaaacaaagcaaattaaacctgtctttcatgttataagagtatgttgaaatgttgcttaaaagtagattgacgtcctagtaaaggtgttaaatttccacacattattaataatgttgtgagagtactctaacattttattattatctcaattgggatcaaataatttctttatgaagcacattaaaggcatggacgtaaggtaaaaatatatattattcaagaaaattaatgaactttcaattgaatgttttatattatgtcggaatcttagtcatatatatgcatgtacttggaaatgttatgggtctagttcatttttcacaaataaagaattactataaactgaatttatacctatcatataatttatttcatcaataatatcagatgtacttaattgtgttatgtatttaattataatgatcacgaggatgataaactaataacaatataagaacgcttaattaccaaattgtctagctctccccaacacctaaaaattgatcagtaccttattatttattcctaccacaaagctgacaaaaccaaattggaaatgtggtaattaagaaaaacaattctgttgaaaaaactaattatagctagctagtagtatgtattatgtaatatcaatacatgtaaatttgaaagatatacctttgtattattagaagtaaataatattaattaggcaaattaatatgcttgccaactgttctccatacattatatataatgtgcattccatacagaaacatttttcctgaaaagcatggatcaattccgcaatatttatagctatacataacatacatatatggctagctatagtcctaataataaagtggagttttcaaattagtacatatagttactatatagtttgacccttcaattgtctatgggaacccattcaattaattaataaccatgtgcatggttgctcttgcttacttttcgtagtgtgaaaaaaacaattatctaggaaaacacatttgattaaatttactaaggacacgtgacatgacttgtcattacaacacgaggaactaaggtgcccaaccgtaatgacatgaattatagagtagacaatttgtgttattgtatcgtgttgatatgattatagtacacgatgtaaatatggagtacacaatattatcatttataaacgtatcaaatattcaaacacaaacacaagaaatttgaggcaaaactttttatattttatttttatacacttaattttctttttttcttttttttttttttaaaaaattccctaaaatttatttttctttgtaaatttaagatttcagttagatattaccgtcaaataccaattaaatttctactgtacatcgacttcgaggttttactattgtatatacacaagtgtatatatatatagtagtcatctaattaatatttaacactaatatttaactaacgtgtcaaatttacaaagaaaaataaacataaaagagttttgctacaaaaaaataaaaaattaaatatataaaaattaaaacataaataaatttcgccgcaaattgttgtacaattaattaccagatcatataacaggaccgaggttacatgtacttattttatacttatactgaatcaaaaaggtgtcccctgctttttgaacgagagatcgatcaaaaatttaaaatccctctttataatagtcaaaagggtaagatttccaaggtaagaaaattaaaaggcaggcctaggcaagagcaaggaacaaggaagcataagtgcatgtaattaatggaactgatctaatacacaaggacaagggaatagagtttcctcggtagaaacgatttgtcagccactatatctatatataattatacatagcttaccaccctttcttgattttgtaattatataataatcccacttaattatatattcattatatctacctttaatttatatatatattccaaaaactgaagcaaaaaatctctttgcttaactagctataactcatcaccaatatcctttgatcctctctatcatatatactatatacatatctccaatatttgtattttccttttcaaagatctctgtgtaatgggacccagcaacaaggaaaatgttatagtcatagattgaggtaataagggaacaaaagtgagcccacccatattttcattttgctttcctacttctcattgcccatacaaatccatgttctactaggaaatcttcttaattaaatccatgagtagtgatatccttgcatttaatgctgctcatcaataagttttctcatcagctatcccacattattacatatatcatcatttctaaccacgaatactgatcacaacaaaaggcaatctatatatagttctctccatattaatagtatccatatatatatataaataattatgtcaatcacttgctcttgtattctcgctctattccttctatgccttccttttcatgaatgtaatgctaggatgcttcttggtgatgtcttcaacaagaaatcaaatgagcatgagcagttctctactaatcatcaggtaggtacatgaatatatatatatatatataaatattgtatatatctttatataagatcaacttttctcatattattattatatattcatttcaaatctgcagaaggatcagtcagtagtagagcagaaagagaaatcaacctcatcaaatacggaagctgatcatcatcaaataataagtactagtgatgatcacatgatcagtaaaactaaagatgttatggaaattagaccgaaagagctaatgaagaagaagaaaggaaaaggtagtgatgatgatgaagattataataagaagtcgggtgtttcagtttcatggcgggtgcctcacaagaaacgtggtgaaaaacaaccaggctttaacttggattattcacctccaaagacacatcctccttctcacaactaataattaaaagtacctacgtaccctttaattaattattaattttaattaacccctttttctttttcttactcttaattagtttctttttctagtactacactatatagctagctagctcatgtactcttcaatgattgacgcggtccatgatgataatctttattctctctctttgccatgatcatcatatcttcgtcaagttatatatttatatatat

SEQ ID NO: 24642 - DNA, 5584 bp, Cannabis sativa
aattccgatattgatgaagacctcagggagggaggtgaggaatccgcgggtcagagttggggaaagctcagcgacgtagaccggggcaatcattagggagtagccgacgcctattccggcgattaatcttccgacgaggagaattgaatatgatggggcgagacccattaggatggcgccgattaggaatgtggcggcggcgaggattatggtgtaacgcctccctatccaatctgaggtcttgcctgaagctaaggaaccgattaaggaacatacatttagagaaccaaccaaaatttcaatttgggtcgatgtgattttcatgtcttctttgatgaaaagcacagctccactcattaccccaatatctgcaataatatacaaaagtaagatcaaaaattgactttatgggatgaaattctatagatttttgtttttaatctggaaaactgaccatagcctagtagaacagagttggtggaagccaaaatggcaccagcaagagcgtatctgttgattggtgcaattttcctgtgagaaaatgaagaagaagacccttcatcttcaatgtcttccaggcttattgttttgcttattcctttttctctagtaccatctttttggtgaagggcttttgcagatgatggtgataaaagagattctgattcaggaggaaaaggatgataaggattgtcttccttgttaggatccagagaataggggaatgacataatcggtttcggctgtaggcaaaggaaaagtggcaaaaacttttattgacgtgtgtcgagaacaatctgacctcacaggtggtgatatctatcaacttttctcaaatgtttctgcactatataatatgtttcaaaaatgataattattacatttcttcactttatgaaatgtgaaaaatgactctattgcttaagttttcctagtttgaccattatcatgggtagtaaaaatcttcttgcttattagtttgttaaccatgttttgaaatactcaaaaatcttcttacttgtgattttgttaaccatgttctgaaatatttttaaatgcacattcgaaccaccttgctaatttaatacagcaatcagatttataaaaatacttcttttccttgttcaacttgtcattaaactacaattttcttttttcttcctaaataaaaggaagcaaaattgttataagcactcttcctccccttatccacatgcctataaatatggtttcatactgagaaaatatttaaggtaataatgtatttattttgatcttaatggtaatcttaagaggattgtgtggttatttatatctattttgaagcatgaaacaatatttccatttaataatgtaatgtgataccttcttattagggaaagaggtaagcttgcagtgtaccaatgacaaaagagcaggtgaaataatgggacaaagtattctacatttctccagaagagaagtagagaatgccattgattgtttatttttttcctttttttattaactcttttacaatggcacttttctccaaaggtggtggaatgagcacgcttccaccacacgctcctaaatctaaatctcttcatggtggtatgcaggtggcacttgttaaaaggttatatggacactatcttaagtggaccacttacatgcagttgtagctgatattaaaactagtaatcagaaacaggtacgacatgtgcaaaataaacagactatgatgattgcttgtcgatccaatttttattcacaagaacctgcattgtatttaggtagtttatgtaacaaaagtgccaaatcattaatgtcaatgagatccggtaatccctttcctaaagagcttcctatctttgactcagcataacaaagagatttcaaattaaaattgagtactttctttcttgaatcagcatctacagctgacctttagatacttatcttatggaatcactgggtatttaatacacaataaaatattaagattaaaatcagagaatttgtgattacaaaaaaaaaaaaattagaaacaaatgaatcctttcgtagttaagattatagctaagttattgatgatacatagtgagttgtaaccaaatttattgtaaattataaattttgttatcatctataattaaagaaaaaaaaaagtattttaaaggttatgaataaaatttattttaaaaagatatgagtagaaaactgctgacaataataactaatttttaaagactttataagtatacaaaacaagcatattcttctaatttatgaagaaacaataagatccgcataggaccattacgtgagtaatagttattggatatgagagttgtaaaaacataaaaacataatgtgaacacagcttgagaaggaaatattccatttcctacccccaaataaagactgaatactagaatagaaaagaaaagaatacaggtcttatcaataaactcacaactattgggattttgagacccaaaaagaaaaaaaaactattgggatttggatgtgatctgattggtgggcttatataatgcaatataaaacccatttcgttgttgttttgtgcttggacagctcaagtcaagatgccccctttgcaactttgggtttgggagaccttttatcgttttgtttctctattacttaatatgacctcttcttcttcttatcaaattctttttctgtaaaaaataataataagtaaaacattacattatattgtgcctcattattcacatttttcatagctacaagttacatctgttgtgaacaatcaaggcactagatgtcaagttcacctaaaacacaaacactaagaaatatcttttttaaacactaagtggattaacaagttcaagctcagtacaatgctttacttctcagttggagcagcaaccattaatatttttattaaacaccaagtgtgttatagagttacacagttcttcatcaagaacaatagataattacaagccttagtagtatttataggcattagataccctaacagaataaactaactctccctgtcgagctacatttgtgcagttgtcgctaacaactaactgtcagttgaaaacaatgactagtaacttgtaaccatcttagcaaatccccaccctagtttcaagttgctattgcttgtaattacttcaagtagtgctgctactcctcaaccctttagggctcgaatgactccaattccaatcagctttaggcaatgctcaaatttactgcttgacgctgctttagtaatcatgtctgaagttttcttctgttggaaccttggcaattttcacagcttccttctccataatttcccttatgaaatgaagcttttatgtctatatatttagtacgttcatgatgcacacaattcttggttagttgaattacactctgattatcacaacgcacagtgataacattttgtttaagcctcaattcttccatcaaaccagtcaaccatagtgcctttttgatagcttttgtcaaggccatatattcagcctaagttgtagacaaagtcactaccttttgaagatttgctttccaactgattgtagtaccaaacatgttgaaaacatatctagttaaagacttcctagtatcaatgcaccctgcataattagaatgcacatatccattgatcacgttcaagtacctcaaaatctatttcagggtctctcaatgttcttttcaagggtttcccatgaacctacttaccatgcttagagcatgtgctatgtcaggtctagtgtggaccatgacatacataattgatccaactgcactagtatatggaatctttgacatctctgccttctttgtttcttctttaggcatatgagttgcactcaatttgaactgttgtgcaagctgagcggttactacctttgagttacccatttcaaaagtgtctagaaatttttggatggaacttttctggttcaagtacagaaacctttttcttctttctcttttgatgtccatgcctaaatttctccttgcaaggcacatatccttcatttcaaactctttttaagttggagtttcaagtgtttaatctcttgcatactcttacttgctatcaaaacgtcatctacatatggaaagatattcaatctatctcaattcatttctctgaaatatattcaaggatcaaacttgcttcttttcaaacctatcttagtcacatactcatcaaatctcctattccattgcctaggagattgcttcaaaccatatagggacttcctggcacaccatgtgttccttttcaacctgttcaaatccttcaggttgtttcattaattttctttcatccaagtttccatacaaaaagacagtcttgacatctagtttccctaattctagattttgacaagcaactagtgtcaacaaaattctaattgatttgtgctcaacaacaagagaaaatacctcattgtagtcaaccctttcagtttgagaaaatccttgagcaaccgaccttgctttataccttgcctcttatacaccaagaatgcattccttccatttgtacacccatttgcagtctattatctttacatctttaggcattagtatcaagtctcaggtgtgattcttgttcaaggagtgcatctctttagacatagctccattccatttccttatgtccttctcattgcttgtgcgtagctagtaggctcttactgcacaatctgattagcaacatgaaatgcaaatgcaatcaaattagcatgcacatacatggcaggtggttttacctctctccttattctatccctagttgtgtttcagatcaccttgttcaaaattgtcttatgaatcatcactcatgatttttaggtatttcaatctccattctagcaaaaggctccacctcaagctcagctccctatgcttcaatttcatttttatcagatctagttttgttcatagcaggcttgtcaataaatcccataacagcttcattgaaggtgacatccttgctaattatgcactttctcattcctggctccaaacaccatagtctatcacctttgattccttctagatattccaagaaactacatttcaaaacccttgcgtcaagcttgtcttgttatgcctgatatgttcatagcacacacatccaaacaccttcaagtgttcataatttgctaacagtcctaaccacacctcatctagtattttgaaatttagtgttcttgatgggcatttgtttatcaaataggctgcaattgtaacaacttctgcccataacacttctagtaaatcagcactcaataacatgcacctcaccctctctaatgtggtattgttaaacctttcaacaagtccactttattgaggagtctttctcgctgacttgtgcctagctattccttcatcattgtctattctaagcctttttactttctttccagattgattttcaagcattattttccaatgtttaaatttttcaagcacctcattcttacttttcaaaataaacacccatagttttcttgaaaaatcatcaactattgatagaaaacacctgcctcctgagtgtgatgatgtcctt

SEQ ID NO: 24643 - DNA, 5630 bp, Cannabis sativa
ataatgatcatatgaaccaaataacaaattaaacaagtaattgatgattgaatagaaaaaatacattgaaattgagttttatatagggcacgaagcccaacaggttaccgaaaagtgtcgtagtatctttttggataggctttgcccccgacatgattattgcagaagccttcatgcaattctatcaacaaacactccttctcttagtgacacaccttaggagcgacattaagaagcctcgtctatacattactctgtttaggattagatacctagcaactttttttctcatcttttttgtctcatttttacttttgggcaataggtgtcatccaggttggactgtcgtcctacatgttgacttcttcagggatggtaatgctacattctttcaagaattgtattggcacgaagtttgccttgtcggcaatggtgttgcttgtcagacgagcaagtgcatcagttgttgcattctcctctctagagatctgccttattgtatagcctttgagctgacttaacaagtcttggatctggctcaaataaactaacattcttttcgagctgtgtattcacccaagacttaatttacgtctcattgagagtcactgtatatgcccaggtagtcagctcgtacttcatgtgctagcttgaggcaagcaattagggcttcatatttagcctccttgctagaggctttgaagccaaacttgattgccctgtgaagttgttgcccccaagtgtaatgacggcaatgcctgcaatggaaaattggtcagtgcagcttccatcaacatgcgatttccatgctgattcttcaagttcttactgctactcttactctcgcttcttctttggatcttgctcttctcccaaatcttgagagattttggtagataggtttgtacatttagccatgaagtttgtaagggcttgaccttttatggccacttttggttgatatgtgatatcaaattggctgatttcgatggcccacttgagtagtctgccagatgctttaggtttttgcaaaacctattgcaatgggtggttagtgtacacccttattgggtgaggttagaagtatgaccttaactttcttgatgcaaagagtaagttgtatgtaagcttccccatgagtgggtatcgactttcaacatcgatcagtcttttgttgatgtagtatattggatgttgtataccttcttcttcttctcttattaagacgaaactcactgcttgctctataatagccatgtacacacccactcttcattatccagaggttatgataggacaggaggttgagccaacaattttttcagctcttggaatgctttttcacactctcttgtccacttaaagtttttgtttcctctgagtatgtcaaagaagggcacacctttgtccatggatatggacaaaaatttgcttagtgtaacaatatgtcttgtcaagctttgtacttctttgattgttgtgtgcgaattcatgtctgaaagggcttggatcttgtccgagtttgcttctattcgagcctacttcgaatgaacattagagggggttgattttgatgttatactcttagaggatcttgaagcattcatctagatcctccacatgcccccaacctttttaaacttgactagcatgtcgtccacgtacacctccatattgcgaccaatgagatctttgaacattttgttcacaaacctctggtaggtggcctctccatttttcaacccgaagggcatgaccttgtagtagtataggtctagatctatcatgaagcttgtgtgttcttgatatggtgggtgcatctttatttggtttgtaacctgaataagcatccatgtctccatatgaccatgcaaagatcatttgctcttagaaattttatcaatactgattttatttttggtgctaaaccttcccaattcttcagttccctggctagaaaggtgggatcaatgttcacttcttccagttcttttacaggtccaaagcttttgtatgatccacaaagcgaggatctatgtcttcctccccgctttgggctagacttcattgccctttgctgggctcttcatcagagctcttatttggaatcttctctttcttggctttggacaaaaccaagttataacagtgacaggcaaattattggtctcccctcaaacatcctaccccatgccttgttgggaactttaggcattggtggtagatggatgttactgcctttaggtaatgcaggactagttaacctatcataacgctgaatgctgatggctcgtcaattactatgaactatgccatcatcattcttgttattaggttttctccaaccgtcagaggcaatcagatgtaccccataagtgcaatgccttgtccaaaaaagccatacattacttgtgtgcaaggtgctaacttgatcagttggtgccccatcttttcatatgtatatttgaaaagaatgttgaacgaggctccattttttgccatgcacctaacaacaatcatattctcgatctttgtagtaatgacaaggggtaattatgcaagatgttgacttgggcaacatcttcctctgtaaaaaagatggcagcctccccaagcttgagttgcttggggcctctttcttcaaccgtaaggatatcgcttttaggcttgtgacgaagtgttcgagcatagcattccctagccttgctagttttgactgcaatgtggtgtccaccaattatgacccctaaatgacccgtcatggaaggtggcatatggtctcctttctagacagcttgtgcttgagcttggtcgttctacacataatgatgcaagtggggattgttcttctttataaggaattcaatctccctctttaggttctgacacatgttggtgtcatggctgaagtcattgtgaaatcaacataactttgacatgtccctcttgctcatctcccttttgataggaggggccttcttgtatgggacagtgccctaagtggccatgtaaatggtctcagggttctccgttacgaggatgacctgtacttctcctccttctccttctagttttgtggcgtgggagaagtattttacttcccttttttgccactattccatctaaaactgttttcattcgaggaactccttcatgttgttgtttgagatcctccggatatctttctagaattcactcaacaaaaggatgcctctcagtatggacgtatacctggcttcttctgttaggcctttgaccttggtggcctcagccatgaacctatggatgtaatccttcaaaggtttgccttgtcattgtttgaccttgacaaggtcttccaactatgatagtgtcagtctggtggatgagaattgagtgtaaaattctcaaaaaaatgtaacaccctgacttgcagggacgccacgtgtgtacttttacaaacttatttctgactaatcttttagtttaggaaaagtgtggtttaattaaaaactttttgattaaattaggataaaactatcatataaaataccactataatatgaggatcccctgtttataaaattcttttacaacaagttacaaaactggtactacaaaagtagggttacatttccaaacatagaaaaagggatgatccttcttcttagaagccaagaccccatggaagatatgtacatcgttgggagacctctgactcattataacaccctaattcattaggcacgctatccaagacacaaaagaaaccctaatccccttaacgggattactaataaaattagcgtggaaattaaactttaataacaaacggaaagaaaataaacttgtaataatttaaactttacaaactaaaagttacatgtgtcgggatcccaaaaattattttacaaaacattattacaagtcctttttcactggccgacctaggcggcaaaacagagtcacaaaatgcatcactggtagaccccaacccgcttggtctagtgtggctcgaacatgtacgttcgtcgtccagctcccatactcatggctgatcagaaacagctttaccctttcctgcatagtagagcacccgtgagccaagcccaccaagacagtataaaatatcaagaacatgtttatcatactatataaatagtaatgtcattctcatatgcctgtgtgaaacagacctgcatgttacgctcacatgcctatttatgtctacgtgacttagacctacatgttgtgctaacatgtctaaatacaataaggccttagaacgatttatcttggtctagttaccgagtcaaacctggttataccttgaacacataaccctaaatcataacatactcatatatatatatcatggcatagcattcatacaacatatatcactagggtaataaccctaggaaattaaaccgctcatgttagggtaataaccgtaatccctgttactgattactcacatatatcatttccaatataagtgtcactgcgcataactctacatgctactactgtcttacccgatgttcgggaatagtagagattccaaatccccgagtgaccctgaccaagtgccggtaatcctagtcacaattttttttttggattttcacaaatagggttaacccctgattccatactcataaaatatatatatatatggcatttaaacatacagataatcagatagagctcagaacgagctttccaacgatatatagaactcctaaaatggagttcggatcaaaaagttatgcatattcaaagttggaactcaaatctgcccaaaaacttgagggcgggccgcggcatgcaaaagccatgccgcggcacctgggacaaactttcaggttccatcaagaggggcgggccacggcatgctaaagaccatgctgcggtacttgggttccaaacccagaaaccagcaagcttttacacgaatttcagcttccaaactcaactaaactcattccaattacacccaaactcccaaaacacaaattagatttgctaataaacactagagagtcaaaatacacattcatacatcaattctaacaacaaaactctctaaaaataagattcaagaagagctcaacacttgagcataactcatgaagaatctaccatcaaaaccttaaatttacaagcatattcaacctcatattcagcagcataattaacaagtaaagaccaagtttcaagcattagaagcaccctagaattacatccataattcaacaataaaaccaccacaagatcaagaaattaacactcaaacctatcaagatttaacacccactcctcctacatgcaaatgaagaacaagacaacccaaaacatgctttttccttaataaactcagcaataatttcagtaagaatttcaaataaactcagtagaaaaactaccttaattttaagctcaaagatccccaatctcaaagcttcaactcaagctaatttccaccaattcaaacttgaaattcaaagagggtttgagagagagtgagttcgagtaagaggaggaagaaaccagaaaataaaccctttttcttgccaaaattcattttgttaaaattcaataatcaatgccaacggacaaaaagcccctaaggccaaattaaagcatac

SEQ ID NO: 24644 - DNA, 2149 bp, Cannabis sativa
agtcatgtaaaattcaaacctgcaaaagccgattcatgggcactgtttgtttaagatcccaaataatttcggaaacagctctaagctgactagaagtaagagagtatggaagagatttcaccaactttttggtgagactagaccattcctgcatataagcagcactgctttctggtttcctatacttatcaagtaatccctctttctcaaattgcgtaccaaggccttcaagcatttggaacaagcggcctagctgaagagattaacaactgttttcaatcaagagattatttataattgcacaacaatactgcatgtcaacattataaattccatcgatttcagatctaaaccaaaacatttctcaaaatctgtcaaatatgtgtcaaagttagtgaaatagattctgcaacgataccaaacaccatttaaggtaaaataaaatcacctgcaagtagaagaactcatcaaatataagcctcctccgagccaaattagcctcattgatatcctttggctggtgaatcccattatatgcctacagcattgacaaaggattagtgcaatgaggagaattatgatgcacagaaagacaccaacggatgcacataacatgaatttatgatcacattgctgcatacacccacacatagattttccttgttcaatgtaagctgctaaacattactcacaattaaggtaaatttttctcgaaaaaaagaaaaaaaaaacaaatatatattatatagtgctgcaaaataagcttccaactctctttcagtctctctctccctctctcactctccctcttcctctctctgtgcagaaaatgaatgtttatgagtatggaggaagggagaagaatgaagatgaccactcaaaaaaaaaagagtacaataaataaatagaaatgatagaaaaattctattggctcacatgtgttcaaaattgtttcagaactgaaaagcattttcttataaataaagagaagaaaaagaaggaaagtaaaatttcttgagatgacatatatagtcaaattaacagaacatatagatgaaaaggctaaatttccaaaagaaatgaacttacagcataaagacttggcagtccaaagtcttcaacaatgcttctgggaatgggatcaacatttgctggcaaagcttgtaaagcactgtcacgaaagaggtgggcggcagaaagaagttaaaaaaattacagtaaataagtgcaacaaattaccaactagtcatttcttaagtggaccaaaacaacaaagagggtagaactcataaaacaagaaagtaggccactaaccctactgaccaaataatcctaaaatttcttaaatcacgtacttatttagtgtcaaataaattgggaccttatccagaaatatataaataaataaattatatgaaaaaatacagtcaaatagtcagccgacactgtttaagagtgcagaccttcaaaggtcggtgatcaaatcatactgaaacaataaggtgatcaaatcattcttagtaagttaatgctacaattcttgacagtagtaaagaaatttgagccacacatctaaaatggaattaacaacttcatttttacatcccaccttgccggacaggattcagccatcattcatgcaatgatggcccttcaagttaaatgcatttatagaagttacccatatttgatcccatgactgatgccaattagaaaaaaataaagtgagacaaaagggaaatgactagagagaaaaggtcaaccacggcatgttttatacaaggccaaaaacatgggactcttggacgaagatgctgccaatatgagtggccttgctatgcttttacatttaagctaaaaaaaggtacaaaccttgcaataatgtctctcaaaaaattaggttttaagcctccttttgaagggtaaatgggatatggccttcctttcgcatgaaatgaagaatctttgtcatcttcaagcacgtcaatattatattctctcatctcataatgatttttggtactcatagtcctcacctaaaataaagaagcaacatttcacacagaatctcaaatgaaatttacacaaaacaaataaaaactaaacactcgcaaaaaaaaatattaacaagttataagagtttgataac

SEQ ID NO: 24645 - DNA, 3821 bp, Cannabis sativa
  modified_base (229)..(230): a, c, t, g, unknown or other
tagagcaccacctcctgtattgacaggggatgatattttatctcaattggactgaattcaattttgtttgcctgaaaaacacaaacagttcaggggtgtgaaacggaagcattctactgaagagctaaattggtcaaaaaggagtatattttttgaacttgagtactaaaagaatttgtccttgccacataatctcgatgtaatgcacattgagaaaaatgtgtgtganngcttagtaggtactcttctaagtatcgatggaaagtcaaaggataccaagaaggcgagaatggatttgtaagacttgcaaatacgacgtgagttgtggttgtatgaagatcgaaatgggaagtggaaaaagactctagctagttacacacttattgttcaagaatggactaaagtagcagattttataaattctatacgattttcagaaggttttgcagaaaacttagacaaaaatttaaacttggacaccagacagatttttgggctcgaatcccatgattgtcatgtgttgttacaacgtttattaccgacaggtatccttaagtacttgaaaaaagaaatctgagacacaatcattgagttgtgtgtgtatttcaaacaattatgttcaagaacacttaatgtttctgatttggaaaaaatacaaaaaaaaaatgttctaactatttaatgcaagttagaaactattttcccaccagctttctttgacataatggttcacgtagttatgcatctccctaaataagccatactaggtgaaccagtgcagtacaggtggatgtatcccattgagcagtcaatgtctatgtacaagtaatatgtcaagattcgtgcccgtccggaaggctctaatgttgagtcttttgtggttaatgaggcatcaaattttgttctatgtacttctgagaagtggaaacttgattcaaccgtcctgaacggaaatgacatcatcccaaacatgtcaactcgacaattttctttattcaagcatgttggccgaccactgggtatgaggacagtcgacacattaccaatgataagcaagcgtaaggcaaagtggtacatattgaaaaattgcacaaaggttgagtcgtatatcaagtaaatataaatttcattaacaataagtaataatatttgacttcatctcaaaaaatcttaacttaccaagtgcgttttgatgtagtgagcacaaggagttgcttcaaacaaggggcataggcaatattaaaaatgtgcaaaagattgagtttcctgaaaggtttaaaacttgagtaagcattgttgcctctaaatattcataatcttgttcaccctaactcttgaattttccttaataactgtcattttttttgaattatagattaataaactatggttgagctatcatgttacagtatcagatgagttgtatattattgcaaacccagtgaatctaacaatttattttaatcctgggtgcatagtgaacggcattaaatttttggtgaaggaaagagatgataaccgcaaaacacaaaatagcggtgttatggtgcccggtgaagatggacaaaatttctatggcacacttgaaaaaattattgagttcacttatttaaaggaatgcagtgttctcttatttatgtgtaagtggtttgacactaatgggagtagaatgaatagtgatggtgttcttactagcatttgtgtcaaccgagagtagtaccaaagtgaaccgttcatacttgcatctcaagcaaaattgatacattacattcctgatcttaagaacagtaaagactagctgattgtgaacgagtacatcccacagaatgtctgggatttccctaacgatgatggggatacatcctttatacaagaaaataattcagttgaaactcagttagttattcaacttcacagttggatgatgttgactactttcaccatgatgtgaacccaactgaagttgcaaatatccattgtgtgaattctgagcctcaacagttagatgatttcattgtcgatgacaacaacgagggtctaaatgaccaagacgataattgcttagaatcggagagtgatagtataataatgttgtatatgtagctgatgatgatgatgaattgtaattgtaatgatgttttaatatgaataacaatttcatatgttcttctttaatatgttgtgaatatagttattcattttaaatctgaaaataagtgttgtatatgtagtatgtctacaccaagtggcagctcttcgaaaaagaaaggggtaagaggtaaatacaaaggcaaaagtgttgagaaagcgctttccaaaataccggctgccaaactacacaatgaattgcatgaagaaacgggcaccccagtcggcaaaaacagaaaaaagttcaacaacatgtgtaaatggatggttcgtatgtccatctccataaataaattcaaatggaaagatgtttctagagatgaaataaatgcattgtgggacagacttgagttatttcgtaatttatttctaaatttataatttcgtatattattcttaaatttctaattaatgtactaatgtaaatgtgtaacttttttgtagataaagtttatgctcccgcgagattatcttgcgttcgtagactatggtgagtacaagatgtcaaaagatttacatgactgacggtctgattataagaagaaataaatcgaaaatattgaggagcttggacaggagagggcagacatgttacctcctgatggagtaactcaggaggtgtgaagtgattgtaatgcttactggaacacaaacaaacaaaaggtacttaataaaattattaattttagtaatattttacgttatataatcaataataaataattagttgtaagaaaaaatattaatttcaggcaagagcagcaaaaaataaataaattcgaggtaagatgaaacttcaagaaggctggggattaaagcctattgtttcacatgttgtcgctggggtaacttcatataatatattgtcattgataagtcttattttttttgcaaaaatacaataataacactttttttttctaaaatataggttaaccccgggacagaagaactttcaactgttgtggaaacttttcaaatgttctaccataaagataacaattagcgcaacgaatatacgcaacaagcttatgtaagtttacctttatattgatttctaacagtttatttcaattttttgtattttaactaactatttaatttatttgtttgttttaggagcaaatggttgaattggttgcaagtcaaccagtgcccactgaggatcagcctgatgagaccgctgtagacccgacaaagatagtacccccgagacttgcctgttatgacacaagtactcggggagcgatctcgacatctaagaggctttggccatctcccaagattgaagggagttggggccaaaagagcacatgccatgaattcttatgctcatccgactgttactatggaacaatacgaggccttacagaagaaaatggaggaagtagagcagacaactcagtatacaaggcagcaatataaaacacaacaactctacctcagacgattccaagatcagtttgagtatctctctcgggctgtgccaggtttcaacttgcctctgatggttcttccaccattccccactgctcctagtgctggattgtcatcgtatcctcccgagactcagagcaacaacgacgatgacattacttgtctttagaatattacatattttatatcacagttagaactttaccttttttttccgaacatcttttaatattttg

SEQ ID NO: 24646 - DNA, 1214 bp, Cannabis sativa
taatttacctgaatagggagatttgaacaagagtgttcggccaccacatatgcgacggctccaccacatatttcctcaacagccccgcccaaccgtatcctaaaacctgttaatattaatatttccaatataagaaaacaacctaataacaattattaattaaattcacaataattttatacaattgataattaaaaaataaaatataaaatagaagagaaattaagataaaagacctgggtagtgatgatgagaagccaaccagccaaaaaagaaatcttcttatgataaaaggctttaataatatcgacaatcataacagcataagcagaaccatttccaaaagcacttcccgcattagcaaatatagatatcaaaacatgctccttaatgttaaatgggcctgggttgagtgagaattttcttgacccaaaaccagggattccaaacttagtctttggaagtacggaagccatgaaccggcccactggaagggttgccactaggactgtaatctgggtcaccaccagtggctccttcctataagagaagaactggttcagaaacgacagaagaatgcaagagagaaggcccaaaaaccacatccgaaaggtccatacgggcaacgacatgtcgtccgtgttcggtacggtcaaccgaacctcctcaattggtgagagctcatcttcacttatggaaatctcctggtttatttcttgagtactattattctcatccattggacaagaatgttttttaaagaaggtactattaaatgtggactctaaaccaattgataatacttatatatcaatcatagcaggcattctacgatttcaatattgtaaattatgtagaatttttataaaaaatgagtgggatttaattataaatatatattttggaatctattaaaaaattgtagagaatgcttgaagaggatgataattaatagaaccttttttttggatagattaatatcaatgaatcattatcaagagttgtttccatcgatgtatgtatcccttttgtatttacatgtatgacaatcacaatgttttagaacaagaagaaaggggacggcgaacacataatttgtatttggttaattagtaattttttttccatgaactttgacacgtagtaaattgagctcatttaaggacttttgtctaatttcattcaattttaatgtttcatatatttaaccatgc

SEQ ID NO: 24647 - DNA, 3320 bp, Cannabis sativa
agagagagagagagagagttgtaattttctgtaggaagttgtattgctgtaaggagagagagagagagagagagagagagagagagagagggtttatttgaataattaggaacatcttcagtatcaccaacagaagtccaaccgcaaatatatacatattttctaaactaggatcccgcataaccctacaatatttgaggaccaggaagctatagcaattgctatataggtatcttggagggactagaacctcagaccttgtggtagcaaaccacgtgcctaaccatttgagctacctctcttgggtcaaatatctgaaaatattattattctttctcatcaaattatgagcaagtttacaaatattaaaatcttgaaccaagttttccccggatatattattttaataagaaaaataacactactgttggacaaaaggagacatttactacaaaattcaaagagcaattcatactctaccatttactgcaaaattgtatctaagaagtgtcaatctttgtaaccatgtgtttttaatgtgttcaatcctttcatggataaatgtcacttattgcccaacagaaagaaagatttcttacataccccaaacaaacagtattcctccacaatttaaaactaaaactcagtgatatgtcatctttcttgcaacatttttttaggaaataggaccacattatatatggcacgaagtctggaggatcctagtgcaaaggttgtgtgcacaaatttctttaccagatcataagtaatttggtgatttgatcaccctaaattaacatctaactgaagcttaataaatctggcttaagaaatactaacctttttcctttcttgtcgaatatttttccttttactttgcttcatgtccatcaagaactcatcaaaactacacagcagattcacaaaaaaaatatgtatgaataaatgatttttacaagtcacaagggaaacataataaagttcaaatacatgttgcaactagataataggatttgattgttttgagaatataatcttaagcttcatgctaaagcttgaaacagccatatccaaagaatcaatgggtgcattgtgtgctcaatagcaccactgttccacttccatcaaacaataatactcaggctaaatgatcaacagcaagagctagaattgattattgagccaaaacaccaacttagagatagggaaaagaattggcaaagggttctcaaaaaagatattgcaacaaacatctgaaaggatcatttatcccataaaatgcagaagtttttaagcaaaaccactaagcctgttgtcagaattgaaatactacatatccaacagcttaacattcaagtacagagccacaaaaccgtgaatcagtccacggatgatcaattttatcatatcaatttcagcctattgctaaacagggtgcttgagcatacttgacacacatgagatttgctcattgggcattttcatttacatcctcatctgaacactatccctgtactaacttcaaaagatgtgaacttttttaactatgaaacagattatgtaaataaagggtcattggtaatctctagtattacatccaagtcagcagcaagaagctgtacctttctaaaacattgtatagtgtgtaaacataaaagctgacacactataatgccacaaataccagtcacacagaagcactgagaacgagtttcttaaattccttgttattgagagtccaaacagccagccaatgtttttaaaaagaaaaatgatgttaatttaccatttcatattaattaaaaatggtataaaatgaatctgcaagtgaaataagccccaatatctatattggccagaaataaacacaatactataaacaaatctgtttggaacaactcacctcttatagttaaggttcttccagtgatattgcattccaatcctttgcagaaaacctttttcactcaatttacaccattcattttccgatgggaaagtaatgtgcaatgaagaaatttggaactgtcaaaagagtgttctaataagaatggtttgatgaactagcaagagtgaaattcttgtcacggcaatgaatacaggaatttttattcatgcatggtaacctatctacatgcataacttgtaatctttcttttttttttattttttgcttaaccctataatatttggggaccaaaaaattataatagtcgatatgtaatctatttgtgaactaagaagatagaagcttgctatgtaattaaatggtgtgatatgaaacaacttatataaatcaatgatgattattggccatattgcattatcaattttactgcaatcacaagaaactgctctagagtagatccatgctattgttacaattgtcactgttctgacaaatatctggaagaaccagatggtgaaagcgagagaaacagaaactattcagtaattaaaaactatataaaatgggatttaatgcatcagctattaattaacccaatacgtattgtcaaaaaaaaaaccaataccttggctgtcagatccttcaaagcagagatcaaaatttcaaacacttgatctttgaacgaggtattacagactaaaatccttggaccagtaactggagtaaatggtacacaacattgcagtttaggatagtatcttgacccaaaactacggtaagcatcagcccaagaatgatcaaaaacaaattcaccataagagtggctgcacacccaagaaaacaaattaagattaaagcaaaatataaataaatattaaatggatgtaaaaactgaaatttgctttttgtatagacaaggaggagacaaaccttttaaggtagagtggaacagcacctacaacattatcagattcatccttagcaatgatatgacacggcatccatcctgtttcctggtgttaaaatgaatgattaattaagacagtgctgtatctttgatgcttatctcattctaataataatagatgagctctacaacatacaaaaagatgcagtaaatagaacttcttttgaatacataacaataaactgatataatctttgtataggaaaacaaaaaagcagttgtcagtacatgagacacttgtagagtagaacagatcacaatttgaaataccaattactaacttactcaatagtactcacttggtgtaccaaattttataggaacaaaggaagagagaagaggacattaacatgacccttaaattgaataaccatatatccttgcatgaaaatatctattaacattgtttcattttccctttttgttgaaccagtttagagtaga

SEQ ID NO: 24648 - DNA, 2276 bp, Cannabis sativa
gagttttgtctttcctacaacttagtaaatcgagttgcatgttacccccagagcccttgtatctacattctttacctagaaaacttagtaatttctcttctacctcttacgtaagagagtcgattgacctcacctcgagttcgagtgacttcacctcgagttggccatgaatcccgaacacatccctcctggggataactttattatatctcttcctcaaactctaagagtcctcgagagagtcctcatgtgagatacgctaggttgctatctgagaagggcgaccatttagggcgcattattaactgcaatgagcgtctggaaagagttcagtctgaaattcatttgatcttgagagggagtcaaccgaccaaattgctgaccccaaagtatatttatataggcttagggtgtcattagttgagaccgagaacaagttattgcatcttgagaatacctttcctctagagccgacctttcccatttctctatttttcccgatgattgcaagatgaagttcaattcttccccatttctttctggattaccccaaattaggacctaagctttttaaatattcaaaagaaatagcaagtgtgaagccgctcttaccatcatttctttctgtttgtaggtatgcctaagaagaggtgatccctagtttgtctattccatcaaattcattcactcatgttgatgttcctagttctgttactgccaatgaactttgcaacattaacgcaaactactgcattctgtctaacgcctcttaccttttattagttgttggcgacggggagtggaccactcatcctgcggctggcagagttgcctttagtgagtagttgcttacatgcagtgccacccttctccttcatccatttctcattacaatgctagcttacctcagtattgctcctctctaattggctccgatttgctacataatcttggcgtgctttgctattgccttcaaggggtgaatggccgctttcctctagtagaggagttcgacttgatctataacattgcacacaacacctcagcaactaagacttattattttggtgggtgagtgctaaggacgttgaatgctgattgaggatgccctctaaaattgctatcaagacatccagatcttcgttgttgaaggcaggcctcctagcgtcatatctgagttttgatttttcaggtgaactttttctactcactttcattatcttcgttttgttttgcttactttactccaggcttacgcttcacctcgttattatagtcaccaagaatattcctaagcttagcactgattctcgcagggccttgcaaaagttctataacctttcttatgttgagaggatcgctaagcatctatttactcctaccaatctgaagaactctggtttagccactattctattcccatactcggttctagctcctatcccaaatcctccgtcctcaggcggtcatgatgctccctatgtcaaaccatatactcatgatggggaggaggaagatcaagaggagagggtgactctgcccaaagttttggctgtcattcgcgagggtacggctctgcccactggcttaggttgcgactctcgtgtcaaaggaaagaagaaaaggtgtctcactctgaaactcagaaaggagactccatgcctcctcctccttcaaagtctagaagacctccggaccaagatacataagcctttaaccaattcaaaagagaggcgtcacgcactctaccttgaagctcttaacttgcacctcttcaaccttcccaccaagtcttctctttgtgatattcgttgacctctttcctctccggttgggtcgggggagcaggataattgggtggagcctgatttcatatcttctgatatcctagtggatgatattggggtgaacaatcccatggatcatgacctgcagtaaggctatcactctcaaaggatagacggtatttctcatggcagagcaaaccaggattgtttgggatatgcctctaaaatcttgtcagaggctttcaacccatagctcttattctagtcttcttatggcatcaaccaaactttccctccttctttcgttggtgttgacgacttggcctggtcctaatctcaaatggggcactcttcgagtgggtacaacgagtatcttaggggaatatcctcctcaattacgagcttggcttcacaattcgttggaagaagaccactgggaagttgtgcttcgacactctatatgggttagtacctgcaccactttcattt

SEQ ID NO: 24649 - DNA, 2552 bp, Cannabis sativa
cctgttatggctgaagccataggactcaaagaggtcctgagttggcttaaaactaccgattacactcaagtggtggtggagtcggattgtcaagtgctcatcaatgctattcaaaacaaagtaactatgtattctccttttggtttattagttgttgattgtgtttctttgctgaatgttttaaggagtgtcactcttaattttgtgaaacgatctgcgaacaaggcaaccaactgtttggctaggaatgccggttcttatgcaggtcgtagttatagtggggggcttgtccctatgtatttgcaagctattattgtagctgatttgcagtaataaaacaaccttttttcaaaaaaaaaaagaagccagatccctgaggctccaattcccgtatcaaaatttattacacgaagaaaggcataagaatgaagtaatcaccttgtgtttgtgactaaatcatcccaagaaagaaagtctcacaaaataaatcataagttatcattacaaaaaaagttgtgaaaatgactaaagttaccatcttcaacgagtcttggtccttttctggataattgaggttgagcctagccacctccacagctgagcagatcttcttccaacattggacggaaatgagagttggtatgagaagttgacaccaacatagtatgcatagtagtaaaatggacttgtggcaaagttggcaccatccaaaaatgcagttataaagtatacaaatgttccatagagttgacccaatgaaatggcaaattgaagaatgtaatttatggctttcttgtagctattgcatatctgcacaatgcaaaatcaccaaaaccagtttcagggtaagagacacatgaatctaaatgcatacatatactgttttaaatgagagtcttgagtaagtttcttatattacagaaaaaaaattggaatcccatgtaattttagagcaacctacatggtgttacaccttaatattagtctcattagtataattaattaatatttagaagctgagttgtcaaattcttagggactttaggtgggctattctatagtcttaaggtgattaaatagtttgagggagacttggtataaataaagggttgatcagttgtaacaaagtgagtaaaagattactggaggagatgccgaactgtctcgaaaaagttctggtaaaatactcgaagataaacaaatgaaaggctttcaaaaaatttctcatagaatcgagaatgaagttttcattttgtgtatgccagatcatgaatttgtaactgcatccaatctcttaaaaatcccaattgttttgaacttgaaactttataattttctctttgatacaatgtctatgttctaattctttcaagaactatactagaacattagtttatcacatggctaatgaatcacccccttttgtaatgacaaatctctctatgttttcttaagaataaaatagggatttgttcatttttcatggtcttgaaggcgtgtagaaacatataagaactctttaatagaagtaaaacgagttacatttggaattgtttcattagtggaaataagatttttatgctatgaaggtattcaagtgggatttgttcatttttcggggtcttgaagggtagtagtagtagaaatacacattaatggaagtgaagcaagttatattttagtcgaactaggatttttatgctatgcatgtattcaagtgggatttgttcattttttaaggtcttaaaggggcgtagaaacacataagaactctttaatgaaagtaaaatgagttagattcagatttgtttcattttttgaaataggattcttatgctatgcaaatatgtaagtggagactcgaacttgagacttagagtaagagcaaatacgcatggtagaaagcaatacacatgcctaatcacttaagctactcttcttggatagtttcaaatcaaaattagacaatatggaaagcataaaacaaagctacaatcttacatagctagaagacaagctggaccttcaagcactgcagttagtccttcaacagcaactatatcagaagctcttgttacatatcttgaatcgcctttgctatattctttccctacaaatcaaaaagtgatttatatgtatgaataaaactattaccaaacaccttaaaatcaccttcaaaaaagttggtcacttacaaacttcagctaagtaacaagcagtcttattcttgtaaagttctggagaaaagacaaaatatccctcaagtatcatgtgggtaagtccagtgaatgcccaccagcacattaatcatctttctaaagttgttatcttttttgttttacctgttcatacatatggatatttatacaacaaatcttgcaacaaatataaatttttgacgtggtcacatggtagtcttttagatattatttatttcctttccaagaaaatttgacacattggttagaaaaacaatacttattcaatcatttggagccctttactttactcagtataaaaaacaacattcaaagaccatctcaaataaataa

SEQ ID NO: 24650 - DNA, 4103 bp, Cannabis sativa
agcaaattcttctcaaacaatccttacttccatgtggttttgcgatcaaatcacgtgtatggatttaaattggtatgtttgaaaagttttgattctataaatatatggtttagttatgaattaagatcaatattttatgctagttatgattattatttttgcagccttttccgaggaaatttgcaatccaatatttagagggaaaggctaaagttatgagtctatgggttggtgagaaatattgggatgtgaagttaatgcattttaaatcatcatatgagtttggtgctggatgggctgcatttgcagtagaaaactttctcatgccaaaagatgtgtgcatctttgagctaattaacaacaatcaagctgagatgaaagttcacatatttagagaaagcggtttggctttggctttggctcaagactagtaacttttggtttgttgtaactatgcaagtcacaagaatcattttgggagcaatgacttagattaatttagctgaaggtttttcttttgatgtgtattttagaggttattgtgaatttatgatactattgttaagtccccaagtgatgatttctctacatctcttggaaatacactttcccaccccttgtttttatataaatattttactagtgcaagcttgctttttcccttaacactataattaactctcttaattttttttgtttattgaaaattttaggaaaagaaaaatgaacaatctttaatttaaatttagtaaaggtgattttgaatttgatatttttgtaaatgtagggatgtaaatggggcggggtgggtgcgtggattgctctcccaccctcatacccgcttcttaaattcacccaatacccgctctaatacccgtttaaattaaagcgcggttggggtggggattacccgacgggaaatgattctaatcgtgtacccattacatttatatttttgaaaaaaaaaatgatgtctctaagagaattaaaaaataataatcataaaaccttagtgaaacgataaacttaagtggaatagtgtgtatagtaaaaaaaaaatatatacaataaaaaacctaaagcatcaagttattttaattgtagtagttatgattttaaaatttaaatatatacatatatcatatcggggcgagtatctattcccccgctctcgccctgtttccgactcgggtataaatttttaaacccatacccaccccgcccccgaaagtcaaccaggggcgggtaaccgcgggtataattaccatccctatgtaaatgttaactatgaagcaaacatatgatcgaaaatatttataaataatttaaattgttaggatcttaatcctactccaatctcaagctacactcactagtgatggaaattaggtgagtaataaatgggtaatgcacctctcaacctcgtccctatttttcatatatgccccccattcctgtctctgccccgattaattctcaatgggttcggggtaggggaatcctagaaactcattaggggtatctattaaaattaaaacaataataataataagaagaaaataatataatataattcaaaataaaaataaaaaacaagatattaactttaaaataaacaaatattctacatattaaaaagtctttattacacagtaaattagagaagattaacagtcaactttgtaagtattgccaataattgtaatatgtagtaattagaaagctatatgaaaagtttgaaaactatatatatggatcgaatttgggatgggtagtatcaccctcgaccccgccccgacccgcttcgggtatataaaattgcaccccatccccaccccattacccattaaggcaggtaattcgcgccccatttgggatgggtacccatcctcatgggtcaaatttttatcactacttctggcacctatgaagtgttgtttcttcctcgaaagtacctatattctttttttaatgaagacaaagaagatgaaaaattcgaatcgtccatctgatacttggaagatgcccaaattgataaattgtcaacctaggcgctggatgcccgggcactgagtgctccaggtgctcaaaaatgaacttactccgaatttggttttgatgtctcaaatatgctagtggtatgtgtagttgatatatcaatgcaaagtttgacccatttgcactaagacggtcccggaaactgaaaccctagttgggaataacaacttgggcgctgggtgaaaccctagatgcccaagttagcttacgggttgcatgttcgtgtaatatcagctcccgatacttggattaggttgctccatgtcttcatgacacagaataatgaaagatagtgagtttgattcaagttattgaagtccaaaattccatcccagagcttctgaagtcaacctaggcacatggctagggtctcctcctaggttgactgctatgactcgggtctacttagctctatgatgtcatccttcttgtcacatatcaaacattgatgcccacattaccagggaatttttcgggttaacatttgccccccaagtcaactttatacttgtgtggatttgacttgatgatgtgaaccgagcccgtttcacttgaaactactagttgggcatcaattttgacaatcttaggcaattgtttctgttcttcaagtatttccaataaaattaggactttagattcccttgattagtccttggaaatttttcgaaaattaattatcaaagaaaaagagaaaaaaaacttatttttttcacttatcttttatctttttctttgaaattttgaaattttcttatatttttcatggcattatgattaattggatttgaatcctaatctttgttgatgatgccattccaaaattaaagtagaaatgaagaagagaaaagacttttgatcttttgcttattatttatctttttcttttaaatctctaatttttctttaattttagtagcattaagaatggatgttaccttttaaatttagaaaattatatccctattgttataggaaattcaaaattcacaaaagggaaaagatattcaagtgttcttcatctctaaagtagaaattcaaaatttactttaaaatagaagggaaaaatattttcttattgttataggatctccatatgtgtacattaaatcaaaacaataaagaatttcaaaccgaattttttatacaacgtggcgcggtataagtaatttgtgcagtgtaagcgatttgataaaccctactttagagagtaaattgcagattttcctaaagtaaatgtgacatgctagtgatctgattgaagattaatgttaggctattatgactaagctaattgcctaggtgtagctgttcttaagtgtcagtatcttgtattttaaatttctgaattttttttaccatttctcatagtaaagttgggttttttcacagagataactagaagaagaaactagaggttctctctgtaaagactttcttttttttccctttctttctcagattggtttcctaataacttgtttgcttgattttatttttaatgtcaaccatggtagatttaatttaagctctccaaaacagagcaacctgattattattattattattatcactctatattaaaaaccttgttacaatatgtacatactttccgagtttagtaataataaaagtgctacctttttgttttttcagttgaaatctgctgtattttactgtcttgaaatggtattgtagctagaaattgggatgttttatgtgtttatgctaaaataaactcaagtgttttttgtaacattcaaacaaatttccaacttattgaactggtttcaacttctatttatatatgaattttaactttttaacatgaaaataaacttacccatttcacagaagaaaaaaaaaacgataaataatgtttttatgatttgcatgcattttcccaagaaaagattatggaaattgttaaagggaaaaaaacctttctcatatgtttggcatcatgggtttgatgagtttgagtttgatttttgcatgtggactaataattaattaatgtcgtatagaagcaaggatttttctga

SEQ ID NO: 24651 - DNA, 3845 bp, Cannabis sativa
  modified_base (1593)..(1613): a, c, t, g, unknown or other
caaaaactcataattcaaatctaaacatgaattggaaccataaacaatcgaaaaagaatcgatcttttagattactcttacctgctatggtagcattatcccatccttgtaatagattaccaacagcagctgcaatagccacaagaacagctccactcatttttactttcttctcagtccaaatctattatcactttcagattatataacgacttattcaccgatcgaggatggaatcctgtaaggacaaacaatatacgtcattaaacgattattgggttatcatctaagaaaaacccaattgcccaaacacagtaaagaaacaaactttaccctcagattggtttaaagcaaatttgggatttccaagaagacacaccccaaagctttgtaaccagaaaaaaagggaaaaataggaaagggtcacacccacacccacattcgtaggaaaaaaagaaggagagagagagagtgaagtagagagagatgcacatataaaggaaacagaatggaagtgcctaactaggggacacctgccctttaacagactctgcctgggctgcacgtcagctctaatggcagctgtatatcacagtcacttgtttgtcatcttttagatttgaaacgatctaatttctctttcaaaaataataaataaaaatctcttttttactctgaaacatatatagactatagaaaatacatgtaacacactaattatagtgtatataataaaatagaaaaaaaaaaaaaatgcccagttgagtgattaggttccactactactactaccaccacaaactaaagctacttcaaattatatgattaaaattatgtgccaatttggtttgcagagatactctgtttttgtttatagtatagtattcatgagaagtgttaaaggagatcatgctcttagtatatatttatgagatctaatatcgttattagtgtaataaatttttaactaattatggagcgatactttaccgttgtagcaacgctcgtttaatagacattagatagaattatacagaggagagaaatatataatttggtaatgtaaattgtatctactgattttttggttgagaatattgagatttattattattatttatttttggaaaattatcttatatattattttttaaatttacggtttgggtttttagagtggttaaagcgctagttttttctgtatttttattgcaatttaagttgcagccctagttacaataaaaatttctaagtagaattttgtaaaaaaaaaaaaaaaaactattttttagtgtaaaaatgacaaaatccttctatttttttgacaaagaaaatattgagatatttaatcaaaaaaaaattatatggtttgcatgcacatctcaacagcacatcacagctaagcttaccttagcttatgtgaataataatactattaatatttttagaaaatatttatttaccaaagggacaaaaaccatggacaaaataataatttttctaatctttgatagtcagcaaaaaattacaatccaaacaaaaaataataataataataatacatgaagactcaccttattattattattattnnnnnnnnnnnnnnnnnnnnnattattattattattattatgcatcttcttgtttttcctaaattaaatttgtcacataatcattaaaataaattattagtgatttagttatttttcttgtatttataatctcattttaatacaatcagtttctttttgagttttttctaaaaaaaaaaaaaaaggttttctactttttatttttattttttattatgtggtttatgttattgtgttaccaagtctcactcacttagtgtcactcttggattaatttagattcaaggatcaaagaaattttgacccccttttaattacttgttgaacaaaatttattttatttccaagaattacatatttatgttgaccaaaaaaaatatactatatatattatataaatatatatatttgcatttattaccaaaatatcatgaccattaatattaataatatcaatttgaatcggccgtttcatttttataccatgatatacatttactgttattctatttttaaggatctattcaaattaattcgagcattattctactattttctttttaatttttatttatataatatcattctaattctaatacgtactctccacctcttattatagaaaaaaaaatgtaaaagaactgtcacttggtcaatatatatttatgttttattctttttatatatatatataatatccatatattacactctccacctcttactattaaaaaataaaaagaattgtcactcggtcattaatttgcattttttatttctttttaagctcttgtatcataattattctcttctattaaatattgaacaaatttcaggctgtcgaagaaaaaaattgttaaatttcacctaataataaaaactagttttaataacgggaaaaaaaaatatataaactattattattgacaaatttttacggttaattttttatatatatatatatatatatatttttacggcgtttataaaaataacactaaaatgataaaaaaaaaatacatctaaacaatataaaaaaaaaataatatacaaataacaaaaaaactaacaataaaataacaataatacaacataaaaatatattaaaagaccctattttatataaataaaatcttaaaaatagtaaaaaaaaatttaaaattctatacaactatatttttgtaattttattttttgtggttttttttttaaaaaaaaaaaatcccattaataaattatcactaagcccaatgtcaagaaaaaaaaaagattaaaataattagttattcatttattgagcattataaatttttgtttttaaaaggtattccaatataatttaaagtaatttcaaaaccatatataattttaaatagtatcaaatgtaatacttattctactaaaagtgtatatataatatttagttatttattagttttattttaaaattgaaattaagtaattggaaatggtcttatgactcagagcagctgaatcatttttttcattttttttatatataatatataaaaataatcatatcttaatatattatttggatgcaattttgacggctctaataaatcctttgctcattgaaattttattaaaaaataaaaatcttctttagttgtgttgaggtatgaaaaagactaattttgattagaaatatctttaagataggctggtgaaaaaagaaataaaaagaaaaagtacaataatagggaatgattagaaaagtggaaattaatatcaaccaataatcatataatgaatagtaaatttttgtattggagtaacacaaacaaacaatatactttctaagcttttatcgataatgaatgggtctccacaccactagggttcttgttatacaatttttttttgtctttttctttttttttttttcttaatttcttttgaataaattattttattagtgataattaattaaaataatagtcttcaatccaatcaaaaaatctcttttgttagagacaatgactaggattaaaaatagaaaagagacaaataatcttcctaatcttagatcatttaacaaaaaaactaaaattaaattaaattaaaaagattgcagcattatattaattaaccttaataacatttgatgtcgagctatcaaaaaacaaagaagaatcaacaacgaaataaaataaaataaaagtatatcacacagaactaaaacactcaatatcatatcacaactagacaaaactaatcatagtagcaaaa

SEQ ID NO: 24652 - DNA, 2578 bp, Cannabis sativa
  modified_base (199)..(205): a, c, t, g, unknown or other
aaaagctcaattgaaaaaggaggatatgctttgcagagactgggaaaattatgtacaatggttaccaaaagctttgcatgaaacaattggggtgtaattgccatgggggtactttacaaaatatctcatattaaaaaggaaattatattgtatatccattttactttattggttttaatttttacttttattttcatannnnnnnagatatatccacttttatagatgatgttcctcagtgacgaacctagaatttttactttatgggagcttatttattattaaaaaatatttatacctatactataatcactcttactagatttatttaattttgtggggacttttttactattttagtctataattatcaaattaaaaaaaatatatttaattttttcaaagataatattttgttagtaggggctatagcccccacattaatgtaaattatgtgctagacttaagtagagtgggtacattttaataaaatataatatgagagtattttttattaatagataaaaaaaaagtattcctcaacttatctcgatattaaaattgaaatttctgtcaaattcccatattagggaaagaaaaagctaaagtctatagagtaaattcaaacattgcaaagaattaccgtatttttgtaaataaccctaatttaaatctagaaggctgtccacaaaaattgtaggcccaattggaaagagttgaggctgggcttctgcttggcccatttatgttggtgaagtatagtcgaatcccataaataaataaataataaagacagagacgtagttgtggatgttagtctctttcaaagtgccgacgccattgataatatatatactagcatctgcaactactaattatgcaaaatttaacaactggatttttggtacaatatgttatatatatatatatatatgtcggtggtgctggtagactagtagaggggtagtagtagtagtagtagctgtatttcacttatacatatctttaataaaaattattacaactaattattaacagcttcattcacatactcttaatatttcaacgtccacgtgtttgccgactacttctcctttgcttcttcttacaaacatacattattattatatatgtaatgtatatgtattaccttatattatattatttttgtctactcaaaattggctcattaaaataacatagtatgcaacattaatatcaataaccaataggattggttaagttgtatgagattggtttattaatttattgatatattcattgctttcgaaaaagaaaaatgtgaataaccaataggaaggttatatagaaatatattaatgtagaagtagtacgtgtacgtacccacgtattcaatttagttgttaccaatttggtaggtaaaaaaatttgaaaagtgctctttataggaaactattttgaatttgtttcaacgaaaataaaaaatgttaggaaaaaaaaaaaaaacttacatgaaaagagaaggcgccaataatgcttactattatcactaaacttttaggttgactttaacttttttttttataaagttattaaaattatttatgaatttaccatatatattctaatttacgatacatatattcgtaatttacgtgaaaatcttttcgaactaagatagttcaccatcattcaattgaagggaatgttttgtcaaattatggattgctaaatttttattacgagtcacatgagacaaaattacttctaaagatttagacaataaaattatagcatcctcaaataacacgcttagttcattattgaataacacttttctagctattattaatatctatcacgagaactagaaaatttgaaaaaaaaaatgcttaaattgagatacggcacgtatgagtccaattgaatcctaccaaaagagttaaaatttcagccaatagtaaaacactgaaatactacttgaaacatttattaaaatggaaatcttcaaactaaataaattaataatacaaaactcagatttaatttaagcacacaactctacctagctcaacaatactaaacaaatctaaaagccaaaaactaaattaatacatatttttttcttaatttttttatgagtttccttgtcttttatctgaattcgcccataactaaacagatgagtctatttaggaggctgtatttttgtaaaaaataattgcagttcttattggaaaaatattatggaactgtaaaagatatatataatagacattatacaaacattaaaaataagcatttctgaccaattttcatagctaataacttaatggtggtacttgataatgggcctccacctatatctgcctctattgttagttgcatggcaattggcaacattatataagataaagatagtgtgcttttataatccacatcttatttatttaacgaatgcacccttgtattttatatctatttcggtaattggaagatttttttactctaatattttttataatgtatattataaatatttacaatgtaaaatttatataaatagtttatttcatacgcgttaaatataaaaaaa

SEQ ID NO: 24653 - DNA, 2817 bp, Cannabis sativa
atcatcatcaccaccgtcacaacaactcctctcttctcttctctcccagaatctcaaaactctctctctctctgtggtacccaaaaccattaacaataaaaaccccattcgccataaccaaatccttctctctctttctctctgtgtaacccatcatcgtatctgaatcgatttctgatttttctattttttgtttggtctggtttggtttggttttgaattgaatcgataaaggaagaagaagaagacgatgtacgtacaggcagtgccacccacggatctgaatcggaacacggagtggttcacgtaccctggggtttggaccacttacattctaatccttttcttctcatggctcaccgttctatctattttcggttgctcctccggcatggcctggaccatcgtccacctcgcccatttcctcgtatgcccatcttctcaaatttttgtttttattgattgttttgatttttcaagattcaatttttaataatttgtctaggtttttgactttctattgttgggcaagtttaaatcgagtttattaggattaatatcatgtttgaagcattaagtgatttgggcttaataatttggcttagttaacatttttggatcccaataaaattgctgcacatattcaaagcctataggtcaataatagatattgtttaattttatgtcttttgatgatttttgatatagaaaattaaacatttcaattgggtatattgataccttaatgtaattgatgcatttcctatattaataagagtctgtcgtttctgggttttggtctattctcttgcttatagtggtagttatgttggttggtgtggttgatgatcttttgttttgtttcaggttacctaccacttctttcattggaaaaaggggaccccatttgctgatgatcaaggtatttacaatggattgacttggtgggaacagattgacagtggcaaacaactcacacgaaacagaaagtttctaactgttgttcctgttgtgctgtaagtactgatcatttcaggcttttcaccctttttgttatgcaatcatatttgaatttcaggatggtattgtctccattttatgaacataagaacttttttcgtcttgcatctttgtgagtttttcggatttaggttggttactttcaagttctagtaatttcattttgtagaactttaggcacagacaaaacctgcctagtgaaatttaatgacttagcttggtgtgagatttgtctcaaaataaggctgctctaagtataattcggtttttaggagggtgggctttgagattgttgaatcttatgaaccttgagtcatttcccttagaaagagcgaaaacacaccctttgtatgatgtactgcaacaaaagagacttcatggacatggtggtatcactgtgaggtgccatgtctgttaagttcatacttccaccgataggtttttaccgttgatttctttacaatttttagttgggggggttgcaggtgaagagcaaaacattatgagttagttaatgcagatgcaactcggcactatgactggattgtgatagataccttaatgttgtgttttgtgattgctcaccgtgtttcattttgtcacgcaaatgaaaaaagcaaattgttttttttttgtatgatcagggttatgttttctgttgataatgaaatcgaaatcttgcttatgcaaatgcgatgcttactttccaattgaaattcaagaaaaagggtcttgtgtagggctcttaggaattataatttatgacacaagtggttgaggagccattcgaataacaaagtggtctgtcgtgtgagtccttgtcgcttaataccatggggttaggcgagagaacctagctttggagggaaatcatgttgattcattaggactttgtattcttatatgatgcataatgaaattctatgaacatgtgaaacaatgaataaaccgaacaaaagactgatatttctcatgctgtttcgctttggatttggctacacaggtacttgatagcctctcacacgacagattacgaacaccctatgctgttcttcaatacactggcggttttcgtgttggtggtggccaagttcccaaacatgcacaaagttagaatattcggtatcaatgctgatcattaagatttgagttactacttctaaacagaattacagcttggatttactctggtttcaaatcattttgacctttccaatttttttttgttaaaaacttggaaaaggagtatattatgtctaatgaaaatgagctcttcttcttctttgtttttttaaagcattagttgtaagttacagataacttgaagagaaaaatgtttttcaatgcattttgtggttatacgagctgagataatctccaagaattttactcctcaattaaattgataatcattttttattttatatgtccacacttattattatttatatacttgtaaaaaataaaaagagtaaataaaatcatttttaatgctggtttataagaagcatgtatttttttttttttttgcttcaaattttaaattcatcaataattattaaaggggcatgtgatataaggtgttcaaaataatttgatttattaaaataataaaatggagaatataaattgtctgtaaactttgttaattggattattatttggctaaataaaagaatataatgagttaaaaagattatattatactaaacaattcctaatttatatcttaaaatgcacattataacagatttgaacagaatagatgattcttgaatatgtcgtcttgcttaattt

SEQ ID NO: 24654 - DNA, 3202 bp, Cannabis sativa
aaggagaaaccactaaccactgtgaacaatctgagcaaaataccaacaaaagttattcaagaaagagtgtgaaaatgtcactttcatggaaagtgatgagagatgggtacaccatccccacacaaatgcactagtcatagccgctgacattagaggtgacaatgtgcatcacatacttgtagataatgatagttatattaaccttttaaacttgcagggttttaagcaaatgggactacacaagaagggtttgaaaccaataactttgagcatttatagattcactgtggacacaatcgagttaaaaggtgagtctaaggaaggtgaatcaaacaatgttgaagtaaagtacaagtctccttcttattcaaataagaaaaggaaatggaacggtaaggacaatagcagtggcaagcccaagccgaaaggcaagaagaccaaagccagccctaagtttaaggacaagaaaggaaaaaggcaagtatttttattgtggcgtgatggaacactggaagaaaatctgtaacaagtatctctctgagcttaagaaaagtaaatttgatttatttgttcttgaagttgatttagtggaagatgatcaatccttgtgggttttttatttggaagccactaataatatttgttcttcaatataaatacttgatttgtcaaaaaaactggctaatagaaaggtgaccataagagtgggcaatgaagcgcaagtgtctgacaagtgtgttagaagagtacatttaagtttattaataatgagattattatttctaaatttggaacgccaatttgttctacaaaataaagtaactaattttatgtgctcaagccaagtgagcaattcatttaaataatgaattacttagagtagcattgcttcaacaaaataagaggcaaaaagtttctgatgataatgaaacgtatctatgacatatacgtttaggccatattggcctagatagaataaattggttaacaaaggatggtcttttaagagaactaaaagttagaattcttccagtatgcaaatcttgtctaaaagccaagatgacaaaaagactattttattcaaaaggcaataaagccaaagaacaacttgagcttactcacactgatgtgtaccgatctattaatattcaaactcgagatggttacaaatacttcgtcacttttattaatgattattctaaatacggtcatatttacctaatagccaagaagtctaaaacattcagaaaattcaaagacttcaaagctatggctgaaaagcaattaggtaaatcattaaagacacttcaataagatcgtggtggcaagtatttggattccaaattcaaagactgtttgctagaagaagggatcttgtcccaacttacagcacttggaacacctcagcagaacggtgctgtagagagaagaaatcagaccttgttagacatggtcagattaatgatgtgttactcatcactgccactaaacttttggggatatgcacttctagtgcctacctacattttgaatgtagtacccttgaagagcataagaaatactttaatagaattatggaatgggacaaaacccagtttaaaatatttctagttgctcatgctcttaaacctaagactgggaaacttgctcctagaatttaagtgtgtatgtttgtaggatattcagaggacactcaaggaaattggaaatgagcacatttctaaaccaataattttaacaccattagttgaacgactgacagcggttaccacaatgcctgaaaaggaaatcctagtacatcgtttaggggaggattgtgagacaacttgttcgctatgaaaatgaagcataatttcttgtctctgacacatgcaaggacgattccttgacttaaaaataggcaatggaagaccctaactcagacaagtggagcaatgtcatggatttagaaatagattccatgcgcaccaacaaagtcttaaaatattaaattccaccagaggatattacgcccatagggtgtaaatggatttcaagaagaagagaaatactgaagggaaggtagagagttttaaagcaaggcttatggctaaaggctacacacaacgagaagatatcgattttgacaaaaccttctttcttgtgacaatgcttaaatccattcacatttttctttccatagctgccacttatgactatgagatatagaatatggacatcaagaccgcttttctaaatggcaatcttgatgaagtcatttatatggaacagccagaagggtatgtgttaccaggggaagatcgaaaggtgtgtaagttgtttaaatctatttatgaattgaagtaagcctctagaccttggaatatcacctttaataagattattaaagagtatgacttcaaacaaaatgaggacgaagcctgtatatacaaatacattaaaggtaatgcagtggtatttctagttctttaagttgatgctattctactaatttgaaataatgtggaaggttatcaaacgtaaaggaatggttagccgataaattccaaatgaaggatttaggagaagcaagctatgttctcaggatcaaaatctatagagatagaaagcagagaatattaacacattctcaagcaacttatatcgataaggtgcttgaaagattatcaatggagaattccaagaaaagacagcaaccgtctagacatgaaattactcgatgtaaagattaatgtccaaaaactcctcaggagatggaggacatgagaaagtacccttatacatcatctgttaggagcttaatgtatgcaatattgtgtacaaggcttgacatatgttatgctgtagggattggtgtacttgtcattttgtggggtgcaaatatgtgtgtttggtaagagagaagaggagaaagaagagaaaagtggcaagaaaaaaattaatgtagagcccacataaatctatcttgccaaccataagtggggagaaaatagaaaaaaaaaagttattgaagagttttatttacaccttacaaaatgataaatacaccccaatattttttttaaaaaaatttctcacatgattttgtgttacttttaattttatttttataatttttttaaatcatatatatatatatttttaatttttttaataaaatatcgtataattttttattttaattttttattataatatttaa

SEQ ID NO: 24655 - DNA, 4971 bp, Cannabis sativa
gtcccacaaagtataagactcattccaaacatcatcatgaacaaacataaacttcttcccctgcaatgcttccttcaatcttcttcgaatttcgtctgggttctcaatttcacatttgttggaagtgacaccctcaaagatctctcttgttatctttgaaatatcaaacttgtctgacaccgtaacccacactcttagctcaaattgatttttaactcgaacatcatcataaacaagttgagcaagagtggtcttgccaacgccacccatcccaacaatcgggatgactgaaatgttagtaccaccatcaacatcgccttttagcaacaaatcaacaatggcttctttttcagcatcccttccataaacatcagattgttcgagtaaaggagcaggaggcctttgagaagaagtgttttgaaggccttctctcaagccaagagcatccttttgagcaagaagatcatctagtgtaccaaggatctcagtggcatcattttgtacagttttatcaaatgtggacaagaaaggtgacatagacttcagttgttgaacaacctttgttgtggggctgctagattgatcgtgatcttcaagcttggttcgcagtgcttcataatcgatcctgtccaccaagtcgtcggcttgatagatgacatcttgaagcttggaaagccagttgttgacattgtcatctcgaagttgcttctcctcagcatcattgagcagtttattagctgataacatcctagtgttcaacttgtctagcagcttcaaaatgggtttctttctttggaacagctgggatatgtcctccgaggccaatctgtcaaacagaacttgaagtgaagcagagagcaaagcaccaccaaccaattcagcagccatattgatcaatgacaaaagtaacaagttctttgttgaatctgtgaaggggttacggatgagaatgaagaaagaaagaaacgaatgggtaagtgagtgagtgagtgagtgagtgtatactttattaacatgtatagcctctttccttggaaatttctgaggaaataataatgtatgaatgacccatgaacaaagttgaatgatcacctcttttttctttattaacaatttttgctttgataatttattggatgaatggattgtttggtcagcaatggtgtaccattagtctcaaaactaactttttctaattattgttcagtatagattaaagaattgatagtgggttaattaataacattatggaagttaaggtatatatatagtcatcataactctgctttaatttgtttcactactgcaaggaaatttcttaaaagacaaaagtctttaaataatcttctttccttttcttactttttgacacttattgacttatatcattttcacattttgagtaatctccaagttattttgccatgcttacaaagttcaacagtactttgtcacttctcattataagctttctgaatacagaacctttgacatgaaatcacactatcacatccatcaattctatagttgactgaacaattggtttggtggtaaaatacatactcaaattactaaactaaagtttgcaccacatgttgagattattcccttgaataaatatgagcagaattggaatattcctaccttgtttcacatgcactatgttaatttctcattggctcttgtagttttcaataccgaacagaaaactatctgtctttaacaatggcgagttgggggtaaagaatgatttttcatgggacaggaactcctattcataagtatatataagatgcaaccttgagaattgagtgtgggccttaagggtcacctagttttgtgcgcatgggtggagactcacacaccaggccaccacacacgtacaggtgtgatagtgcaaagagtccattacacgttcaaatcatatttttatagaacatgtttaaaatttggtatgaaaaacgaatttgattgatggcattcaaagtctggcgatatgcataaagatgaaaagtcattggaagacagtggatcttgagccgcgccaccctcatttactgaagagaggagagagagagagagagagtaaataaatggagcaaaatttaagtttatattacaaccatacagaatacagcataatatagatcatagatgtacctctaaaatagtattgaagtggttgaagaaaggatttagaggatgcttatataaatttatcatttgatcttttgtaagattttggattggtattccttcctttttatgtgtaggtttcaatatcaaccatacaacataatattttcactctcattcaaatgttctttttctacaaaatatttataaaattaggtatgaaaaggaatccaattgatggatgatgggttggtaaagtctttgtcttgtaaacatagaaacttgggattatgatattagtatgggtacaaatactattacaaatgcaaaatggggtaagcaaacacacacacacacagaataattagttaactttgagatgcaaaactggattgaagaatcaatgagactcagcatctgctatacaaatctctgaacactgcctgtcatcatgatcatgatttagcctgaaatgatcatacggttactttagtgttagagaaaacaaatataacagtcgtttatttcaactcaagttttcataaaagaaataaatataccattttatattgatattgcagtggttttccaactttctccatttgaatatcaaaatacaatacagcttccttgtcctgtttaaatttctccaattcaaatcaaaatctgtcaaaggggaacttattaatgattcttacatggtctttttatcattcttcaaattgatgattcacaccgatttgttcccagccattagaaactttttggctgcgacaataactgcacatacaatcagttaggattgatcattgatggttggtgatggttggtctgatgtgatgataaatgaaactcaatttcttataacaaaaaaataaaagaagaaaaagattaatgtaccgtcacgtaccaagaccatgaatgagatcaaaattcacgtctgtgatgtgtaatcttaggccaatcttctcctccattctcacaccgtttttgtaccaaaggacatccactaattgacaatttagtaagggaattaggcagtccttcttttggcaagcaccacagtctttcacatttaaaaattatcaatgtctgaagcgatgtgagttgttgaaaggcctttccatttagggtctcaagcttactacaatcggaaatgtcaagtgtcttcagattggtcggaaggagcccctcgtcgttgggaaaagaatcaccttgccaaccttcgatatataaggattctaaagatgagaatgtatgcagatcgttttgcagccttttggagcaacttaatgtgatcctctttacgttggagtgtgatcccaacactggacattcatctatacgtatctcgacaagagagggaggggttgtgaaactcaccattcctttacaattctcaattctgagatcttccaaggatggaagataacaacctggtaaaccaacattgagatttggacaaagaaacagattaagccttttgagaagagggaataatatttgaccttgttgcatagcttcactactaaatgaccaatttttccaccccgtcatgaaggaaaatgttaaggattctagacatctaaatagaagaagacccttctcaccaagaatctcatcacctattgagatcaccctacgacatccaaaaatcttaagatctttgagacatggtagctgcccaagagggggtagcatacaacaattctgacaaaaattaatgctgactgataccaacttagaaaatgcagtgtctccaatccagtctgagaatgttgaacctctgtaaccatcaatcacaagatgctccaagtttgtatgtggttgaagtgcatcaagtatatccttttccttgtgtgaattattagctacaccaaaataatcccatttcaaagtcaatttcgaaagacaagtcttatccttcaaattagcctccaaagcttctctggcttccttgatattttccaacccagaaattctaagtaagttctcaagctgtcctacatttttcataataaatcctccattgctatttctatcactactcaaaaccacatcagataagaagtacaagtgttttatagtactaagctcttggggaaattctgaatctttcagaggtatcccctcaatatctaaatatcgcaagttgattaaccttcccatcttctttggcaattcacgaagctctttgcacccaaataataatagagtctgtaaattgtacaaattacaaactgaatcaggtaactttgtaatatcagtgtaagacaaatccaggtacctcaaatgcttgtgattggcaattgaatgaggcagcttctccatacggcattcactaaaagaaagaactcttaaacaacttccacttgtaagcaacatatcatactccttgttgttccatgaataatcacattcgaatggcaatgctagaaaggtacgcaagctcttagctacacgcaagcccttaattttgtcgatgtcgtattcccttttcatatatgacaagtgtcgtgtcttcgttgaaaggttaagtagatcattactcaaatccaacctaaagaaaaaattatttgatacgaatatggccaaatcatgtaccaagtcatgcatttggagcaatgatttttctttatttgaatgttgaaacaatgaccttgataaaagatcttcaatgtattcctccccatgttcctccatctttttgctacttttatcaagtggcagaaaaccttgtgccatccacaacaaaatcaatctttttctttcaaattgataatctttgggaaatatggaacaatacgcgaaacattgcttgagacgtgtaggtaa

SEQ ID NO: 24656 - DNA, 4759 bp, Cannabis sativa
aaagtgccatggttctttggcgagtacacgacgcttatctccttcgcagccgaatcgaatgtgaaataagccatcttctcccttgtattcagtaatagtaacggggtatcgaccttgccaatggccagacatttggtcaatgaagcctggtttgtaaacattctggcttgtgagaacccttgccaaaagggcaaaacctgattggagatcagaagattgtagtgcagcagcttcagggagagtcagaatagaactttcctcatcagtgagggatagtgtagagtgaagattgtccattacagtattcatcacaaagagaaagggatagtttagtgtaagaggaaggaaccggcgatggaggatgatgaaggaaaccttggagggaacagttatcttcaaagataattttgaaaaaagatgaataaaccagttgaaagaggaaaaaaccgttaaaaagactttaacttccacagaccccaaaagggcacatttttttgccgcgtttattagctttatctcttatagttattattagtatattaataattagtatttttatcatatgagttttcaatactactgattcgttatttattttaaaatataaaaattatataatcagttattttaatagttgaaaattaatatttttactccctgaattttgactaatattaatttttgctactttttatataaaaaaaaaattaattcaaaaaattataattttttattaattctaaaaaaattataaaaaatttgataaaaatattaattaaatttacttaaaaaacttaaattattcttaatttttttcttcaaactttattttctatataaacacatatcttcaaagatcaaaccaaaattattaaaaaatataataataatttaaataaattaagatttagtgaagagaaaaattaagcttgtgtttacaaattcatatcctaaaaaataaagaaaaataattagaaattcaaaaaacaataaaattattttaaaaaatagaaattaaaccaaaaagacatgttatgtttatttaaacacctctaaattttttatctcaaaaaaaaaaaaaaaaaaaacacctctaaatttttgagaaaaaaatagactccaattttttctcgtaaaatttaatttttacaaaaatcgaatttctaatatacttttttatatttaaatgaatttttttaataaaaaataattaatttttttaaatcgcttaatttattttaaaacttttatttcttttttaattttcttaattatttaaaatatttttttttctttaagaaacaccgaaaaaaatattgaatttttctcatttttatttaaagggggtacgatttggtagttgccaaagtttaggacgtaaagtttctaagttacaaagacatgtcaccatttgaacgaaataataagacaaaatctaaaagaatgactaaatttcagtaaaggtgttgtagtattttcagcacgcaagtatacatatcattaacaagttatagactcactttgtgaggtcgatcccacaaggattgtagttaagtactttaaaattaaatcttttcttttattggttataccgaattttagagtaaattaaaactagaaagcaataaaataatgaaaataagaagcaagtaaattaataaggaaattaacgatgattaaagttagggctttcgatttcaattgcatctattgattatggtttaatatgattctattcctattaccaaattctatgcaatagcaggtttacttaggtaatttatagtcttctcagatatataaacctcaattacatgcaaattttctgctcttgtggtaaattaaatatgtaagaggtattaaacacagaattctataagctatccaaaccatataggtactctcgtcctatatccaaatttggttctatttcactatagcataattgacactcctcagatttgtatcaaaatcataaacaataatgtcaaacaatattcatctaaactctaatgaactgtttagctactcatgttcatcgtagcaatttcacacatattaatttagaatagaagaagaaaatagagaaataaagaatgttgaaaaccctgttgagaaaccttcaatatcgagtttgctctccaaaattcgtactttttcattgcttgttgaaaactatggaagtccacttcttttatagctaaaaaatgataaaaaaatataaaagacgctgaaaacctattctgcttgggattagaaggggtgagccgcgacatgcacttcctatgtcgcgacccgtgttgcaaatccacacgtcccaagcttcaattgacacgggcctaagcatgggatttccatgcctaggcatgacctcctcttttgtgcacagtgagcttttatttgattttttttttatcatattccttcaatattttcctttattcttctattttaaatctgcaaaaataaaagataacaaaacatgtaaaattattccaaacaagagtaaaattaaattaaaaacacattaaaattaacctaaaaatagcactaataacatcctaacaaaatgtaacagtttagaaaaatttttaataagtcgtatattttaagggacaagatcaatcatatatttagggataaaattattaaatatttttgaaagtgtgtatatatatttatatatatgtatgtagtataaatatgaagataactacaattttaaacatttttttattatcattattgatgtacgagttgttttgattctctaagaaaatgatttttgtaatgttagtatctagtaaaaaataaataatttgtattgataaatcactaatttttatttttttttatagaaaaaacatcaaataaatacgactcataccaaaaaattaatcttatgtttttaataatacaaaaagtttataaaagaagatttaaaactgatgtcttttaattaaaaaaataaaatataaaaactttgacttacatatctataaattaatgtatctatattctacaaagggggtgatgataggatgttaacacttcaatcgtcattattttatacaaacacttctgtcaccattaaaggtagaattgttttttcaacccattatataaaaaaaataattaataaaaaaatatcaaaaatatattttatatggtgatatgtatattttaataatttcacacctctatttcaaaaacacacttggaactaagtaaactatattgcaaataaaaagttataactaaaaaaaagtacattagaaaaaaaaaaaattggcataccataaccgaccataaaaccgatcgtaaaaagcttagaagatgccacatcatcaccaaatttggctatcggtttcggtttttaaaatcattgtggttggtttcgattattgcaattttaaaagttagttaaccgcaaccaattgtacttgttttataaatgttatttaccgatatttttagaaactgaattaaaaataaactaagctaaagaaaaaacttcaagaaataagtatgaagagtatttttacgtagttggagcgttaatgagtcttagtccacgattcaatattattaagcttgaaaaagtaatggagtattttttacacaagagtgttcttaccaaagtcttagaatcttaaactttatccctgaatttgtgaaataagctttgaacccttagcatgaagggatggtgttctatttataggctagagtcgggtttatgggtaaacctggacccgctagagtttgcatgtgttaacaaagcccattgatggggtaaaatacaatattatattgactttaggccgattaggtgaagcccaatttgtgagtcaatggtcattcgtacggaaggggaccacttgacagtgacaggtggcatgcgccgccgatcatgcatagtactcgtcaaagaaggtgttggacagaaggcatgtcccttttgggttgtgcgcatttcttaggcttgacataagaaaaaaaactcttgattttgtgagatctggtatcagaagggttccatttaagtttactccctaatgtcccttcagctgtctttcccgaaataccccatgagggtgtccaaataggtttaattgggtcattatccttctgggtgagtttcccttctgggaccaataaggtccgagtttattatgtctgtacttgggatttgtagctcaatctggaaccgtggtccaactccatggtgggctgatccactagtttgactaggcttgtcaatgggctcatcttggttaatttcgatcttcagaagtacacatgtcacctatctgaaaacatatataattagttttatattaaatatcctattctggtttagtggtaagacattctctttacatttgaaagctcaaagattagggcataccactagaataaaatgtgacttaatttttttatataataaattagaaattattcttaaataaatattctacaatgtatatatatatatattaggttaatattacggtggtgcacgtatacttaattatattttagttatacaattagtttttttatgttataaaatcattttttattaaaaaatatttaatttaagtgatatttatatataataacgtaataatattcaaaatttgttgttacttattattttaactagatagagttacgtggcaagccacgtaaatattagttttattttaagttcttgtggtttttgtttaagaatttagtgactaattgtaaatta

SEQ ID NO: 24657 - DNA, 2839 bp, Cannabis sativa
aaaccttaatttcaatcgtagaaaatattgactatatataaatatgttatatatatattatattatattaaattaatcactaaaaaaactctttcttatatatttttctttaaaaaaataaaaataaagaaacttatatattaccaacccagaaaccaaattataatcgtaaaaatcactaagaaaatctcaaacttagaattaaatcaaaacaaaagacaccctttaattgtatacacacatatacacatataattatatatatattatatatatgatttacctgagaaacagcatgaagaacatgagattgatcagaagaaccaaaagaattaataagttgaccaaaaatcaaagtcataatgggctgagaaagcccattagccaccgcacaaattgagcccacaaccatcaaaaccatatccaaactatctgcgaatgtaaatagcttcaaaaacgacaccttttccacttttacgacgtcgtttaataccatctcttcctccttcttcttctctttactattaccactactactattattttctccctccatattttcttcttcttcttcttcttatttcttactttatttaaatttaaataaataaaataaaataaaaccaaacacaacacaaacttggtatgaatattgtattgcggcgagttatatataaaaacgtaatttgggttttgtttggtatgttgtttttgtgttgtgttttccctttttatagcataattttctctctcttttttttcttttaaatttaattaattaattaattattacttgaaaaggactttaaggaaacattttatttatttatttatattgacaaaaaaaaaagtgatgtattttgtatatagtcaacttttggttattttggtaaatagtctgattttttttgttttgaattttatttcgttggattttttatgttggggtttctatttttagtctactattataaaaattagaggaattatttaatatattattttttttttctatatagattgctgtgtaaatttttataaaaatatataaaaaaaaataatttaaaatataaaaatgagatgttttgaattatgtttttttttttttaaaaaaaaagggtaaattatttagatattctagaatgtatattgttatataaaaaaaatttgatattgtaactattttttttcttaattatattaactagaggtaaaaaaaaaaataataacacgagataaattctcattattgacttgtgtcttctagaaattgtcaaaataaatattgtttgtggttttagttttttaactgattagtagtgaataattaactatattaagtaaaaggtaattaatatatttaaattactaacataaatcttgaaaataattaatcaaggagtttcaaatagcaactgatctgatccaactcagcatgagatgccacgtggcataatgaggtccgcttatacaagtatacaactggctttgttttttattttttttttaaaaaaatcacatggtgattctaccttctagaagtcttcatcatttcacaccatatattatttatagataaataattgatatatatttttttaaaaaatatttagtttttctttctattttttgatcttcataaaactaaaaaaaaaataaaggagattttttttaaggcaaaaaaaaaaataataagctaatttagtttttttattattcaacttttcaagtccttaattttttcttttaagattgttagatttaaggacttttatctacttttattattttttttttaaaaaaagaagcattatattaaaccaaggaactagtcagaccgtaaggtcattacaaattaggttcaaaggaatgtcatctgcatatagacaaccataacgattctgtgtaaaagccaacttcgctacattataggcacaaacattacatgaacgagctacattaaagttatctatttttattcaattttactaacatatcgattattcatatactaaatcatgcaccgaatttgaatatttacaaaatcatacctttaacatgtaccgaattatgcttcttaaatttttatcttttttttagtaaaattggataaaattctcatctaatatcttaatagttcaaaaagaatttttaacaacataaaaaagttcagagaatacaatttagtacatgttaatgttcaagggacaaaaatctaaattaacctcatatatatagggagatgatttttgtcctgtaattgtactttcacggaatgtattccgtgatgtacgacagtcgttagatgagggagtaatttgatctgagggctgagattgatctaggggtaattaaggttaaaaaataataatgtaccctgacactcatctaatgtaccctgagacccatctaatgtaccatggaatacattccgtgaaagtacatcacgagacaaaatcgtcttcctatatatattgaaaattcaaacatttagagacaaatatatataataattaaaactttagatataaagtgatattctaaagtgaaagggttacatatattagaactatagcataattataattgaagtgaaattattaagaagaaaattttgatttgaaaaggttatattctcatgcatgtgctaccactttagggtggcccatgttagtaaaattgatatattgctaatcaattttttttaattcatttgttttattaggatttataattctaattatttatgataagattggcatccaaacatgtataaataatatatatagagagagattttgattttcacaaactatcacaaaaaaaattatatttagaa

SEQ ID NO: 24658 - DNA, 5981 bp, Cannabis sativa
tgtagcatctattgctttacagaaaaatataatcaaatgagaacacatgatatatgtattttctttatcaacgtgttagccttacttttaaggtcactgcaaaattaagatcatctaagcaccttttggacatatctcttgattgagtatttaaatatggttgtaaacctccatatctcttgattgtgtatctaaatatggctgtaaacctacatatgatgaagtgcatcaacttcctgttcatgagaaaaaaggcccttgggtcatagagacacctttgtctaaacaaaacacgaagcaagtctgaagactgttgatgtccctaggaacttaagcaatgagcaggtcttttagtcattgatggaatgttcttgagaaagcatgctataaggggcagcataactgagaaaatttgcctgaacacattaaactgtttaaaattacaatagagtgatttctttgatttccttgaagggtttcctgatctatgggtagcccaaagcaacacttctgcatcatataattggtcaagatattgttagattatgttcccgtgacacattcaggctgttaggatttttttctactacttttgttttgaataaagaatctgaattttgttcacgtctcttttaggtcccgctgcattcaggccccgagcacatactgctgcaacttatactccatcagttgaaaagggtcgacctgtcttacagggtctcctggctatagatttcttagcaaaggaggcaagttttttatagctctttagtacagattgttttcttttctcctctgctctgttctgggatattgttaaaagtttgattaattttaatctcatgaataaattgttgtttaggttccctaacttgatctagtcgtttaaccaggtgctcggttgggctcaagcgatgcctaaattttctggtgatcttgtgaaatatgtgcaaacttttctggagcgaacatatgaaagatgtcgaacttcatacatggaggtaagaatgttgattcatattaacatgaacttgtgatatatgtatttacttcgaaagaaaacctcaagcttgtattaattagagaagaaatacaagcacaagggaggaaaatattctacatgaaaaaacagaacaaaattatttattatcatcttttctcttcactgtttttttttttcatgctatttagtttagcgacttgttaatatagttatagtgcttctcactttttattgttcttacccttacagcaattgttttgtatccacattcaaaatgatgacaatgaatcttaaaatgaatatttaagtcaagtggtcaggggttttgagaaaagtttgagtttttaaaattttgagaagtattcatagcttttgagattttatctcttatagaaggtttttgatggtcaggaaatgagatatgtcttaagaaattatttcttttacttaataaatattgacttgaaccttgctgagtaagggttcatcatgcttgccagttctgatactatcttctactactcattcactctttctttcccttgggtgctttcccaactttttccaggcagttcttgagaagcaaagttatatgcttattgggaggaatgattttgagaaattgatgcgacttgaccctgcaagtgcatgtttaccaaatgctgttggtcaatctaacattaataatcatacagctgatgctgaaactgttgaggttgaattagaactatgtgatttattgttaacattgcggcctattaagcaggtattcattttttacttcatgttccaagttaattggtttgctagaactgtaaatggtttattttatttgtttccttttcaatcaagaatgatgattttagtttctctctgaaatttttggtgcatgcaattttatgtgtagattatgcattaactaatttgttctattctttgtatcatgtaggagaatctgattcgtgatgataacaaacttatattgcttgcttcccttagtgattcattggagtatcttgcagactcaattgaaaggcaagttttctcagttagttgaatttacattttctttattgaagcctcgattgtgtgcaataaatgcatatgataatttagagaacttaacttgagccaggatcatttggttatttgtatgatttttccatgtttttgtccatgcatgagtttcctattgtacgtttcaggtatacagatagtattaacttgtctcttctgctttcgtatttctattgttgcattttaagatttattttattgtgtagtctctataaaaaaaaaaccccacttctggtatctaatcattgtttctctacatgtttggttgttgtaatctggtgctgacttcttgtcaactgttgtataaaatatataactttacttctaaagaaatttgttccctcactcaatttattatatctttaatcacaatgtagcttttgattacgaggttcagcttataatatttctttgtagcttttaataatgagctttagcttataatatctctcttatagattcaattaaatataaatttagttaaagaacaataggagccttacaagtacattagaaaacatgtaatctatacatcaaagagcaagttatagtgttgtctatagattttactgggaaagaaaaaaaaaaattggaacacccttgaattgtgtggtgatagcataactctggagaatttgattagggaggaattgtataatcttttaatgaattgaatttgttttgggagaaggctattttcaacctctggttttcacttgaggagttcaaaaattgaactgttccagttgattattctttgttatttttattgactttgtttggttttgtggaggatgcttttttctttatctattgcaatatccctctttatggataattttttttaatcaaaaagggattttgatcaacttattggtattcaaaacaaacttccacctgtaattttttcactttatgatgttcatatttgtaagaacactatcatttctgaagcaacttaatggtaatttatttaatggagcactatgccatacattttgtaggcttgggcggacaaccgtgaaagctccaactcaatcaagcactgcaccttcaagggatatggcttcatttgcagacgagtataggaaattggcaattgattgccttaaagttttacgtgttgagatgcaactagagactattttccatatgcaggtatttgagacttgattcatatgtaatgttttaatttgagaatgtttttctaatttctctactgaatgaggagcttgattatctttaacaggaaatgacaactagggagtatctggaggaccaagatgcagaagagccagatgactttattatctcactcactgcacaggtcagtacattcaacttctgacttgtcagatgaataattgtgcacaattgcacatgtatacttatggaatgagtctttatacttttatagttggcctattagggtctttatgcatcaaaatttgttatgcaaactaatttttctttctcttgatttgaaaagatatatgaaggaaatgaatggttcttatggactgaataattttagcgagtatcttgtgctttaataaataaatctcactatcgtattctttatgcatagattatgcggagggatgaagaaatggcaccttttgttgcggcagtgaagcggaattacatatttggcggaatatgcagtgttgcagccaatgcatccataaaggtttcctttcctattttttcttcagatttcggttagatttgggtttgtaatagaaatatatttatataaatatataaaattgacttgattttctcatagcacttccattatgtcatcttcacttctaattcaagagatgttaccttctaatcaggctttggctgacatgaagctcatcaatctttttggagttcagcagatatgccgaaattcaattgcattggaacaggtagatttttccaaccaatgagtaatgatattacatagggacatgacagttttttcaacgaatctcatttatttaaactaagattcacttttgttaaaaataatatcacgttactgtgtaatgtttatatattttgggtgtacatatcaattgctggtagatgaattatattacattttactttcttaaaaaaaaagattaaaataataaattgattcccatagtctacttcctatcctggcattatctatatatataaccttcaaagcaaggtttgggaaccctaacttcacttagtatcttttgagttttgttacatgggcacaattggagatctacagtttaatatttattaattaattgaatctaggaatgatttccttatttataatatcgcaaggcttgtgcgttagctccaacctgtttcaagtcactaccaaactagccttgctggtgttgagattcgttttattacttcattgtgatgtaaaatcctgttcaaattattgataagaggggggctgatatatgattctgttctgttttttttattattttttttatttaaacaatgttatcattcatttccattgctggcgttgcaggcactagctgctataccctcaattgacagtgaagctgtacaacaaagattagatcacgttcgaacttacttcgaacttctaaacatgccatatgaggcaagtcattaaatctgataatttgtctgcaaatagtatagtattatgctttcttcctaaagatttcaatcttacgttctctttttgcaggccttgcttgcctttatcacggagcatgagcacttgttcacagctgccgagttagtcaattacaactgtttttacatgcatctgttgattgttgttgagttgtttgttcagtgaaataaccccaaactctcttttgacaggtacattaatcttctaaaggtccaagtcccaggaagggagattcctgctgatgctcaggaccgtgtaatggatattttatcccgttagctttctgggattttggatttcgatctactttcagtttcttagaacaaatgggtgtgtcattctaagggaagtcccatgttcccgtcattggtggggaaggttttgtcttaattctgttctgttgaggtcataatgtagatcgtaattatttttttattataattattatttgttaatgtgcagcatcaattttgttcattcctttttttttcgggacaatcttatgggaaacttgggtttgtagttttggcgtgaataggaaaagcaagatgtaatttaaaatctgtcattagcttttgtaaatcatttcattggttctcacattaatctccttttgcctttattattatttattttgcttattggtttcttttctgtacatattaatgcgtcagaaaaaaattacctacaaaaaggaaagacgccattgtactacattaaacctctaaaaaaaggtccaagtttgagttaagattgtgtcatacttaaaggttttgctctttgtttaattgtttattagtttaagggaatatcattttctaaataaaataaataagtgtgctgtgttttttgttaggtagctaggttctggaaaacctataattggttctcaaacaaaagctctaccaaaggaaaacataaatgttcacaccaaaagagacataatacttacctattaagattctcataaagaaaaatttaacttgtgaaaggtaaatgtttaggagtgtttggcgttcgggaaagcttttatctttaccaaaattcctatcctggttttaccttttttgtaatctgcattctacaatttatacattaaagagttcaccttctcgaaatatcaggtgcatcacagctagctacttctgagcactaaaaatgcaaacagagaaatatttcacagcttttggagtatgaactcaagtttaatttagttatgttggttggttctattttacagct

SEQ ID NO: 24659 - DNA, 4827 bp, Cannabis sativa
tttctataaaaataaataatatttcactataaattaataattttaataatatattgaatataaatgagtcaattcgtgtctaatgcgttaaccctaattcaacccaaataataattgtgtcattcaggttcgacttaaatctgtgtctatttttgatgatcctaacccataataatttgtatcgagctcgtgtcgtattacgaggtagtaattttattgtattcttattaatttgttgctatttgtatgctattttattttattatttttatataattttgttgttatttttgtgttaaaatataaaataaaatcttaaaatataaaattataaaaaatttaggtgcattgtgtaattatctctaatacagcagcaccacagcagatccaaactcacaatatagaaatcgagaaagaaccctttgataaatttctgaacggataggctagcctgctctgctagtctctctctctctcttctcttcctcaccatggatactctgctacaactccactcctccgtagcttttcttactccaaatcatctcaatcgaattgggtcttctgggaatcaaaccttccgcttcctatttctctcaaacgggttttcttcttcttcttcttcactctctcccaactcaagccagagggtatctgtgattgttggagccaagaagaacagaaaagaagatactcatcattttgcacctaaaccagatgaagctactggcccatttcctgaatctgtcttattcaaagaggtttgctcttttttcatttttctgaagctgtcttattctttccaactgtttaacatgaaaaaaagatgtaaacttggtgcttcaaatgtacaattcttcttaaatgtaatttcacttgtatgaactttcatgttttttctatttggggtgtgaagattaatggtttaaagtaacatgagtttgtaaaggaagaggctttggctattaattggcatgtttttgctgaagtttgagtttgaattgggattattttgtgttgatttacagaagaaagttgaaaaagatggtaaattagttcctgagtttgctgatgcagaagaaggtaagttgttcaaatcaaatttcttctagtgattaagccttgttttgggacttgaagttacaataatggattttcttgcccaattgcagagaagatatatgaagttctgaagcttcagctggaaaatgatcttcaagaagaacaaagatgtaagcttgtactcataccctgcattgatttttcaacatgggaaaatgcattctttggttgttataacataatattgttgacattttgttttgttttcttttttgcagtgcgccactatgaagtcgtatatctaattcatgagaagcacgcagaagaggttgagagtgtcaatgcaaaagtaaatggtatgtactctttcccagttctatttgcctaatcatgagattgatatagtatgattttgagtgtgtgcaaaggatatttatatgctcttagaattactttcatatattatgtcagagagtctggattaaactgaatgccatttataagatcatggtccactcattgcagtttaaagatgaactcatacttctttccatacatctcaaactattttctctaaaccacactttcacattctaacatggtattagactcgaagaaaactcttccgagcatctaattcaatccaaaaattagagccaaaagaaccacttgtaattgtgattgaaccgtccaaaattggtagagtcatggaaacttaataccattaaaggaatctcatatttcttaccatacacctcaccctattttactctcaaaaccacacttgcacattatggtaattaaacaagttatgatacttttctacaagtggtgggcactttttttgagtgttgtttctttggagttgcatttcaaatatgccacaagatgttactgaatgcttctacttattgcagattttttaagagagaagagaggcacgatatggagaataagcgattggggtatgcgtagactagcatacaagatacagaaagcaaagaatgcccattatattttgatgaacttcgagatggatgccaaatggattaacgatttcaagagtatgttggacaaagacgaaagagtcattaggcatctcgtgatcaagagggatgaggcgatcacagaggattgcccccctcctcccgagtttcactctatgcggtctggtatggacgacgatgatgatgaagatttagaaattgatgatgaagaatatgatgaagattgggatgctgaaggtgagttcgaagatgacgatgggattattgttgtcagtgatgaagatgaagaagacaggactagcagatccgatgctaaatccaaaactagcaaactaaaggctgagaaagtagctagatagatagtttcttggtttttcctttgtgccttgtttatgctgtcatgagagttttataggggaagttctatatagtagatggtagcataatttgtctaatattgggtaaaggaaaacagcctatacaaagcagagttgtatttggtagttgattatcattattcaatctagttatcatctagagaatcatgaaaaatagttaaaagactagatgttgtttaaggttcaactatagttcaagtaaaatcaagtggcatcaaacttgagatgaatgatatactctaaaaataagagccatataaatcatctcatcatcatgtttcactaaatatatatattgttttctctaaatcttttaaattgttaacaagtatttgaatgcttttacacaagtattacaacattagaagcaaatccaaaaactaatgtggtcatagacatagtctaatgctaagctttcttggcttaagactaagagctcttttggtttggacaggtttctcagtaaccaagtttattaccttcaaaactccacttggttagtcaaagttttctctttttaaaaccagtaaagcaactaattgtaacactaaaataagatgttttgttaatcaagtttatagtgatcaatttgtatgttgttttgttaccatttattgttttattatcttaattaagaatggtttaatcagcaagcatagtccctaaaagtagtgatgggaggagttgcaaccactctctttctgtgcccaaatcttctacctaaacagagaaagttttggaaagtgacaagcttgattgccatgaacatgagaatcaacactattagaatttgtctttatttatttattttttatgagaactgcgtgaaatattaaaggaatgttaatgttactcttattttctttttataattttatttaagatacaccgaactatgtataaattacgattaatagaagtatttaagtatgatagtgatcttttcaaaactaaccctgataatttttagttaattgcaactttttagtcaactttcgcgctctaaataacatgttgattttttttttcaaatatataatttcataacagtattcattatacttacaatatcattctgtaattttttttaaaaattatgaataatttacaatattgaaaatagatttcttgatgttccactttatcatgagagttaaaaaaattcaaatttattttcgacattgtaaactatttgaaattttttaaaaattgacagagatgtcaaaaaatatttcaacatatattttcaaacacagaatttcactaagagattgtaatagaaagttgacagtaacaattgttttgtgtcttacataaaatactttctgctcaataccacataatgtaacaatagttaatgaattttttaatattatttattaaattgaaatatatgaaagtccacatttaattgtaactaaagatatgacacttattgtggtgttaaagcaccttaagagatgcctaagagatagtccacaccactccaataaaatcacactatctgccctctcctaaacctactcatgcactcatttcccaagtgtcccaaaaaatcctcctattttgccatgtatcaattttcatgcacaacttcacctattatatatatacacacacagaagagtgtcattatcactaataagaaatatagaggagtttgcaaagagagccaagaagaagaacaatggccactactacttccactaatattttagccttattgctaatgttcctaatagtagtaataattccaaaatgtgagtgttctgataattatgggcctgttccaaattctgatgttgatctgttggaatttcctctaaatctggagtatttagaagcagagttcttcttgtttggagcattgggttatggcttagacaaagttgctccaaacttgagtaaaggtggtccaccacctattggtgctaaaaaggccaatttagattctctcactaaggatatcatcttacaatttgggtggcaagaagttggacacttgaggttctttcttttatacatttaacttcttattaattacttattacttaaataagattaagaaattatgtttggttatattgcattaatttgtagggctattcaaaatacagtgaaagggttcccaagaccattgttgaatttgagttcatcttcatttgcacaagttatggatagtgcatttgggagaaaactgaggcccccttttgatccttatgctaattctattaactttcttttggcatcatatttggttccctatgttggactcactgggtatgtaggtgcaaatccaaaactcaaaggttctacttccaagagggtaagagcatgttcggtattattttctgtttttt

SEQ ID NO: 24660 - DNA, 2515 bp, Cannabis sativa
  modified_base (233)..(235): a, c, t, g, unknown or other
cccgaattcggggtccaagtccaggctcaggtctaggtccgggtctggggtccgggtccgagatccgggtccgagattggtgttgaccccaaattttttgtaactattataatacaagttaatacggataattaattatatattaaataatacaacatacattgtattaaaaaatttggtcgtaataattaatacaatacattgtttaattcaaacatagtgttatttattannnaatacaatacgacttttatacggcgtatcaaacgagcccttagtctttaatagaattgggtttgtctaatgagaaatttaagatgtcttgtaataatttgtacacaatcaatttaaaagattattagacctgtatttaaaaaatttgagtgagatattcatttctaacccttcatatttttttatcaattatttgaatgatagcttaagtgagcctataaaaactcaggttgactctaaaatttctaataacattcacaagcttttatcactaagatttatgaaagaaccctaagtttttatgtttttttttaataagaaaacagtgttaactatgtttaataatgaaatgttgaattaattatatttaagtgtcgaggagcttaggaaactatttgaaaacaaaaacatttttaaaggaaaaaataacaattaaattttgatacaacaagtttgaactcttttataattttcacccattctatagagggaagaaaaagttatacgtgttccttcaaaattgacgcaatcgatgaactaattgtgttagacttttagtaacataaacattaaaaatagattaagcaagcattgctagctattagacacttaaaaacgtttactaccatatcggtccatattgtaagtgattaatatttttctatattatttattgaatcaaaatgtatgtgatttgatatttggtacttcgaacgaaacacgacatatcacaacaatgtacttgccataaataaatttcaaaatagtaaacttcatactttcagatatagggatcgatcacaattaatcagaatatataatagtaagtctactagttttaaaagccactaaactactctttattttgtaaaagaattactcattccttcattttctatttattttattttacggttagatcatgtaactttatggcccataacgtggtcaattgggcttttacccataattactattgttgctactaatcctaagaacatttattataatgaccgtgaggtctaatgtcttatgaataaacgtttctttaaaaaaaaaaaagttttaaaagccactaaatcttatttacctcccatcccacattgaaaattttcatttgtttactttttccctctcatacatatacataattttatttagatattgaacataattatgtatatgtatgagagggagacaagtaaacaaataaaatttttcaatgtgggttttgatgggaggtaaataagattttaatatttagatattgaacataatatgtatatgtatgggagagagacaagtaaataaataaaattttttaatgttgggtgggatgggatgggagctattttaatatttaaatattgaacataatatgtatatgtatgagagggagataactaaacaaataaaaattttcaatgtgggataggatggaagctaaataagatttagtggcttttaaaattagtagttcttattatatattctgatctatccctaattttaaaagtatgatgtttactgttttgaaatttatttatggcaaaccaaactataatagttaatatatatttatatgaggttttgtatttatttcaaatatttttttcttgtaagaattgtatggccattttattaaaccattttttcttcattcattaattcttatcagtaatacatatcatttcaccatgttgtggaatttttacacttgtttttacttaataacacctaccttttatattttctctttgttatacttacacgtgttaaccggtataatatttttaggaaacttttcttaattaacaaaattttgtgaattttaaaattattgcataataattttatattataacaatttatatcttatcttactactagtcaataggcctcgcctgtggctggttataaattttttaaattagatgtatgaatatttattgaataataaaatagtatcaaataattttaaatttattttaatatataatttaaaaatacatatttatcatataatttcttatttataaaattaacacataaaaaaaatatcttcaaaatgtatattatactaaagaaaaattaaaaagcgaataatactcacacaaaatataaatctaaaacaaaaagaagactataaatttattgaccttccatcagtttacaatgtattgatgggtcgccctgccttgattagactaggagcggtaagttcaatcaaacacttatctttaaaattcccaacacaagcacgaataggtgattttactag

SEQ ID NO: 24661 - DNA, 3946 bp, Cannabis sativa
ttcaaataattatactattttaattattaattcaaataaaaaactaaaatattaaataaaactaacactacgtggcttgacacgtaacaatcatctagtataaagatatgtatgaatatcactatattatttagttcagtatacatatcatatttatattatttaattaaatttaaataaaaaagaaactttaaattcaaatgtaatttaatataagatataatatgtatcccttaaccctaatcctattaatattatacatataattgatatctctcttccatataaatttgcatttgggattcagatttaaaataaaggaaaacaagaaaaagtatatattctctctttagtattgatccttttacaaataacaggcaaatttatatattaaagagcaataaattcacagtacaaaagaaaaaaatgagtgtagaactaatagatagtacaatgatcataaactttatcgaagagaaggaagaatttacttctgcggtacgatgtcgttttgcagaactggacatcgaccaagatggcgttctttgctacagcgaaatgctgaaagagttccagtctcttagattagtagagaccgattttggtaatgatgtgaagacaaatccagaagtggttgctaatatttatagttcactgttcgcaaagtttgatcacaatttcgatggagtgataagcttggaggagtatatgacagagacgaagaagatgatgaaggacatagccgatgatataggattcatgccaatacaaatggtgttggagaaggatagccttctcatgaaggctgtcgagttacatcactcagcctcagcagcacatactattgattgttagggctacatatttttctttcttttttcttctccgaatatattattagtctgaatattagtgttattgttttatttttgacatgatatgtttaataattagtggttcgttttttgtttaagtaaaactactagctactatgtactccattcattgtttatagttaattagtggagactgataagagttctaaatatatcaataattatatttttaacgaaaaaataaatcatgaatgaatttaaatttattgataatatttgggtctctactagttatataaagtacaattgcaaaatagcatcacatgggatatcgtagtataatttattctttatttatttatttattgagtaaatgtataatttgagctaaatttactcaaaatctacactaaacaagtgcaaacaaccttcaaataaataaataaataaatatatataagaaggaacgggttaaactacttagaacaaagattctttaagtttctttacatgtaggagttagttttatttaagcaaaacttgaactccaaatcaatttctataatcttaagagtgacatgaaagttttatagttattgatgaaactcagatattagttagataaaagaacaagtttaaaaaatagtttgatcaattattaattgaaaattattctaaattaattgaacaacaaattgttgattggatttggatttaatttcaaagtaaaccatttccattattattggatgtactttccttacatttagcagaagaggtaataaggtccaggtccatacatgtaaacaaataatacacaaattaaaaactttcttcccttgatataatccactaaagaaaatggtgaatttgtatcagttcttttttctcatttcaaagcttagtgttgtgttttgacattaaaggaagataaaccaaccgtatcacggctctttagctgatcaagctgcttcttaccgcgatgaagtaagtactcgatgtaaatgaaatttttgcgatctacttcctttgcattgttgcggaactctgcagacacaaaagattcgattttgtgtcgatcctcagctgattttgaacgcgctgctcgtagaaacccccggtacagactgagaacttgtttctgcatcccggaaagccttggtccactggaaggtgccattgaatctacttgtgttaggcaccagattttgtcaagtgtgtcaagcaattttttaatgctctcttcctctgttctgcaaaataatacagatcagaatgaaatttcggttagttgtaaaaccaactatactgtttgagagctgaaaagtaaagacatagctacaaaaatagttgaggaagtaacataatcacacactggaaagaagtgaggatatgatgaacagttcctactatcgttattagaacatatttctattaggtaaaactgttctctacttttatggccgttaaagatattaagcaattatacattagtcaaagcaaataaatgaagattagaattctcaaatgcaacaaaatatcaaaaatggaaaactcaatcccattattagttttgtaaagataaacttgatcaaacatctattcagatacaaggaagaaacaactataagaaggaaaagcttgagctttgccattaaagtctttaacttccatttcaacaatctaaactaaaaagatattcaattttgaattgtaatactaatgacaacaaacaaagctcaatattcttgatatgtgtgaaaaagcaacaagaaaaattggacaagggtcattgaagactttcatcgaacatatggtaggcaattacaaaaaacaaaatgcagagttcgtaaacatcttttaacagatcataagatgaatcgtatcaatttcctgctttcgtaaatcccataatttagaaattttgattggtaaacgaaaacatacaaaaaaaaaaaaaaacacaaagatcattacaatctctccaagattaggaagatgacaccatttgaaatgtacccaaatgctaatttagtcgaaatttgggattataattaagttaaggcatttatgcatgtcgatctgaaagaagttagaaaacgcacaaaaccaacgtacctatgtcaacaaaaatttacgagagagcgtaggtggagaaggaactgtaaagtgccaaactcttagggcaagaagtgggaggagagagagagagggatagctccggtaactatggcggtgggtgggtgggtggtgcggtgagtggatgtattatgtggctacgttgctctcaccactttaaatgaccattccatcactatattttgataaaaaaaaaaaaaaaattaattagaattttttttcacccgaactttacacaattaaattatgttttttaaaaattttgaagtggttaattttttttttagaattattgagataattaaatttaaagacatttatttagttttattaacgaaagtgtaacatatatgaatatttaggagtataatttagtatatgtgaaagttcaagagacacgatttagtagatattaaagtttggaagcacgatttaatatataaacaacaaacattttaataaaattgaatggaactgaataaaaaaatttaaatccaacaattttaataattcaaaaaaaaaaaaaaattaacaacatgaatgccaaaaatcttaataaaaagttgaaaaaaaaacatttttctttaaaggaattactatgttttaaaaattataaaagtccaataacctcaactcaatgaagcattttagtgaactttagtagtagttttcatataatttaatttaaatataaatgtagaattttatattcacttataataatgaggcttttacaaaaatactggattttgaataaaagtttacaatttttactgtcacacgaaattatttacaaaaatattatctttttataaaacaacttaaaacaacaaaacagaacaattaaaaacaacattactggtattcataaaacaaagtgcggattggaaaattcaaaatctgcacttgtgcggattggatgttgattgatatgtaaaagtaaccgattcaatccaatccacacatattta

SEQ ID NO: 24662 - DNA, 1972 bp, Cannabis sativa
tataaaatattaataaaaaataattaataaattaaacgggtccccgtccccgtcccgtttaacattcggggataaaatttaatccccgtccccactccgtttcccgtttagacgggaaatccccgccccattaggggcgggtccccgcaggacaccatccccgtggagaaaatgtgcatccctacatatcatatcttacatataataccaatgtatttctataactatattctgtttttttttttatctatattgagtaatgagataaacttattttaggtaaaaaaacaaaggttatttttatttaaaaatatatttctatcctattatgctctacagctaatagcaataaatttctagtaaaactcctcctaaattctaattgcaaattaaatattcctatctcttaccttattaagcaaaaatcaaaatacttaacaattaattgaaatgtgaaaacccccaagtgcattaatattatatatatatatatatgctattataccaaaaaaatctttaattctcatcaaagcaaaatccaaaccttaaacattcctattgaggcattgtacaagctggattatatgtgtacttacctaagaacttagcttttatttatttgtttattgcaatagaataacttacctcttttttatagaaggtgtttgttgaggaatattgacaacattgaatctactcaagtatttaaaggtcttttttgaacaccaaaattatagtaaatagacacaaaaattatagtggttcaattcaaaacgaagtaagttcaactacttataagatagtagtaggtgaatgttacaaaagttcgatcattatgatagaccgttacacataataattaactacaatagttataaattaaatgtaacgtctgctttaatggtgttttaatacttcatcgtttggtttggtgtgtgtgttcacaccttttttgttatacaatactagttttatttgattacaatagtcacacgacgtcattctcgcggggaagggtaaatttattcgatcaacaatgtcaaaatatgatgacaaggtaacacttttgtttttttttttcttttcttttttgatacccaaacacttttgtgttgttaattatacaatgctttggcttttagccttccaaataattcttctgccacccatcaacatgactcatgagaagaattttttgccattaaaatttaaaatctcctcactttattgtttttatttttttataaagaacttgtcgacaattaaaagttggaaactttagtatcaaaaataaaataaaataaaaaataaaaaaaaaaccaatattattatattaattaaaaaaacatgaaacaattgaccaaaaccagatttgaatcttaataatatgattaataacatagttaatattctccgaatttaaagttaaaaacaaataaataaataataataataataaaatgcacctggtttatagctataacattggaatagatagattaaatggtcaaagtataaaaaagaaaaaacacaacgtgcccctaaaaaagctctctaaaggttaaaaatattaaaatttggttcaagccaaatcaaatggtatcaaaatcaacggttgagattaattctcaacaaatctatgggtcccaaataaagggttagtactttagtggaagaagaagaagaagaactagatagtagtgagactagtgagaagagtgcctatgaaattgccattcttaacaactatacataacattatctatatttgtatacatataaaaaagtgtgttataatagcttatatctctctcttctcattctatatagccatttatttctttgtttcattctcacctttgtttgacttatcatcacactcttctacacccaaccactaaccaaccctcttcttcttcttattattattatcattactaagaagaagagggagtaattgaaaatggggttg

SEQ ID NO: 24663 - DNA, 1718 bp, Cannabis sativa
aaaaaaaatcgagtatttttttttttaataattatgaagcaaaatattggctaagtttaagtttagcacatactagaatatatatcaaatttgatacaaaatataataatctccatttacaccatgatgattgttttatttttttttttatttatttatgttaatttaaaagacatagatcaaattatttcatggaataagataaaatttttatgtaatatttttaataaaaattaaattattttgttgatgtttaaattagtttgacccaaatacatttatatttaatatatattatttaattataatattttcattaactattttttaaaaaaatttaatttattaattatattagaatacaattataaagagaattaatactatatataaagtgtgattatttaacgaaaaattatttttcgcttatttctaatgaaaactattgttataatggattttgttattttttctctcaacaaagttaacaattaaaaataacagtactacgtaaattaaataattattatttttttgaacaaatttattatttattttgcttaaaatatttaagtaaaattctttattttatttattgaaatataactcatacaattgtttaagagaattattgttaatagagaattattgttattatacataaaaagaatatggtagatattttaatataagtctaaatttgaatttgaaagaaattttctctctttaaaagatatgatcattaaattagcttagatttaattttttttattatttttatttgaattaataactttttatcaattcatacacatacatataacaaaaaagaaataattcaaagataaacactatttgctgtagatgttagtttttatttctctttcaaattttttatgatcactatatgctcatatatattcttgatttatgttaatcgttgctatcaatttttctgaacaacaaataaattgtaataaatatttgtgttagattgatgatatttatatatgatttcatattttttagtaaaaataaaataataaatttccaaaataaaaattgtttcttcttaatttagcaattttcatgtgcattagacatggattcttttttctttctttcttcctaaacaagaatatattattgtccttcctttcttgacatatatagctagattcttttatctttcttttaaattaatcaatattaggaatgttctttctcctctgtctccaccttcttagagggcccatgtctaataataaaacaaaattattagaatcctaattcctaaatgctacacgaaacttaaaatcatgcaacaacaagacattacttctatctctataaatacttgagcaatatagaaaatttaataagcataagtttccatttcaagtgttccaaaaaaaaaaaaagaaaaaaatattttgtattttttttgtttataataaatattattatggcgagtgcaacagcagcaggaggaggagtgaagagatctgagtcgattgcggatagcatgccggatgctttgcgacagagccggtatcacatgaaaaggtgttttgctaagtacattgagaaaggaaaaagagtaatgaaacttcaccatttaatggatgaaatggagactgttattgatgataaacttgaaagaactcgtgtattggaaggtgttcttggctacatactatgctcaactcaggtacaat

SEQ ID NO: 24664 - DNA, 2354 bp, Cannabis sativa
aaaaaaaaaaaaaaaacctaaaatcataacgacgatgatgacttgtttctttctacacactaataggaaccaacccatgggggtgcattggtcttaccatacgcaccaccgcagagtattaaaagctcctacctaataatcagttgcagaccttgctgcttttcataatcagaggcggcgcgtgaaaggccacgcccttcatctcctttggatgtggggggccgccagtgaaccctgctccctcgttacggttgcgcttcttgttctctttcgccttaacccacactccaaacagtttcagtccatcttcattctcgccattttcttcttcttcctctgatgattcttcagcctcgttttcggcgtcatcgcaatcttttcctcctttcatggacctgaaaatgccttgcctcatgatccgattgatctgatcgggctctactttcatgtactccgttaaaaaagctatcagttcgtcgcactgttttttggtctgcgccagctctgacgacagaacctcgttgtccttcttcagtttctcgttctcacccgataaatcggcgaactgagtcatcgcgatagctgccgtctccaccgatcccggactcttcgaatccggtgacgatgatgaggttgaccctaggtcctcacctgagttcgacggtgataaagaaccctcgccggtggattttccctccggtgagacctgagctggagtcgacgtcgtggccaacgttttccggcgccttatctcggacagaagttccttctgccctcgccggaaattttcatttgcgaactcccatttgtccggcaccacctttctaaatccctgaaaaaaaaaatatattcatttagaaaaaaaaaatgatattaatcagttaataatttaaaaaatgacggaggcgacttaattgggccgccaaacacggtcaagaaaacccattttgccggcccagaactgtagctcagttgtactgaatagtggagtgtttgacaaaggacgcaaaaaagacacataatagccttcaacaaccgctagttgaaagggtaatatcgtccatatagaatattccaagttttctataattaattaatgaaaatagaaaccaattactattaaaagtctctaaactaaaaccactaatttcaatgcccataaattaaattaagttgttcaattctttaaaagacaaaatatttcaacgatgataacaaggtgaaaagtctaaatcaagataatatagcataatagaccttaacactttcatttcataggaaatatatatattattaacctaattaaaattattaataataattaaaaataataataataacttacgtaggtattgagttggcgaacaaagctagagaaattattgtgcttgaaatatttgggcaataaatccctagcgaaatccgccgttttccacacgacaaaagcggtgccgttttcattccacgagatcacatcgtccgtgatcggatcatccaccaactgatacgtcttcgtcaaaaacggcgccggaaccgacctttgcgccatttttttttccaaatttaccctctcaccaacccccaaaattattatttattgtataaaaaaaagtaaagaagaaaaagtaaataatgataataacagagtgagtattcgattcgaatatcgatttgtgatctccgattcgatgatgatggatgttcagatggaacaactaaagagaagaagagcagtgaggaactcccaaccccaacagtagaatccagagagaaagaaattagctgagtgaacgagattgcttcgaggtttacacctaccggcttccatggcgagccaaaacgacgacgcttatgatgattccctgggttcgaattgggaaccacaaggctaagaccataacttcctttaattttgtctgttgagagaaaaaaaaaaagagaacgaaaaataatatcaaactcttgtgtatttggtctatgtgtcccttataaaggaaagaattggaaaaagccatacatagatagtgatgtggtttctagaaatatttagaagctctctctattatctatttaaataattaaatatccaatacttcttttatttctatcaatacactttattggaaaattttaaaatgtactgatatatttttatttatttatatatttaaaataattttttaatcaatgataattatttaagatatttttcaaaaaattaaaaaatttaagaaatttaacatgataaaaataaaatttaattataacatacatgtatataaaaataaaaaatttatcaatacatttattttatttaaaataatgcattataaaatcatcccactttatattac

SEQ ID NO: 24665 - DNA, 1271 bp, Cannabis sativa
acatgcacgctaaatatgtattcacatatataattattatcctaatcttacatcaattctaaattttggtgtaccagtcaacctgagtagaaattggtgcttgacaatttaaagacccctaagttacaacatacataaattggtaagtgatacgttaatatcttttcggagacttaaacttaaaactagaagtttttctatcgattagtatataaataccctaaatattgagagaacaaagaaaaataagacttcggtaaaaacacccaaaaaatggcaagccatttcttaaaaatgacaaactttttttcttggtccctacctggtaaaaacagtagactgtttctaaaaaaacagttcaccgttttctactgcagatttttataaaatctcatttctcacacaaacctaacacaaagctccagaacagcttaaaacatcataatggacataatctaatgaaaattaacatcaacaagtctccaaatcaaaatttatcattaaaggttcaagcttgagcttgaaaactcaactcaaacttaaacactaatacaaccagcaaaactagcttgaaacaacataactaacgtaaaaaatattagcagaaaataaccccaagcaccataaattcaaacagcaacaaaaactcccaaaacatgcatggaaaccttacttttctctaaattttttaaaggaagaaggaggataagatcttacctttggttgaaatcctacttaataatctcttaatttggtttgaatcaaaagaagaacctggttttcctcttatttttggtttgaaaaatagaagagagagaaaggaaagagatgttgtttgattaaattttgttggataatgactaacttattcaccttagtttcatactaatacttaggaattttgctattcgaattcccatatttgccaccaaagacaaaaaaaatatcaaaagacaaaaaaactacttttaatttactaaaaagtaatctttccatttagagagaaaatagtctaaaatcataatcgcgaacaattatgacattccaaaatatctaactatttggcctcactaaatctaagatatactaccatatctatgtggggatattggcggctaaaccacctgaattttacggtttgtaacagttaaccacaaaaactaaaattttggcggcataaatacctaaactctggttctgttttactctgtacaccttcatccaaaaatcacagttaagtgccacattggactgtccacgtgtacacactt

SEQ ID NO: 24666 - DNA, 10059 bp, Cannabis sativa
ctggtacatggagactggagccactaaccatgttgctgttggcacaagcaatcttgatgctgcaacaccatataagggtactgaaaccatagttgtgggtaatagtaagaaattagtcatttaaagtattggtcattctaccctacctttcctattagatactcagtccttgcatttaaatttagttcttcatgtcccttccatgaaaaagaactttattagtgtttctcaactaacaactcataatgacgtatttcttgaatttcataaatcctactattttgtcaaggacaaactcacagttacagtacttctcaaagggaaggctaagggtggtctataccagttggatgatacgtccaagtcctctgtccagtgtcatcttacaattgcctccaatgactctactgagcattgtacttgtttgtataattgtcattttaacatactagttaaatcatgtactagtgaagaaagtaataaaaaccagttcttgttcctattcttctgatttccctagtcaagtttttcatgtttctaaaaccaatgacataaacaattggcattgtaaacttggcccagcatataacacaatggctaaattttttccacatatctcatacacggggtcactaaaaactctgcaattttgcaaagcttgccaacaaagaaaaatccacaaactcccttttcccaattccaacagtagagctaatcaacctttggctctcattcacacggacctatggggtccatcacacatcagctctaaagaagggttcaaatattgtgttccctttcttgatgactatagccgatattgttggatatttccaagcctatgggatccatcacacatcacctctaaagaagggttcaaatattttgttccctttcttgatgactacagtcgatactgttgaatatttccaagcctttgatgtctttataaagtttaaaagtctagtggaaaaatagtttcgtttacctataaaaagtgtacaagcatattagggaggtgaatatagaccatttgctcaatttctagctaatcagggtattcattttcaacatccttgtcctagaacaagtgagcaaaatagaagggctgaacgcaagcatagacacatcacagagacaggtctaacacttctggcttaagcaggtcttcgaatggaattttggtggcatgttatggcttctgctgtcttcactataaataggcttcccacacctattctcagcaacataagcccttatgaatacatgttccacaaataacctgattacaatctgctgaaaccatttggctgcagttgctttcctcatctcaaagcttataatggtcataagcttgagcttagatctaaatagtgcctattcttgggttatttaactcaacacaagggtcatatctgtgagcatcctaatggaagaacctttatatctcgacatgttgtctttaatgaaatgtattttcctgctcatcaaggtgcaacaacatctcaacaggtacctgtttctacaccttatcccacttccacttttcacagtgttagtgctaatatctcttacctatccatcccttaaatttgccaatagaacatgagcaaacacatgccatagacaaaaatccacgtgattaaacacatgatttaccccatgaaataaactaccagatggaaattaccctgagtcagtacatattcctttccttgtcagaaaccaacctgaggaaatacatgaaccacacagaaaccaacctggtccaaatatctcattgctagaatatatccaaccagcctttatttcctcctctgtaaatctcaccaatgacagtatcagtggtcaagctcaaactcacaatcttagttcacaaaatgtcgttaaccctccaatttctccccaaataccaaataatcaactaccacacccgcatctgaacttcccaacaacccctatatccctacaaaatcctcccatcacacccactgctcctttgaacatttaggtactagtaccactactaggatccatggtatgagaattatatctcctaatggaattgtcaatcccaaagctcatctggctataaaatatcctttgaatgaagctcccattccttctgagcctcatacaacatcaatagcttttcattatcctcagtggctccaatctatgcaataagagtttaatgctcttaaaagagcagccacttagacattagttccatattccccatatatggctatcattgggaatatatggcttcataaagtaaagatcaacactgatggtgcctgggagagtttgaaatcaaggctagtagctaaagggtacctacaaacacctagtattgactatgaggagaccttttcaccagttgtcaaatctgcaactgtgagaataatacttaccattgctgtctctctcaatcggttggtcaaacaacttgatgtaagtaatgcatttcttaatgggaacttataggaaactgtctgcatgaaacaaccagagggctttatggatgagtcttgacctactcatgtttgtaaaatacacaaagctctttacggtttaaaacaagctccaagagcttgaacctaactttaagggacactctgttatagtggggattcactgctttgaaatctaataactctctgtttacttatggagcagggtcaaattttagaatttttcttgtgcatgtaaatgattttctcattacaggacccaacacaaatctcatcgaaaaactagttctaaacataaataagtctttttctttgaaagacttaggccctgttcattacttcttaggtgtgaaaatttttagagactcttttgggatgtacatgtctcaaaccaagtacatcacagatttacttgtgaaactaaacatggagggagaaaaaccaagtcctaacccaacaagtgcaaacactaaactttcccttaaagaaggagaactatttgaagataagactttgtacagaagaacattggggacactacaatatctaactttaacaagacctgatgtacgttttatcattaacaaactaagatagttcatccatgatccaaatgacacccactaggaggcctgtaaaaagttaatgaggtatctaaaaggtaccatctcacatggtcttcatatcacaccaactagtactttacctcttgaaggatactctgatactgattgggcatcctgtgtggatgacagaaagagtactagtggataaaccctgtttttttggaggaaatttggtctcatggtctactaagaaacaaaatttggtggccaggtccagcactgaaagtgaattcagatctcttgccaatgtagttgcagaaattaagtggttgatgtcactgcttttagaacatcaaatcaccacttccaaatgccctattctatgggtggataatcaaagtgctactttaattgcatcaaatcttgtgttccatgctatgtctaaacatattgagattcatttgcactttgttagggagcaaattttatctaagcagctgttagtttgatatgtgccagccattgatcagattgctgttgtgcttacaaagtccttatctacaaacaaatttttgtaccttagatccaaactcaagatgtcagagacaacttttcgtttaaggggggtgttaaccatgttttggggtctattacttaaccaactattctaattgttagtagttaagttagttggtgtatgttaattctgttacattttttttgttttggatcttgactatgtaatctctgttgctataaataaaggacttagctaactcatttgagttaatactttcattaatttcttgctcctctgttctgttcaccttttcatctttttctattggtctctaactaatcgtacagaaggtcttcacctttcttcataccatttagtgggtgagagagaataaagagaaccattaaatgtatatttttattatttaatttttttttgtttttttgatcaaagaagaatatattcattaatcaacaaaacaagtacagacaaccaaggctaccgcaaccaacctaaaaaattgcctccacctgaggactctatctagttaaaagagccaatatcttcaactcattactactcaactttcctatgtttaatctatacaacctgtgcttgacaacatattttatctctttaaaaaaattaaagacagtataggagaagttatcatgtacgcatctatttctatttctcaaaatgctatacaccgtagttacaaaaatagtaaaaagaagaattggcttggcttcctttcagcttaccagaccgtacaccccttagcaatgttcggctaggctgtaaatcccagccagtcaaaaatagtagcagtgcctctctttgaaaaatcactagcaaaaaagagatgctcatgattctcaacatcaacatggcagaatgggcaagagatagtttccaaaattatatggaatctctcaaacttgtcccttgtgagtagttgcctattgatcattttccacaaaataaatcgatgtttgggagagtaagcctattccagacagcttcattataatagatctcctgttggtgaaggatactgttgtagagtttagaagctttgtatttccctccattagttgctgccattataacctgttcagtaaattcaaatctcaagttatagattttacgccagtatcagctagtgtcatttgggagtaggtactctcaaaagttttttcgtttcaagtaaatgggattaatccacttgatccagagcagatcatgtttcttcattatggcccagatatacttaccaattaagactctattccacattgtcccctcttgaaagcccaaccctccatatctttttaggaggcacactttttctcaagacaccacatgaatcttgctttttttctcctttgagaccctacaggaaacctctacaaagcttttcaatatcctgaattatgctctaaggaatgataaaaatactcatccagtagttgtggagccctaacaagacagaatgaatcaactgagctctacttgtgaaagagagatgtctcgtagcccaagtaagaagtctcattttgattttcttaattataggctcacagtcttccttcctccatttggttgttcttagaagaactcccaagtatttgagcgggaacgaaccctctacaaaatccaaaacctccagaatgccctgttttagatcatagagactccccaaaatatatcatagatttagcattattagctcctaggcctgaaactttaccaacatcaagggctcttttgagatgtttaacagctgatgacctaattcctatattttttttttcttttttaatttagttaaacattttagttttagattttagtttttttttaccctttagctatagctattatgggccagtttgacaccattgtggtgtaggaaaaaacacctgtagatgtgttgtgagaaaaaaatagctgtaacaaaactgtgaaaaaaactaacctgagtatttgaaaaattagaaattttaaagtgctgtgagttgttaagattctattataataatgataatgttataacctagttcattattataaaaaatatataaaaaaattatatgataaatttttttatttttctatatatttttaattattttatcctatagtataaattcatacgtatttgataaaaatattttataacatttttaaattatatttttatagcttgtaaaacgaaaattttaatttataataaactctagattaatgtgatttgttaataatataaatataagtataaatataaaatattgtttaaaaaaaaataaaagataagaaatttaaatattatttattttaaatattttttcctttaaaaaatattttattttttttaaatgtatgataaataattaaatatttttttagtacaaaataatttattatagtttttttttttcctaaaagttaggttaaagcagcttttaacttttctaaaagctatgccaaataagtcatagatcttatttttgacttctttcactatttatgtataatattttttttatgtacacatttttttatttcacaatcaattacattttgaacaaaaaaaaaataaaattttagaagtttaattggttaacatattaaaattatgcatttttcgcatctaaacctttcaattattgtttcacttgcactaaaccctccatgctcaaattttagtggtaaaattctccaaacaattgaaccattagcaaatttaaggtacaatccttttttctcagttaaatgtcagcatgaattgcttacatggatactcttctacattgttgacctcagaatttggccaactaatagcgcgctcatattaaactgatgcttgccacgtgttacacaattaaaattagaaagtaaatgaacacaagtattttacagaggttcagtccccttagttagcgggtaatgacctactcaccttttagttgtatcgatactgaaagataacactattcagatcactatatgtgagatatgatatagctctcttaaggttacaaattaggaatcaaagatggaaaatctcaagtgttgagagatgctatagtgggcgtgtgagagagaatgctattagactcaaagcttgactgctaaatgacttagggacttagttgcttaggctttttagggttgagttaagactctttatataggagagcttaaaccctaattgacaaataaaatgagtagatatttacatattaaattaattaaatacaaaagactaaaatgtcctttaaaagtaggtattttttatctactttattgggctattaggcccaattcccagtccaccttgtagtccacgtgtaagactgtgcaccagaatcttaccaggtcgaatcctcgttggccaagcacttgtaggaagtaggttggccagccctgtgctgtcgagaagctggctatccctaagatctgagactaccggttccaataggtgccattttacaagcgctccatccctacattacaaatgaggaatagggcgaatcacatcctgtctcttcctgtagagaagagaaacataatcagattggccagtggggccaactttcagagctatagcctgtaccctcctgcctctggagttgtgggggcctagggcccatcggttggtgtaaaatgagcccctactgctgagggtgtttgtcctagtgataaaaatgtccgtggcatggatgatgatgtgcctttgtcttggatagctcaataccttgattgcatgggaccaaatttacaaacctaggaaggctggagacctcaatttctacaatatactcacctaaaataaagcaacaattggaaagtatgtctaggagatttcaacaaagaaggatgacatgtgggtcaagtggaacaataatgtatgcattaaagaatataagtggtggttctacattgctccttcttagtgtagttggtactagaagaaggtggttgtagtgaaggacgagcttaaaaaatttataaatgagttgcaattctaaacaaaaaagtatacggaaatcaagggtataagctcatttggctagatgtggataaatttcactagagtaaggaggtttggggtcgatttaatctccccaaacatatctttatgttttggctagctgtccaaacatgcttaaagaatagggacaagtttaatcgccacaatatggtccaagattgttcgtgccttctatgtggaattgggaaggaaacctgtactcacttgttctttgagtgtatttttatcaagaattgtttgaaggaagtttagaaatgactcaattggaatgtctcggctgaatctcttcaacaacctttgagatggattgttagagtaagttcgagtaagttagaagaagcttaatttttctgcttgcactattgccttcgtttactatatttggtaagctagaaatgatgcttatcatttattaaaggttgttataattgatatatgtgtaaagaggataattgaaactgttaaaaataaattattatttgtttggtcaaagaagattggcaagcaagatagagagtagtttgaaaaattataggatatatattcttagtttacacatatatagttttaggcaggtcttgtgcataaggtgttgttaagataattttttaaaatttaatttgggtatataagagtaaacgttgtgctaaataaatcacacattaattagacagtcttatagttttttttttcttaaagagtaatgctattaagtactttattgttcccaacactattgatgtgacccattatgagtggttagcgatttcctatattatttataaaatcaaattgtttaggacccaatattaattcataccaatggcagcataccactttttgtagtacttggtacaataaagtatctcatagcatttctcaatttcaaaaatactagttggtctcataaataagaatgtacatgagggaggtggcaaaggataaaagcacaaattaaatatggaggaataaaataaaagtttttattttatagcaaataatagtaaaatgttttagaaaattctacaatgcaccccctttaaagggatgtaccgatgcacccttatatgttttagtattcaaaataattttttagtaatattttttctcattgtaatgtacgttatagttatttaagatatcttgtaaaattttacaaaattcagaaaaatttaacatgcctaagacagggttaaaacagagtgttgcatgtgtgactattttattttaaacgcgtgtgaaataggcttattgacggtgagaactcgtcaactaactttttggccaaaaaatcaaactcttcttcaaacatagaaataagatgaagaaaaagataaaatacaaattcaagtgtctatctcaaagtagagaaaaaaatggaaactttatattactctcattatagtggtttcaagaataattttctaaccccttctcacatctaaggaaggggtattcataggctctaatagtttggattacatggtggtcctaagcgatatggtatcgctttcatgctgcttattgcaggtgcaggtggtggtcttgtgtcttgttcccttgtttggtgttaggtggtctcgagtcgcaggagtagtggctgcattatacccttagtcaattcctcatgctctgtaggtgtggtacctccactattaatatctccttgcttgagatcttgcagaaggcatggccgtactctcctcacatgcttaccttgtccttatgaccatatcctggtctcttcactctcttctagcttaggaaaattccaccaagttttgcagggtcatgcctgagtgacatgtgtaatgtcatggtcgagtgacttctctagggtgcatgctgagtgacttctcaagagtgcacgccgagtgacatttatggatgcatgccgagtgactttcacaatgtcattattgagtgatattatgaatgcccttaccgagtgacatcatgaatgccttaccgagtgacattcacaatgttattgtcgagtgacatagcgaatgtccttgccgagtgacattaacaatgtcattgctgagtgacattgtgaatgtccttaccgagtgactttcatgggtgcgtgccgagtgacttctcaatgttatggccgagcgacattgtcactctctctagactgagtgacattgtcactctcaaggctgagacattgtcagtctcaaggctgagtgacattgtcactctcaaggccgagttatttctcaatatcatggtcgagtgacattgtcactctcaaggccgagtgacttctcaataccatatcctagtgacattgtcactctctaggctgagtaacattgtcactctcatggctaagtgacatttgttggaaaattgttgtgctccaatagaaatatcaaaccaataagattaaaactcaatgacaaataatacaaaggacaaaattat

SEQ ID NO: 24667 - DNA, 5221 bp, Cannabis sativa
  modified_base (250)..(279): a, c, t, g, unknown or other
  modified_base (1147)..(1158): a, c, t, g, unknown or other
aaatctgattatattgaaatgggtgttatttagggcacaaaacccaacatagtcaagattagattgtatatactaaggataatgaggttaaatcatgctgagagaggcttgttttttcgcctaactcaacagtgatgtatgctggtggtgtgtgttgggaccggttggtcgtggccatgagttattgtattggttttgtccttgattaatgaattcttctccttagtcaaataataataataataataannnnnnnnnnnnnnnnnnnnnnnnnnnnnntaataataataataaaagaattagttgtaggtgatacttgaaataatatttcaattgctttttaccacgtttaaattttttattaaaaatattaattaatttttaacaaaagtctactttacgtctttttttgaagtgataactttaaggtcaagtatcacataattatatctaaaaagcattgatattaggtaccaaaggagcctaatagctttcataggtggcaccctacgattagttagaaatattccctaaattttctttttttaagttatatgggacatgctatttatttataccaatagtgatatgataccaagaagagttgccttttagcatttctcataactaaaacattacatttttttttatattttttttttctttttaatcattttttaaaacatattaattaataataacataacaaattaataaattttctccggtgtcttaaaaatataaaaaaaatatctaaaattcgagatgaaatttaagattaagatatagatttgggaaatataatagtgatgactacaagtgaactacggtaatgacaagggatgagatacattgatgacaataggtgagatgcggtgataaaataagtgagatacaatgagacaacaaatgagatacaataataacagttgttttgaatgatcgagatatgaaaataatgcattatggggaacaccgtaattttttttctacaccaccctatttacttatttttattaaaaataatttcttttaacaaagcaatttaaaatactacatatagtaaattttaaacttcttaataaatacttctaaataataattaataaaattgtgcatttagttttaataaataaaattattaatnnnnnnnnnnnntaagataatatatttataattttagtatatattagaattatatttataagtaattattttttataatactaaaaaaattaaattaattgcgcgaagagcggctatattacctagttatctatataaccatataatacttaatatttttttatatatatttttgattaatttttgggttttttttattttttatttttactctttaaagtttttttttgtatggttacagaaatccacataataactcacatagtaactaccggaacaactcaaactgtatttttttttaaacaaaaagtatatagaataattttccttaatttgatttatacataataatctaccaaaaataaattattaaaataataattattttgtagtaaaaaaataataatataataataataaaactcgtaattttcatacaagtcaccgaataaattaaattaaatataatataatattatattttataaaaaaaaaatatttttacaaaataaagagtctgacatacacgtgtacttgtgaatataaattgtctttttcttataaattgttatttatgagatttttacactagatgtcaaatttagtatttttttttatatttttatttatgtttagttttttaaactttttatagaatttattttttatttttattttttaaaaagttctttaattacaaagggtgcatttggtaatattttttaaattaattttttgtttttaaaattaaaaaagtaaaaatattttccaaaatcacgttctataaaactttttttacttttcaattttttaattaagaatcaaaatttgataaacaaaaaaaaaaaatcactttcaatatcttttataatttgtttttaataatattttaaactccgacccccaaattagactttggaaatcaaaccagaccctggtcccgaacttggacccgcccttggtcccaacctcggacccgccttatataaaatcaataaataaaaataaaaatgaaatttacaaaatcatataatatttaaaaatatttaaaatcacataaaatatttaaatgaagggtaatttagtcataccagaaatttaggtctactaaattcaaagagatggtacaaaatatgtagaatatgtaaataaagcgtactaagtgatcattattagaaacataaggtactaaatttatattttgaaaaaacacacaataacaaatagttatttatcgcttgacaaatttattttagaaagaagtttattttctgtaaaaaaaaaaaaagaaaaaaagaaattttattgcaaagatattacaatcaaatggtttgaatatgaaaaaaattatagtagaaacttaaatataaaaataaagttatttattatattatttagtaaatttttttattaaatatattaattaattaattaattttttcaatcataattaatttaattctataaaaggaatgcttacctattagtaacctgatattaaaggtaaaacaaaatgtaactatcatggttatattaaaaatgtaaccattgaatagtcaccctttcccatatatatgaaaaaaactcctaaaattaaatgtatttgtaaacaataaatatccaccgtttatatgattagggtatatgacacattacataatggtgtgggttcgagttctataacagttcctataaatacatacttaaagactttgttattttttcgttggtttgtaagtttttttaggttggcgcaaatgagattaatgtcatgtgatttttgagttgtttgttagttgtttcatattggaattaatgttccaatatcaaggttgatgttgtgttgtttttatgttgtttatatattttaaattttgatattggagttgttattcaattgtgcaactaaaatatatttatctattaaaagtgactatataacgtcgattcttcatttaatagattttttttttatttctgttaatttttttaaatctatttctgttaacttagacgatactaataaaactattaattaatattgttttattatttatattaatatgagattgttatcgtgttatttattcgttgttattaagttgtttgaccaaaaaaaaaagtatatggttagctttttatggatacatatattatagagttggtatacatgtgtattatagttgcttttaaatttatttaatacattagtggtattttttattttttttggagttattttcatgcctatgtaatttgcgtattgaatgaagttatgcatttttttttatttagttgtttaaccaagagaaatgaatatatatacatgttttttttaaaaaaaaaaattgtatgttattttttttttaagttgatgcaagtgttgatgcccaattaattttcatattaaaatgaaattattatcgtgttgtttatttgttgctattaggctgtttaactaataaaaaaatgagtatatatttacttatttagtgtgtagatatttatttttttgagttggtatatacgtattatgtagttatttttaaatttgttttatagattatttgtgtatttttttttatttggtgcaatttgtggagttatttttatgcctatttaatttacatattataataagttgtttatttattattattcatagtgaagtttatgcagttgaaacccactttgtccgaatttgtcacgtgataaccactgctgcgttctaacgctacagtttgtgagcgtcaaacaactttgaaggctttgtctctcactctctcactcgcctagatagtcacatgtgtgttttacttcttcttgtacatctagagaaattttttaacagtatttttgtaaataataaactttctaaaataatatatttaaaattaataaataatataaatatttatttaaagtaatattatcttataaaagaaaaccattataatatcaatcttttttttttgatagtatttgcggaaataaaaattaatagatcccgtttataaaatacatttcaggtttgtaacattacccattgacccgcgtgtacggtttaactcagctttgtctaagggtatttccccacttgcgaattttgcagtattctaaaataaataaataaataaaagtagtataaatatttactttttcatctcatagtatagatatttaaatttgaggtaaatttaatataaaatagaaaaaaaaaatcttaaaataaatgagaaagttattattattattttatattttttataaaaatattaactaataatattaaattttacatcaaattttataatttatttattaaaacagaattattaaaaattgatacatatatatatatatatatatatttgtcaaatatacactttttttgtcatttccatggtcttagtcttctatttctatttctacgtaacatgtcccacaaatgtattattttctttcccctttttctttcttttcccatttgatccccattggtctatgatcgtttagaagtccttataaaaaagctaaacaattctaagtaccacttgtggccttagaatcctctcagtttcattttggcctgaaaatatatataaatatatatatggttataatatatatagccatgtattggaagcttgtaataaatattttggtagtaacccaattagtattagctgttgataaagatctcaccagcggtataaccttcaccggattcaactcatcaaatatcatgttgagtggagaagctgaaattaacgatattggtttgttgagactcaccaatactagtgttaaatttcaaattggctctgccttctactccaaaccactcactttcaagtactttcaaaatacttcttcttctactactgctaattctaaatgtttctctttttcaaccactttcatctttgctatcaaaccaggacaatctgaatctcccactaatggccacggcatggctctcgtcattgctcccactttaggtctccccgaagctagttccaaacgttttcttggccttttcaacgagtccaataatggcgacgccaccaaccac

SEQ ID NO: 24668 - DNA, 5580 bp, Cannabis sativa
aaattacccattgcttgtagaatgttgctctttgtatgatgctccctccaaattttaaagaaaataggtagataagcttgtagtggaatataatatagtgtaatgaagttaagaaaatgagtagagaatgagtgaagagaaaaaaaaatttatggtgggtagtaatggggagttcggctcgagtgaaatgggatgagaataagagagaggggagaggggtaatgtaatgtgggggtaaaattgggttttagaaaaacttatcctattttacaaatgttacgtaatattagtttaggatactaaatttttgaatttattaagcatggaattttaaatttcccaaaaacaatcagtgagaaataaataaaataaattgttttctttttatttattttttttttcagaaaaaggaaacaatcttttgttagtgttacaccaaaaaataaaaaataaatatcaatagctattaatattcacggccattgtaaacttcccaaaatcgctagaagggatacagggaagcctcctcaggtgtaccataaaatcacccagaggcttcaagtaacaacactatttaacaaaataaatgtaatttgaatacaaagatttaagttaccaaaactttttttttcaactgtgaatgtgaatgtatttggaatgttgagggtgttgtcggagaggaaagcttattgtgccagctgtcagaccttgttatgagtcaaacaaattatgaactatacaaggagcaaacatttatagctgccaaatatacaacatcattttaaaatattatatttcttttattttttctcaatccatctaaaatttaatatctttttttcataaaaaaataatttaataattgacaactttaaaaattgtccaccatagtctcacatcatattaaattaataattttttagaaaattaccctatagactatttttttaattttttcttttttcaaatttacagtttaggttgctaaaatgattgcaacactagttgcaataggaatttctgtacaattttttgttgcaatttagattatagcgctaattacaataaaagtttctatgtaaaatttcgtaaaaatgtaaaaaaaactgttttgaagtataaaaatgaaaaaccccctaaattttttaataaaaaattaactttttctcagaaaaaaatgtcaggtggatagttcatttttagcagcactttacgtataaaactggtcttcaaaatgaatcacaaggcaaccccattggagatccccttgatgagatactaagccaagtttctaaattttcgagagttgaagctttacaatcattaatcaagataaaaaataccactatctctgataagacagaaaatgatgtcatctataaaagcttgtagtcgtttatttcccaatagttgattatttagtaaccaatgctaaagttcttactggaaacagctccaatcaagagcaactccaatagaatttgtcgttctttcaaatatatggactcatgccacttgcaatcataaacaattctacttcactttccatggtacttggcaaaaataatagcaaaagtctttaatataaggagtctccaacaccaaaagcatgcacctgatcacgaatctgaacccaactacagccagggttcttcttcacccccctcgacttcatcaattccctcaccatatttgcctcactccatctcccagcctctgcgtacatgtttgaaagaagtatatagtatccagaatgctgaggctttaacctgaacagattctcagctgcccaaattcccacttctacattgccatggattctacatgctccaagcaaagcaccccagacattagcatctgggacaatgggcagccctctaatgagctcagatgcttcttccataaggccagctcgtccaagaagatcaaccatgcaagcatagtgtgtttgttttggcttaacgttgcgatcctgcatttctttaaagtatttcttccccttttcaaccagccctccatggctacaagctgataaaactgcaatatatgataccgaatcatgttccacaccatttttcctcattgcttcaaagaaaccaattgcactgtctagctcccccagcattccatatcccagaatcatggtgttccaagaggttacatctttgtctggaatccgttcaaagacctttctagcaaggtctattcgtccacatttagtgtagaagtccaaaagtgagtttgcaacaaaaaggtgggtatgaaaaagctttcttattaaggaaccatggacttctttgccgtgtttgatcgcaccaagcttttcacacgctgatatcacacccacgaaggaaacagtgtcatgtgtcattcctgaaagcttcatttcagaaaacaatttaagtgattcagagcaatcagtagcttgagaataacctacaatgagtgtgttataagatacttcatcttgtaacgaggtattaaagacattttgagcaagagacaagtaaccacattttatatacatgtctatcaatgcgttagtgacaaacaagtccaatgccaatcctacacgaattgcccttgcgtgaatttcttttccgggacgaagagaacccaatcgagaacaagctggaagaacatttgtgagagttacagagttaggagtttcaccatgactttgcatttgtctaacaagttcgatggctgcaatctcaagcttattttgagcaaagttagcgaccatggcattccaagaaacaatattcttttccaacgtatgatggaacacatcagaagccgctgttaaacaacctgattttgcatacatatcaattaatgagttggaaatgaagacatcagattcaatgttcattctaatactgaatccatggatttccttagcagctttaaagaatcctagttcaacaaaaactggaagcatgctggacactgtgatcgagtttggcctaaccgctgaattaatcattgacctaaagacatctaaggctttatggctgtgcccaatataagtgagactagttatagctgcattccaggaaacctcattcctctcaatcatttcgtcaaaaacttttttagaggccttcacattacgacatttcccatacacatcaattaatgcattgccaatagttacaagacgatccaaaccaaccttggcaacatagcaatgaatctgccttgccataagctcatcttcaagatcaacacaaactggcaacacagagataacagtcacagaatttgatctaatgcccgaagttgagttcatttctctataagatttaagtgcttccatgtttaacccattaacagaaaacacccctattatcgtattccaggacacagcatctctctcatgcatttcattgaagactttccttacaccattcatgttcccacagttgccataaaacgacaagagagtattcccaacaaaaacatcatagccaaaacccagcttcacaacagtcccatgaatctccgtacccttttgaaattccaaaaaatcagaacatagcttaaggacaaaagggaaagtatgatcatccaaaacaacaccattttgaaccatcccattgtaaatccgaaacccgtcatgaattccaacaatggaataggcccgaatgagagtgttccacaggaaggccgtacgacaatatttaatggttccttcaaagagaaaaccacaagtcgtatgggctccaaatgtggcgtagctaagaatgagggatgcacatagagagacacttcgaggaaggaagccattgacaagggctaaggcgtgggcctgcttagcttggcgaagggattgagcacaagatacaagcgggaggagatcagagtgaggctgatttggcgagtggtttgagattgattcagtgagtgtatgaagtgggtggattggaatgtgggtttgggattggatttgtttgtatttgcatgagagtataaagagagaagaacatctatggtgggaaaggtagtataacatgaagagttacagaatactgattcacaccttttccagagtaatactttccctgaaaattcacagacccaattcagcaaacgactaaacaagtaatttcaggatactataatctaaatactcttattttaaaccagtaaattaaaaaacacaattagaatcttagcaactactaaaataatagcaatttcgtaattaagaagtaaaatattcaattataaagtgtatgggatttaacagccaaagtttaagcaatatacatgtgagtggaatgcataaatttgtcacaagcttacaatttccaatagcattatggcaatatagacgtatttgaaaaacatatacatcaaacccttaccatgatgattaaattaatatcataataacctcagagaagatcataactaactgcagattagcacaagtttctctcataagaaaacgccaagcaaaagacttgacaaaacttaaggaaatgatatttgaaataatttgctaaatgatacgaacagatacagaaaatgtaaccaatttaatataaccttttttattttgtaataatatacaaaatttgcatctgcaagaatgggaatgaaacagtgatgacagaaaagaaaggaatagtacccgatctgcaaataaacttcttttttgttagtcttgaaatgcaagttgaaattcctcaaaatatcaaggtgagaaagaaaatagtaatagagtcaataggagtaggcaagaagcaaacaatccttgaagggtacaaagtgaggaaaggttaacccccacctcccctcaaaaaaacaaacagatcaaatagcaaaagtatagatattcctcttaccttattaatcagcccatcatcaattactgcactactaatttttttgaatagctcgtacaaagcttctatttcactgacactaactgcattcaaattaaggaagattaagcccggcaataagaaatagttgtaatgatggtaacaacagcatatatccagacagaaatatctacaaatattgtaattgagaactcatgctgaaacactataactagcagtaacaccggataatactaacatgtaacctttggctaagaaattgaccattcatatcaacacgattaggggtcggttgattcatcctgttaacaaactatatttgctcttaagaaccatttaattatggaacaacattgtaacctattagtctcatcaatcaatcagattgggtaccatttggaacctatcagttcttaattctctcaacgatattgcaaaacaactagataaatgtgaaccaggcaaaacgtcgaacatgtggaagacacaaacaaaaacatgacaatgtcaaccaaaaaccaaattcaatcattaaaatctgaaaaacccaatgtcataaatcatcgaataccataatggtgtcggtcctatcactctttcctggctcaaccacatacgaaagagagtttctggtacctcgactttagacgcctttgattttagttctttaggaaaccttttcactgcaaaacccagctcctaaaatcttaagagtgaacattaa

SEQ ID NO: 24669 - DNA, 2632 bp, Cannabis sativa
tgtattaaaaaatttggtcgtaataattaatacaatacattgctttatccaagcatagtattatttattatttaatacaatacgacccttgtacggcgtaacaaacgagctcttagtgtataacagtacccaatcaacttcattagcgtgagtacttgccaactttgaatcgttcactctaataaattatttgttagtcaactcaataacatcaataacaacatgaattcaattacattattttatgaacaatatttttaataacattatcactgcaaactagctatttaagataaattaacatcaataatatgacccgtctagtcaaccaaaattgtaaacaaaatttctacatacatgaatattatctccatgttgttcatcattttggcttttcagtccatctttcttattgctccatctttaagtttggattgtaatgtttctctcttctcttgtggaaatattaccaacatagattttcccttttggggagaatccaggccgttacactgcggctatccaccgctaaagctcaactgctaccaaaaccaaacaacaattgaattagccaacatcaaatacaacgtttttgaactaaacaagagttctcgtattctcaaactcgaaagatccgaattatttcggggaatttgttcaccaggatcaaaaggaatgacaggaaatattgacttaatgccggggctccttgaatatgccccgggttctggaaatatgtcatttttttataattgtaccaagcacggtggtaattctgtggagatcggagatttcagttgccctaatggttccatttttaaaaatggttactatggtttagaaatggaaagtagaagatgtagttggaatgtgagtgttgggatagaatcaagaggaattgggtttgcacaagtagatgaagctgttagacaaggattccaagtgagttatacggaagcttccataggaaattgtacggcatgcattagtaaattcaatggattttgtgattatgattacaattcaacaaagtttctttgtcaccatcctaaacctcctcatcaaggtaccccaattctatctctaaattcttttatttatttatttatgttatagccttccacattaataattaagtctttgcctttcatgttcataaattaatcctaatattaattaatactgcttaaaacgaggccggtcctatgttaatttgaggctattaggatttgaattctcaacctcttaggacctaaactaattaaattactactagactacaacacatatttaacattaaaagtattattatttattttattacttactaactatattttaattttttttttttcgaaatggggcctgaacggtgggggacctaaggcggtcgcctccttcatcttagctcagggccggcttgcttaaaactagtggaaatttaggattttttttgatgaattgtttgttttgttagattggatcctacatgtagttttttcttttagaaacttttgatctctgaattctattttttaatttctattttgtgataattctatatattcattataaaattttgtatttttcatcacaacaaaattgtgaatattgaaaaagaaaaagttctgactaatattataaataattatttatatgttgttgctaataaaaatatgtggctaaaagtattaattataaaaattataatttgttgtgattaaatttatttttagtcaatactatattgtcattaaaactaaatttagctataacttgtatctaaatattatgtttaactcataagtaactttttattgtgtcaaaaagtcacacattttagaaaaaattatattgtaactaaaagattgttactaattaagtaacttttgtagtgattttatatgctcttatgtattgatttttttttttacttaattaagtatatatattttgtaaaacatttaaaatatatttttgtttacatatagtttttagaatatgaaaagatatatagtagaagttagtttaaaaataaatatgacttattcttatagtactaaactactctgttttcaaggccaaagaacaagtcaagaacaattactatactactattctttatctatatgactaattcttggcataacattggtaattctattatacacattaatttatataaattagtacagttgacgatattaaaatatgctattgttgagactttatgcttccatattcaaagtaaaataacatattcaatgctctccaaattcaaaataaattaaattaactatttatctagttgtgtttgagacagtgacttgtttttcagatgacaatattaaacaaataaatgtattgattatttgaaactatcgtacgaattatgaactagaagttaatatactttatcaactattagttaatttagaaatgtaatgttagtgttgtaattccagcggaaataacattgaggattcaatcatagaatctgcaataaacttacaactttgacagtcttaatgaacataaaccaattaatcaacacaatgaatcaaacccgaaatcaaacaaagaacaacacaagaatttatcctggttccggtcctagagatcaatatgatcc

SEQ ID NO: 24670 - DNA, 2856 bp, Cannabis sativa
  modified_base (49)..(52): a, c, t, g, unknown or other
  modified_base (860)..(878): a, c, t, g, unknown or other
ttattttatcgttttagaaagttcgtatttaggatgttaataaacatannnntgagtagatctaagaccctggtaaaataattcccaacaaaacctcccatatatattaataaataagaaaaatacgttcaatcattttctttttttttttaatttgatgcgcgaagacatatactaaataaaataattattttatgtgagtgttagcacagaattttattaacattaatgagactcttgataattaatgatctgtaataaatattataaaaaaattaataatatatctataaagacaataaatttttacgtgattttgtagttaaaatctacatacgcgataagtcactcttatttttgagttttctgattacaagatacaacttaacatagattctcaatcgggaaagaactgatcatcccttttacaatgatttttgcccctatttatagggatttactatgacatttattctttctaaatatgcccattttctaaaaatgggaccacaataaatataaaatcatgcataatcataaaatatcagtaattaatgctaatcgccctattaatccataatgtaatcacggggttattacaaataacatgaacaggagttcatgattactcaggttaaaccgatctactattgatcatcgttatgatatgaacagagattacttgcaccgaagaataggtatcagtgaactgtactagcaaccattgattaaagattccataattttaatatgttgctgattgttttattcatagctaagtgctcttagttctttgtacaactacaagccacaacttcatatatatgagtaaggaattttctgatatttatatataaatnnnnnnnnnnnnnnnnnnnataatttaatattcaagcatatatcaaaatgttcaactctctattaataattagaaatttctttatagacttttcaggacataaaccctaacacaagaccaccatctacaacttgaaacctgcagctcatggatgtcatcttgtcccttgggaccacaattgtaccccaagccattagagcctataaataccttattctcaaatgtgagagcgggttggaaaatcattgtaacacttcatgcctacaaattcaagcattatcttcctctattattgctctgaatatttcttcaagtttttgaattttcacctcttcatcttcagtctaagtctagtgtttgagttttaattttttgaccttaagttagttgacaagttttcaccatcaacattcgtcaagtcatacaagcctagtctaaagggagcaagctttgttgatgagtgcttcgatctccccttaaagatccaatagttctgatggtatagaagaatcaatagttaagactgaggtggtgctcttgggtattctcgctcatgaattcaaaaaagaagatttttgatttttctctctctctaaaaattcgaactcaaataaaatttgggcaaaagtagtaaatgggaaaattttactgtatttatacaacaaagatggtgatccgcgtgaactcagaccaagggctaagtcgatatccaagaaaacacattgtacatccaatgatctagaaaaacgaccagttttgcatttaatgcatcgcttggaaactaggtatcctcatcacaatattctcctcaagatattcactaatttaatcaatcatcatttcaaaattctacacaacacgcatccttcctcgtaagcgtgactttcatgagccaaggaaataatgccacttcatttcaaaaagtaagaagttatcaaccataaaccaagttggtttcaactcagttatttcaggcccaatcgcaggcccaagataatagactggatttattagtgaagtcaagccttatggatgttggacaaatggctcgtcaagacaagatacacatccaacacattgtatctctggatggcatcaaattagatcttctagataaatgattgatgggcatccggatatctagatccatataacattaattaattaattgattatcaaatcccacaatgtcaggacttaattcctaggattgtgtccaagaataatatctttagaatatagaaacaaagtaattattaatcaagcattaatgtatctttattatccacaaaggtaggacagtactatttgacaactatcaatgactttcacatcagcaaaaaatcaatacctcgtgagttgggctttatcagataagtccaaagtcattttaatatttgtatttatctcacgagtgggcaaggtgtacatactagaaccctagcactacaaatataagaaaactcatttttgcaaaaggttagaattttattcctggagtgctttggtaaattttagggttcaaatatttgcataagtcataaggattttccactcttatcataatgatattgacttgtctactaaatttcattaattcttgaactacggtttcattgttcatttattatatttctttagttttattatattttattagtttttgaaaaatttggtaaacagttacaatatttattaacattgatatatttacttttttatttattaatattttagattggtgtttttttttattttgaaatattaatatttatttatttattattttaagtgaacattagtattttctatttaatttagcatgtcgtgtgatttgctacttgtgttttcagttttaaaaaaataaaataaagtgtctcatgcaagatgccccactgcagattggatgcactctcttttttaaccaattaaaaatgaactaattgggaggtatatgtaaacatcctttatatagcgagctagtgcactcacaacaa

SEQ ID NO: 24671 - DNA, 2244 bp, Cannabis sativa
agtttttgaaacctactcgaattaaaaaatttcttgtagcgcttaatgctaattaaggatgttttttttattaaaacatgatcaattcgacataaaatttgagatgatcaaataacaaaaaaaatattatggccagattaattaattagtttagtcaatattaagaaatatggtaatgcaaaatttattataaccaaatttaacctaaacaacttgactttggttaagtagataactattaattaattataactaactatttgatgatagaaaaaactatataagtgattagttaataactactctaatttctttacattaaatatatatattattttttttaaaaaaaattgtaatatagtacattaatttatatataatcaacaaataaaattaaaatttttagttatttattttctactgtagttatcaacttatgagaaagaattgaaggacatggaaggtgtggctagagaagagtatattggatcacttagaaggtaattataataattgattatacataatttttggagcttgaatattagttaattattatatatatgcatatataagacataactttgtacattaatatatataattgctcgtaaaaatcatacaggaaaagtagtgggttctctcgaggagtttcaaaatatagaggtgttgcaaggtatttaattaatttttatatatataaaatataaaaataaaaaacttactgtttatatattttagaaaaattttacaatacactttcttaaaatgggtgtatcaatgttccttatttatttcggtctctaaaaaatacttagtttaattttttttataatcgtatatattatacttatttaagatatttggcaaaactttaaaaaatttagaaaaatttagcacatcgaaaacacgtgtgactttttattttatacgcgtgtgaaatagatggattaacattgatttctatattgtgaattattgtgaatttctcaaaattttataagatatcttaaataactataaaaaaatttagactaaaatttttttattgataccaaaacagttagttgcatcagtacatctcattttaattggatgtattgtagaaatacttttttttttttataagtttataattacaataaaaaaaaattaaaatttgttaggattaattggcatttaccacaaaaaaactttgaactttttttttattgtctgatatttaaatttttaagttattggtagtgacttataaaatatactcattttccattttcgaattatgtttttaattattggcatattaattaattaatattcttaattttggtgattaatttcattggttgaaataatagacatcatcacaatggaagatgggaagctcgaattgggcgagtctttggcaacaaatatctatatcttggtacatatggtaattatttattacatttacatcctctctaattacattcaaataattatcatattataaatatatatatatatatatttatgtacgtaggctaagaataatgtgaaatgtgtatttaattatatataacaaatacatatttataaatttgataaaaaaaatattaattctataaataaattatatttaactatgtcatatccatatatggttcgatttaaataatagctagatttgccaatatgtaaattaatgtaacaactaacatgtctcaacaatgccatgcaactaataacgtaattggagattatctaatattattgctcaaccaaaaaccagctatataatactttttaaatattattattaaattaattatattaattattagttacgtgttgcacaggaaagttattatatataaacaatttatatatagtatctataaaacctatatatatagctttacttatattttatagatagatatcaagagaatatcggtcagtatatatttatagttagttggccaaagtcccaccaaaccttatactgtatttgtttagccaaccccattatatattaacataatcatgactatatatatatataaaaaaaattacattttaattaacattaattaaattataatttaattattttatattttcagctacacaagaagaagctgcaacggcatacgacatggcagcaatagagtaccgagggcttaatgcagtcactaactttgaccttagccgatacatcaaatggttgaaacctaacactacttctactactactactac

SEQ ID NO: 24672 - DNA, 1718 bp, Cannabis sativa
cctttattttatataaaagtaaattctattaaatttttatgaaaaaacccctatataatatcaaagaaaagcccaatcttaaaagagaggatggcagaacgggaagattggaataaaataggtgcggtgagcactgtcaatcgtcatgtgaacagagaaagaggctatctaactgagatagggcagagcaatggcaattttagaacagagagagaaaatagttattgttgaaggagataaccaaaaccagtgattcatcatgtcagtaatcctagtgaaagagtacataaaatatgaaccattatgatataaaagactgtttggatgacattaaatttccaagattcgaaacttcacttaatgctatgcctaaatttgcatatgctctgtgaaaaaaattggactgaaggagagagagttagattgctacaaaatgactgggatttgactaccctgtcccacaatctccaatatagttttctattatcttatcttattcatttcttttcccttttcttttattttgcttcaaaaaaaaaataaaaattctcaactgtctataggctggtaatgaccaatatgctttatttgtatatttttattgatccgacagagggaaaacaatgcgttggccatgtttaagtttatgttgtttcttttttcttacacaaaagaaagctactattactacgccttaacttcctgaacataaaaagttgtgtaaattactttgttctttgtatctttgcattgcattttttttactattttatttcattgagagaactatctttcagtctcttcacacaaaattgtttatttccataaaatgttggtaagtacttacattacatactaaccaatattataatttcactttagatagttttagctggttaaattacaccatatttaaaatagggttgtctttatctacaaattacttcacttagtttcctttaaattgggtttactttgtcttgatggagtactctttttgctgatgtgctaacttttgctttgaccttttttcttttttctggtaccaaaggtttcgtccacttgttgactgaatagtgatgaagatagaaaaattagaacaccaatcccgccttcaatctctccttctgccatcactactatcaaattcattatataaagcactttaatctaacctaaaataaaatgaaagatatatataagaaaaagagaaaagagaaaagctgaggtatttccttcactttatgagacaagcattactatgcatactagggaagatcatggctgagaattggggacctatacaatatatatatgaagccccaccatgtggcactaaaagattaaaaccaaaacttcactttcctacatatatagctgaacaaattaagctcaataataaaatattgaagtgacacacttcatcccaaaagacaaaaatgatacctatattatattttatgtaatttttgtataatgtatgcagctgtaggagtagtaggatggtgccatcagctataagtagagtcaaaactaatggagtagtttttcttatatacttattttctcactcatcacttactaaaaaaaaagtgaatacatattgcaaaaactttatgaaattatcagattattcaattttttttttcttttgaggggaatattcaatcttcctttttcttctctgaatatcatactaatggaatataattttagtt

SEQ ID NO: 24673 - DNA, 1095 bp, Cannabis sativa
ctctctaatcctatagctagggttggtgttgcccgctaggctgtgcgattggcctggccaggccgagaggaagcctcttctatgctttgtgtggctggtgttttagggctattctcgctatgggttgcttgcgatgtgctttggagtgcagtaggaagtaggaacccatggccttttcgatgttgggaggtggtgttttagggctattctcgattcacttgatttggctttgtgatggtggggtatgggttgcttgcagagtggacccatggccttttcggtggtggtcgtttcgtttcgttcatagtttttcatctaggttgtttgtttgatctaatgatttagtaagttctagttttgtttgtgtagatttgaataatagtgtttgtacaccattggatgtcgtagactttgggttttagtcaattttggttcgatatttgctctctcattttggataggtattggttttagatctttagtgacatcgttacttatttagattcatagcaaattaaccatagatatcagattttcatgtcatgtgattgtgagcactctcaccttgtgatgaattcattgactgaataattctcctaaccatgtgtgtcataatagatttttagaggattttatagttggcacattcctcttaagaatatcatatttggtatttgacaaattttaactattacaaagaacaagtcatatggttattaagggtgtatcaaaacttaatttgaataatgtagttttttattcttttcaaactaataccattaccaaatcttacactcagaagattttttcgacatgttcaaaattcattcttactattcataaaattgaaatataaaacttttagatgtaaaataatgctttctacatgtgtaaaagtactctagcattctctatattaatatttcaataaattaggacatcaggaatagtttcatttataaaaattattatgagtagtgttataaacataagttgaattttttgacacgacaagaaattggtacgagtctagaaggcacgagcacaaccagacataaaaaaaatgggcttggacacgacacgatgctataaatt

SEQ ID NO: 24674 - DNA, 1412 bp, Cannabis sativa
ttttttttttttttgaacaaagggtaatcatatattcagtacaatatttttaagaccaagaggagcattcagctcattaaagacaccatctgacataaaacaagactttcttgcaacacaataagcagctctatttgtagatcgtttgataaaagataaataaacattattaagaccagctagcaaagaacgacaatctatcaccaacaaaccaaactcagaaggcatttgaacagagctattcactgcctgaacaactaccaaagcatcagactcaagtatcacatccctttatctttttcgcttgatccagcttaaagcttctttcacctcaatcacctcagtaattttaggccaaaccgagccacatcagctacccaaaataacctcaatcagcttaccattatcatcacgagccacacacccaaagccgaatctttgctccaattcaaaaatggcaccatcaacattaactttgatcttatgcatctccggttttcgccactgcacaatactgttaaaaaggacaaccaatagcccctttttttgagattgggcagcactccagtgatcaaggacagaacgcgctgatctcaccacttcaaccgttgagcaagttttcttcttccaaaacaaatcattccgagccttccgaattccccaactgatcatagcagcttccaagcaaactgttgaagaattattctcaagcagattaaaaaccagctgctaaaagactggtctacaccagtagtcgaatttaaaatagacaagttccaaaactatcgagcaaaacagcaatccacaagcacatgaaaaatggtctcaacgaccaaatgacaaagaggacacatgaggtcgacataaacatgtttagtatgcaactgcaccttcgtaggaagacatctagagatagatcgccacaagaaatgatgaaccttagggggaatagccatctgccaaagcttgttccagccaacaccttcatcaacaattggaaactcacctttaatcagctgtaagtgcttgtaatcacttcacactttaaaaaaacctgaagtttctttcgcccaaaaccagctatccacctcagtcgtttcactcaattggatcgacaaaatcaaagctctatcacaatcattaaagaggtccgtcacaacctcaatatcccaggatttagagcctactatcatcaaagaagaaataggttgattcacaaggctcgagtgaatggaagaaacatagggattacttgaatctggtaactaaggatcccttaaaatactgacattcgcaccagacccaatcgagcgtctaacccctgcccgcaccagatcctgagcttcaaaaatactgcaccaaataaagcttgaattttgtcctaatgtagcagataaaaagctaccattagg

SEQ ID NO: 24675 - DNA, 2026 bp, Cannabis sativa
taaaataatttccaacacgatcatactagggggcatccttccattaagtgaattttggaaagatatctagaggatattaactaacaacaagaaggagttgcttgacagagctgacgactttattaagctggaggaagctgtctgacaagccctgacagggcaagtcggtaataggcattcttaagacaccctgcagtcccacgacttgccagaggtgcatgcaggcactagcacctatgcgtaaacatctggtggcaagaacactgggggcaagcacaacaacaacaactctggaaaaaataatggcaaaaaggggacgtacaacacttctcccatgccatgaagctagaaagataatgaggagaagctcgcctatttcatcctcatggcaaagaaattgagaccatcttcatggccactcggggaactgtcccatataagaagccccctcccatcaaaagatagatgagcaagagggacatgtcaaagttctgctgattttataatgacttcggtcatgacaccaacgagtgttagaatttgcagagggagatcaaattccttataaggaagaacaatccccactttcatcgttatatgcagaatgaccaaacttaggcacaaagtgcccagaatgaagaccctatgccacttccagtagcgggtcacctaggggtcattatcggcagaccccacatcgcaagctagtccaacaaggctagggaacactatgcttggacacattttcatgagcctaaaagcgatatcctagtcgtcaaagaaaggggctccaagcaacgaaagctcagagagcccactatctctttctctgaaggagatgctactcaagtcaattttctgcacaatgacccctggtcattgctgcacaaatagggaatacgactgtagcaagatgcatggtggacaatggagcctcctccaatattcttttcaaatcaatatatgaaaatatagggctctagcaaactgatttggcacattgcacacaagtaatgtatggcttcttttgccaaggtattgcacccaaggggtacatccgattgcccttgaccgttggagagaatccaacagctagaactctgatggcatggtttgtcctaatcaatgtaccctcagctttcaattccatgataggtcgaccaaccctgtatgacctaaaggcagtgacatctatttaccacctttgtttgaaaatcccaacaaggcatagagtaggatgtttgaggggagaccaacagtctacccataattgttacaacttggccttgtccaaagccaagaaagagaagatgctcgccaagagctctaaagaagagcccgacaaagggcaatgaagtccaccccccacccagacatagatcctcgctttagggatcctacaaacagttttggacttatagaaatctggaggaagtggaggtcgatcccacttcctcagctagaagactgaagatctataaaggtttagcgccaaaaataaaattagtgttgataaattttaaagggcaaacttggacctcttcgcatggtaacatggagacattttcagaatagacccctctgtgatgactcatgccctcaacatcgatccaaacttccaacatgtacaacaaaaaaagaggttgttggacaaagaacgcgcccaagcactcaaagatgaggtcaaaaggctacaggcccatgatttcatcacagaggcattctatccacttagggtacccaaccctatgctggtgcccaaaccaaacaaaaagcatgtccaaaggactacttttcgcttccaagaattgattagctaatggacgccataactggccatgaaatcctaagttttatgggcgcatactcatgttacaaccagatcaagatgcattcgctagatcaagagcacacaagcttcatgatagacttaggcctatactactacaaacactacaacaaaattcatcattaccggcggaattagtaccggcggggctaaaccgccggtattaattggttatta

SEQ ID NO: 24676 - DNA, 5155 bp, Cannabis sativa
aatattaaaaaaaaaaatagactaaaaaattcttctggatgccgaaacaagttaagggtgcatcaatacatcccttttaagagagtgcattgtagaatcaactcaatatttttctaacgaaagtgtacaactaatattttttttttctattaaaaaaaatatatttatttttttaaaatggtatcatacattaattttttttatttatttttttgaataaaaacttctttatttattcttttacatcattaaaatatatctctaaatatattttcagaagtaatgcacgtttatggtttattaattataataagaaagaaagtaattaaaaaaataattaatttagatatataaaaatagaaaaatggaaatatacctgtaaaacaaacacaacaattacacaaaaaatctagttaagcaaaaaaaaaaaaaaaaaaaaattacacagaaaatcttaacaatgtgccaatgacagttgattataaggtcatctagaacaatatgatgaaaaacttaaaaaaaaaaaaaaaaaatgagagtaaaaaaacgctggggtctagataaagacagtgggggaggtgtcacctctagaggcaacaaagtcaccactaaagaaaaaaagatgcaggtaaggccagcagccgcccacacctaaccccaattttttataaatataataaccccaatatttatcaacagttttagaggtgagtactgagtatattataattttaatttacccaccattattaaaacaataaaaaagaaaaaccgctatttatttttttattaattattatctatatttcctaaaacaagaaaatatataatagcggttgcttttacaattatgcatatggcctattggaggggtttctttcatttacttcgtcttgggctcgaaacgtggcgcctcacgaggcaccttttctccgctctccgtgtgggagatatgtggaaaagggcggaccccacaaatacataccaacagctttttcactaacacgccgacccgccggcgcaactgtctgtctctatccgacacgtcatccctcactcctggcttccccttctctgcgccgtactatacttttttttaatatttatttattcaaatgtatttttttttttactttatcctttgtgttgtaaaattaaaatataatattttcatatttaagatgctttcatttcatgggcccattattacgcgccaaacatattcctagaggtagcaaccatttcttgatgcgctacaatttagcaattctaagtattgtgttgcttgtttcactccgaaagtaaatgaaattttattttgaaatatgaatcatctaataaaatggttggggaattatatatgtataaacttataacgtaaagtaaaatgcaatttgagccaaccttcactattgaaaagcaatgcaaatacgatagtggaagacgtgttagcttgcccttgttttcgtttctttgtaacgaattttttttttatcgttattatctggatttaattggagaaggtaagtttatattccaaatcacgcaaaaaagtaataatcatactattaataacaacgaaagaagccaaaattggtggtgaattagcttatcttgatggaattgattaaataatattaaataataaataatgagaaagtcctgacaaaaataaataaataatgggaaagcaaaaatcttgttcatagatatatacgaccatgaaaagggcaggtgggcccaccaaaagaggcagccgcgcttccccacttttactcgcatcgcccgcctccccacgtgggacccagctttgtctccctttccccacctttttcgcgttcttaagcaaactctatttttggactaattacgaactatttgtttattaacaattgttaattaaaaataataaatccaaaccaagatcggacggctgtatatcacgtgcagtggccacaatcccatctcgaatctcgagacctattactcagtcaacatagaatttgctttcggtcttaaaaccagaaaaccgcccataatcactcacgcgcctacatgttcccctcttcactacaaccacggattgccacgtttacatacctacacatttattattattattattattattatatgagaacatttattattacttcttgttctggactccaagtccaaacacttcacctcccatgctctgtgtcctcttaatttacagccaactatttataatttgttccatcaaaaaaatatatatacatttataatttatacatattcttaagagaggctattttattacaaaaataataaaatttttgcaggcatttcaatcacaattcagcccttctgaatgctcgtacaccgtccttaacatcaattcatattactttacaaaagaaagaaagaaaaacgcattcatttctattaagtcgatttcattggcttatcaccccttcagtaaaggaccagttacaattattttaacttttcatttgaaaaaaaattacttaataaaataattaattttaactttttatttaaaaaatttaacttaaaaaataatttacagtataaataccttaattatttattgtaaataaatatttaaatttaatttttttggagtattaataactaacttatatttctacatatcattttttttattgatattttttattaaaatttttataaatatatttaaactaatttttttaaaaaaaataaaataaaaattcaatagtgtagactattcaaagattgtcacataataatttatttacatttaatcattatatccgtaatataatttaaatattaaggctaaaaatttaacttaaatatttattatttagatagcaaattacccttaataaaataatactttatcttcttttagggaatcctgcatttaatagaagagtaaaatcacttttacaaaaattaatataaatgtgaaagcataattgtttatcctaatttcactctatcctcacgcatgctaacctagcaacgaggaattttttttttaggcaggacaaagggaaattaacccaacaagaacgtgattaaaggatgaaaaacaaaggcagcgcggaaatattgttcatcagttcgtctcttcaaacaataaaactcgtgtgcaactgtgtacggataataatcacacgtgcggaaatagatcagattcagataagataatactcagtttgccggaatcaaaatggagtagctgtagcgttaaattataattcgaataattacaacatagaataccaaagaagattaaggattttttttattatccgtgtgtccattcaataatgagaaaaaaaaattaaaaaaataatattgccgacatgagatgtaaaactttaaataagaattctagctgataaatcacaacaaaacaaaactcagtcgttttactgttgcaacaaaaaaaaggggaccgaatcagctaaacggtggtgtattcacataaaaaagcgttaatacttgctctcccaagctgtgtttgtttttttcttttttttttttttccattcaattatgtttcttttcttttttgctatttttctatttaaaattaattaaaaacgaaatcggaatctgaatctgatgacgatctccagcgattatgttaaataccgaccaaaaaattacgcaacttctggcggaggaaagttgagatcgagatcgaacattctacgaggttgatcgttatggttcagatcgacgacggaggatgaatctgaatcactctgagcaccaccggcgaaagaagcggcatggtagttacgggccgcctgatgatcaaatctcagccgttgaagctgctgatgatgatgaccattcaccaacccagcatgaacgtacggatcgaaatacaggacttgttggttagtcgtcggcataccataaacagctccgacagcagggagcggttgaaacggaaaccggacggcggaggaattggccgagccaaacccgtggccaagattaagatctaaaggcgaggattcaaccatcagagccggctcccggctcgaggactcgaccgtactactctggctcgggctctggttaagattctttctgttaacattcaaaacgttgagattattctcgttgatacaatcggaagggagagggaagttggtcttagccttggcaccacgaaactctcttgcggcggtgtcataagctcgggcggcttcctcagctgtgtcgaaggtgccgagccagacccggctcttcttgcctgggtccctgatctcggcggcgtacctgccccatggcctcttcctgactcccctgaaatggacctccttgacgttaccgttaagtttaacggcggcggaggcggtgttggcggtggacgacttatctctaggcgccattaataaaaactatatcactcggtcggttatataaaaggaaaaatggtttttcttatttttttttgaaataaaaaacgaaaggaaatgttaggaagaagaggaggtgtgtaggacctaaggaagtgaaggaaagggtgtttggttttatagaggaaggagggagagagaaagagagagcagtcagcgaaggatttgactatgagagaggagagagaaagtgaggattagtgagtgagtgagagagcgagaggggcggctaaggaagaaagagcgtggggttgggtttttagtaaaattagttcccgaattacgtggcatgtgggctgtcgagagagcaaaccatcatcattattatcattatctaacggctgcaaacccactattgattgcgtgcggtgctactcccacccaccgatttcttctacgcgctctactctcgcgttcaccttttgccaattaaaagaataaaacaatcgattttaagtttactatttttgtttttaaattataaaatgagctgcatgcaaccgtgtaaatcatccgaattttatattatatgtgtatcagtattcagtttgatttatacatagtaattctcatatattattttcttttgtatgtatcattcatcaggatttggtacttttattaattataaattattattgctgttttggttttctttagaagagaaaattttggaaatacagttttttgaattaaagaaacatcttttttttttttttttt

SEQ ID NO: 24677 - DNA, 1797 bp, Cannabis sativa
atttaatgactcaatctatagtcattagggtgctactatgtgcctcaaatgttgttaactaaaccgaacatccattatggtcctaattacaataacatgcactacatcatacatataaatatacagttgtacttgtatgttaatgatgttattgtgattaatatagtatgtgagtacatataaaatataacaattacctcaattactttttttttaaaaaaaattatatatataaatatatttcactgtatttacacaaaacaaataataaaccaggatcgaagtcatgttaccaataatataatcttatacatgaataaaaaacagccaaattaaattcctcacttttttagcttcttatcttgctagtttgcttccttttatttatttatttatttattttgtgagtaattttcggtataattaacacgtgtaactatcagtttcaaataaatatcttagtttaattttttgcggtaataaaacttaagttatatatatttttagactacttcattagtacttggtcgttaaatgtacatcaagttattatctaagtcatttttttataagtatacttaaattaaatttaataacttggagtaccaatcaagaattgccacgtgtcaactcacttaacacttattacctacaaaagtttcagaattataattaagtattaatactgttaaaaattaaacttaaatatttatttacaatcaaaaattaaacttaaatatttatactctaattttttttttcgggttattcgctcttttttgcatttggattttgggggacttaaaatcctaatcttaatcctatatcatccacttataacaatgtgaaattaacctttgctttctcatataggggcctcctacaaagctaactaagttaatagctgtgcccatatacgtacgtggccactaattaaccaacttttattgttttttcattgctaaaccaaataaacattcctaatctggccatgcaattgctaggcactctcgatttatttctgatagttgcattttagaacaagatatctggcccgatttgagggatatcttgttttctgaatgcttttaattcaataaagttgctatttcattcaaaaaaaaaaaaacattcctaatctcaagagttgtgctctatttgctgtattaattattttatctttgtgttcaaaaagaaacttttctcttttaatagctttcccaactctcaatattagtgtctcgttggatcatcactcatataaatatatatatagctaaaaaaaaaagaatatcgatattcaagaagattttatacactatagtataaacaatttttcatttcctttcccctctctattaagtcacgtatttcatttgaaaaagatgtatatacaaactatttcctaattgaacaacctttgatggagagaaagattgacccctctaactaaattcgttgaattaacaatctaaattccactaaatttcctatatattgttactaccaaactatttaattagccataattataagctttaagcaatatatatatatatatgctagcttaatatgattatgatgatttcattaaatgaattaaataagattatgaaatccatagagtactattcgctaaattactcattcacactgattaagtcaaaagaggatattatattcatataagcttattaattatttctaaaagtgttgatctaaagagtgtacattcaagcaaaaataaatgaaattaaagaataatccaagagtgtacgatatatttcttactaattt

SEQ ID NO: 24678 - DNA, 2578 bp, Cannabis sativa
gggcataaatcccaacactttaggttgaagatcctttccttctagttccatgagactttcgataccaagtatcttttaaacatgtccaagctctttcatctcaaattctctcttgagctggctttgatacttttgatcacatatttatctttgctcatgatgagcatatcatccacatatagtaataagaacacggttttagattgctccagattcttgaaatataagcaatgattgtatgcggatcgtttgaacccgatttgatgcatatatgtatcgaatctcttattacattgtcttggggactgtttcaaaccatataaggacatgttaagtttgcacaccaattcaactcctttcctttccacctaaaacccaagtggttacttcatgtatatctctttatctaagaatccattcagaatagcagtcttaacatcaagctgttcaacatcgaactccatgtgagcagctaaagacaacatcaaccttattgtcttgtattttagcacaagtgagaagattttagtatagtctcttccatctgagtaaaatctttagccactaacttggctttgaacctcactagtttgttttcattaattccctctttcacattgagaatccatttgcactctacaatcttcttgttctccagcttcggcacaactaccaaagtcttattcttctggagtgaatccatctcctcatccatagttgaaagccatttagacttgtttccacctgaaattgcgtcttcatagcttcattgttcttcaattttagtgtgttgaagtaccgccagttcaaatgctattatgtctgcttccacaaaccttatcgaaggttgaatctctctctgggttctttcacgagccaactgatcaccttccaaacctgtctgtccaaacccttctgacacctctgtttagtcttcgttatctggttcttctagctccataatagcttctgtgcatgcattgtcttctggttccacactatctttcgcctatggacctttttccatgagctttgttccgtactccatttccatacttgtagtgtctttgtttcttatttttcctacattacacgcagacacactacctttcttgggggtcaagtgaggatattctaactcattaaaaacaacatttctagaaatcacaacctttggtttacccttcctataaatgtacattctataacccttggttcccaaggcataacctaaaaaagttcccttcacgaatcaaggtttcaacttgtcaatggattggtgtacatatgttgtacacccgaatgttcttaaatgcgctaggttggggcatctgttgtaccatatttcataaggtatttttaagtctataactttattcaggcttctatttataaagcaggttatggttgctaaagtttcccccagaatggtttttctaacccaaaactgaacagtaaacatctaactttgttcaacaaggctcggttcatacttttagcaacaccattttgctctagggtcttcaatatgtttttatgcctagtgatcccaatctcttgacagatcttgtcaaatttggagttaacaagctctaacctattatcagttctatggttctcaattttaagatcggtttggttttctacctgagttttccaaattctaaactgttctaggcactcattttttgtagttaacaaataggtccaaacccaccgactataatcatcaactattgaataaaaatattgcttattggagtaagtaaacactttgtatggtccctaaagatcaacgtgcatatattcaagtatctttttagttgtgtgccttgctggagtgaacttcagtttatgttgtttccctaaaacacatgcttcacaaaatggtaaggcacaagaatttaaatttttaattataccttgtttgtacagttctttgaggccttgttcactgatatgtccaagtctgtgatgccacaacttcatatttgattctagccctttcaccatactttcttctcttgctagaataatttctccttggagaacatataaaccatttatcttttcacctttcatatctaccaaagaacgtttggtgatccttaggctttcgtgcatggacttgtatccgtgtccttcatcttcaagtgcacccagggatatgaggttttgtctaaggttcgggatgtgtcgtacgtttgttagcactttgattctgccatcacactatcagatggccacctttttggtacgaatgatcctgcatgaatgatcattacccattagaactttacctccatcaaatgacttgtaatcaaaaaatgactctcaactcagacacatgtaataagtgcatctggagtcaagaatccactccttgttcatagatgactccgagatagagaacaactctccatccgttgagcattcatctctatcttctgcgattacaacaaaatccttctcgtggtaatggtgccgaaagtccttcctatctccattgtgagatttgttgaagccttattgctccttgtacttcttgcaaaacctttacaagtgtccagaccttcca

SEQ ID NO: 24679 - DNA, 7745 bp, Cannabis sativa
  modified_base (7706)..(7712): a, c, t, g, unknown or other
aaaaaaggaagttgaccacctccaatttactgatagtatcgaagcaggttgtcatcgttccatgctcttggattcttgttccatctagtctttttaaatagaaggttccatcaccaattttctctataacttcatacggaccttccgagtttggtcccaagacccctactacgagctcctgagaggcaggaaatacccttctcaaaataaggtcatcgatttcaattcttctgtttttgactttagaattgaaatttcaagcagttttgttttggtacatctggagttggacctttgactgctcttgaagctcctcaattaaatccaaggactcctgaagtagagcatagtttcgagttgggtcgtaggtgtctctcctgtgtgtaggtacggtggattcaactgggattacttcttgcatccataggtcatggagtatggagtgtggcctataaaagttctttcagtggtactgtaggcccaaagaactcttggaagtttttctggatagtgtgctttgcaagccttgaaagcttcttttttaaaggtagtcttcagaattttattaacgacttccacttgtctgtttgcttggggtctagccacaactaaaaagcttttgattattccatgcttggtacaaaatttagtgaattgatcactttcaaactgctttccgttatcagacactatcttgtgtggaagtccacatctacacatgatatttttaattacgaagtctagggccttcttggaagttactaggttcatgggttaagcttccacccatttagtaaagtagtcaacagcaaaaaatggcaaatttgactcctccatttccagttggaagtgatcccactaagtctattccccaaacagcgaagggcccagtactattcatgagggttatctctattggtggggctcttgggacttttgagtaatgctagcattgttcacatttacggacgtactcagtgcaatccttcttaatggtaggccaaaaataaccttgacaaatgattttcttggaaagattagatccagatgtgtgatctttgcaaaatcattcatgtatttcatgcatgacaacacttatctcagttccagctatgcaccttaggtatgaaattaataatcctcttctgtataacttcctatccataatcatgcatctggggacctaatactggatcttccatgaagcagctctattatctaggagtgcacttgtttccagatacctaaatattagagccatcaagcaggttgagtgatcaatggtggacacccccaatgtttccgtgcttagagcgatcacaagtgcaatgaggactagtctatatttcactatttctatatcagtctctaatttttccaacatgtctacaaaagcattcttatccctggggatctacttcacagaatagtgctaaatgttgcaatagctccctggtttttactacgtaactagccattttttctctttttgcctggtactccccaaacatttggttgacagctagttgtgaatcgttatagagttcaatgtttttcggtgcaaacctcttttgccagttgtaaaccagcaatcatagcctcgtgctcagtttcattgttggaagctccaaattcaaaatgaactgcactttggagctggagttgttgatgagagattaaaatgattccggccccaaaaacctttttcatttgatgctccgtctacatatattttctagacttctctctccgggattaacatttcaagatcatcatttatccctgtgcactccacaatgaagttagctaaatcttgacctttaattgaaactatgggatgaaattgtatatcgaattggcccaattccattaccaacttcaggagtcttcctgacgactctagtttctgaaatacttgacggagagggtggcttgttagtacccttatggcgtgagcttgaaagtatggtcttaactttgtgaagcaattagtaagcaaaaagaaagcttctcgatcataggatatctagactccatgacaaccaatcttttgcttacataatatactagaagttgcacctttccttcttctcgcactaaggcggtatttatggcatgatttgacactgcctggtacacgagaaatgctctccatcaattggtttgcatagtatcggagcctttgctagatgttcttttagttgctagaaggctgctttgcattctactgtccattcaaacttgttgtttcctcgaaatacgttgaagaatcgtatgcacttatctgtggatttggagacaaatctgctaagtgttgctattcttcttgtcaacttttgaacatctttgtgttttttgggtgaaggcatgtccataagagctttaatcttctctaggttcacctcgatgcctcgagaactgactatgaaacccaagaatttccctgaagaaactctaaaagtgcacttcttttggttaagtttcattttgtactcccaaattatggaaaaggcctcttttagaacatcgttatggcctatggaagtctttgatttcaccagcatgtcatcgacataaacttccatatttttccccagtacattattgaacattctattcaccaatcgttgatagatagctctgacattcttcaacccaaatggcatgaccttataatagtagattcctttgtcagtttggaacttgtgtgctcctggtcagccacatacattttaatttggttgtagctagagtatgcatccatgaaggtcaagagttgatatcctaaggtagtgacaaccatataatcaatgcgcagaatgggaaaacagtcttttagacaagctttgtttagatttgtgaaatctatacacatcctccatgtcctattaggatttaggaccaaaattggattggcgagccatatgggatacagagcttccttgagggagtcaatgtttgtcaacttgtctacctctgtttatactgcttctaacctcactagatctagaggtctttacttttgtcggattggatctgccttagggtctatgtttagtgcatggcaaataacacggggactgattccagtcatgtcagaataactccaggctaacacatcactacttgccttgaccgtggaaataattttttccttcactaccggaggtaagttcttccccactcggataaccttggtgggatcttcatcatctatgcatacttcttccacttcttccattggttccattatatgttccatgcaaactcgtggatcaagttcatcttcttggaccacccccagtgctggctgggaagatgttccagcttcagagatatttccttccaacttcatgtgctttttttatctcctctgattgacccattgcttctgttatcacttgcaaactttaagaaaaaatggtggatgggtgttaccattccgaaatccattaaaaatggtcttcctaagatggcattgtaagcagtagggcaatcgactattacaaacatgatttacttgaatgatgatactgcattgcttctaggaacttctccatttattgtcatcagaagttatatttttcccatggggatcagtgagtgtctattaaaaccttacagttgaatcagaaattgcagtagattggcttccaccagaccaatggcttggaaagcacctttgaaagtgatgtttatagagaatccattatctacaaggattccagaaacccttttatttgttatttgagcctctatcatcagagggtcgttgtggggaaaattcacacgcctggtgccatcctccatgaaagtcattggttaattcatcagccttgaacgctgagcaggtaattgtaccagatggcaagcttcactttgattcaactcattcaagtacctcttctgcgcatttcaagtgctttcagcaatatgaggtccagcaaatatagtttccacatgaccatctaagagtggtaaagcaaatcttggagggtaaaaaattttgggaccaggggctacagctactgctactgttgaagcgttatgtgccccctgaagggcttgtgcatttggagcatctattccacgagcttgtggatgacctactccctaaaaaggatttatggctcgctgctgccctagaatgaaaagttgtccgtgtgcaactccctgtcctggatatatgactaggatccttacccaattggataagtgtccattccgtactagtccctcaatttcatcttttaagtagtcacattcatttgtggtgtaaccaatatcaccgtgttattcgcacctcttgcttggatctcttctttgttttttgcctttatacatcagtggaggcttcttgtaatgaaccatgttacaagtttccccgtacacattttctcaagtatctatgagacttgtatactcgttgtatcttgattcttagctcttccccttcttcatagaatcactttggtttggacccttcgaactccttttaccgtgagtgggttatattggactctagaacttttgctttttagtttgtttgtccaagagcgccactgtatctagtttgtgcagctccgaacctagaaaaactagcctgtgcaattagttgcacgaaagtacttggtccatatactgtgggagtagtaaaagcagttggtggagggtaaaaggacagatttgtcatgtgcgaggttgttgtagttaatacattggtggaaggtgttgggagcataagcttcttctagttttataaatccttgagctcttatcaggaactcagtcaacgtatctgctcttttatgttgaaggcatccccatagtaaagatccagttgcaagtcttgatattagggccaccatttttatgtcatcagtgaccttggttttagcagccacatccatcatgcgttgaataaacttcttcaggctttctcttggttgttgcttaacactggtgaaggaactggcttccaagtcatagtccttggctactataaactgctttctgaatacctcttgtaggtctctccagttgtggatcgatctcagagacaatctcttctaccagtcatctgtggacttgcttattgttaacgaaaaacataaacattttgcatcttcacgggccttggcgactagcatgatgcggttgtatttggacaagtggtctctgggatccatcttttcttcatacaactctatctgtggcatactgaaactttctgacaatgattcatcaatgattcttttcacataaggctctgaatcttccctttcagagtctgacacaacaccactttattttctagaaatctttttcgtgatttcatcaactcctcaaccttacattctaggcattgagtcttatcacttgaagattctcttttgcgaacacgatcgttgatgtggtttctcaaatcgttcccgcggggtttagatttttctacttttgctctttcgttcttagcatttagtcttcttcgaagatcattcgtggagaggtttctgtcgttgtcatctgatactggatgtacctcgtcaacatcctcatcgtgataactggaatcactaagaggatacttattcttccaaaactttggctttcagactacggcatcagtcttatttttctacgttactcttcctcagatgttggtctggtcaccgtgccctttcaaatgtagtttcctttcctcttcttttgagattggtcggcaggtttagactttttatgtttcttaatggaagcagtttcctttggctctttaacaactatccatttgcctttgtctttgccaacacttgaagttctaggattggatctgctttctcaggggcatcaattgttagagaagcttgaacgtcaggaactatcttagtcatggctatacaacctccattatggttatctttgtgagcagtacctcattaaattgatcttgtcaagttaacctgctttctgctagttgaagttatttatccatgatgaccatggggtttgactcgtcaagctggttcttctctccaaggtttatcatcagtggccttatcttgagggtcgccttcatgcatatcctcgggtgcatcctgagtgttttcttcagcatcatcagaactactttctccagattttgcatctttgattatgcaatcgtctcgatttcaatttttgtcttgacgacctttctaacaactagtcgcctcatatggatcattggagtcccctactttggagctaggaccagtaaaacgaagactgaactttgtttgggtgagggccatgattgcttgaatgtaatctataaatggtctcattgcttccttcaactctcaatgaaagcaccaaaatatttacagagatttttgaaaactgattataaatgataacaactgaagaaacaaataattaaaagagacaaacagttttttacgtggttggagcgttaattagccttagtccacgagttagtgttatttagtagttctttagcttaaaaagcctataggaatacaaagaatatatgttctcaagtttgcctgagaaagtgttgtaagagagtttaacccttaatccataggattcgatgggtatttatagtagtttgagaattatatttgtttctatttttcctctattggagagtttacagtgaataacatacttgggctgcttcgttaagtccagcccacgaaggagaggattcgctgactaggcagatcgatgatttagtcaacatcgtgtgctttgattgtggaaaatttacttgaattaattacttgatattcgttttaggaagtttttctatttagcttgatacgatgctctgtcgaaatttggtaatcaattattttcttatttgttgtaggaataaaaaagagaaactgaatcgatcttcagggaaaatgttgtctcacccttctggtcttatggtactggacttgcttccagaaacggtttttcaatagcggaaggctctatggtcatggagttgggatacattcttggaaggacctgtctaaatggactttgcccactttatcttcgctcagtggcctattaatgggcctttaatgtaaacctgaatttaacatgctaaattcggaaacgcaaataacaatactatctaataccacttgagatagcatacccttattaatatatttaatattagatctcatatattttaatttaataattatgactaaaaattattaaccaatttttatactccacctcatggtggtattgtcaacaatattctaatttccaactttttaggtactttttaattgaatttcttgtagtcattgaatataatcttgtaagagtcacttgtgttatgattgcaaagtaacactttagctatttttctatatagttaaccaaattttatttacaattctaatacacattcaacaattcactagacatatattatgttttaaaaataacttgactaagtacttccgaaaagaaaaaaaaaatagcttaattatacttattttacatttaaaagttatccaaaataaccttaaaacaaattttaacttataaaattgtcatatttttaagggtaaattgcagcataaatagctaatattttagattttacttaaatactttatctttatttttggagataaaaatattcaattttacaattttcttacatccgttactaccacttccgttaactnnnnnnnatggacacgtggagggcccagatgcattacatt

SEQ ID NO: 24680 - DNA, 1628 bp, Cannabis sativa
ccaatcccagtactcattttttaaggccgggtatggagtgccatacatacagaacaaaaaccatggttcagagcaacccaaagacatgattctaatacagaaccctgcctcaaagatctgcgatatcgaacaacctcttcccgatttccaagcaacacaaaatcctcccgctaaacctttcgccgggatacaagaatgattctcaaaacccaatctaaccactacctgtatcatagaaatctcatccaccttagtttctgataaaaagattaaatccgcattactctccctcaccaaaccccgaagggttctttccgccgcgggtctacgaagtccgcggcaattccaggataaacacctcattgggacggtgggggcatgcgttcggccgcctcctcgcctctcccaaaatccctttcaaaagtaaccgcaacttctatgcaattatttaaaatttcctccaaacttctggttgtagccattccattttcatccaccacattgcacttcttcctcccactccgagttttgactccagaagatctacgagtagaatacgcagttctaccctttggtttcctaccacggccattggatctcgagcacgaggcttcatctcccactccaatacaaaatgcctcttgggggattacttccgttttttccgttaaattctgctgcgaatggttctcaggggaagagaaagtagacacagcaggtatgggttgtaatagagtgtgggccttcctttttctattattacccaataaatggttgatcatctcagataagtttggggggatagagagaagagactgctgggctttgtataaatttagaaagtcaggtttatacaactgcataaataacttttgggcttctgtatcatggttgggccaagatattggacacgcctctggaaaggagtgtgggttttgggacaggcaaacccattcgtggggaacatctatgcattgggctaaagtagggcccaagtcaggaattaaatcatctctgtgatggttattagcaaagtcagggttaggcaaattcaaaatattacccgggacattaatcacttcatggcccccctccagagccacgtgtagattccccgtaccaatcatcgtactggatgcaggcgcacactcccactactcgtaccagcaatgtacgactgtcccttctcctccaaggtttccgactgacgtaagggttccgccgtatcaccaccctgctgcttccctttctccgacggaccagcccctcccggtaaagacgtcacaacttttctattccaaacaccccgacgtctcctcccttgtaattcccactccggtatctcttctagttcccatttgaggacccccttccccttcgagttaaagcagttactgtttcccgtatcacttttaatccataatccatagagaggaacagccttccctgacctcggcgtgaccatcgtcatgggagcatgacaaatcttatcccagtgagccaacttaccacagttaaaacacagcatagggagtttttcatacttgaactgaacccaagactcaggttttccatcagacttcaagaagaaacccgccggaatcggatgagcaacccaaacatcaacc

SEQ ID NO: 24681 - DNA, 5070 bp, Cannabis sativa
tggaggacaaagaaaacgagttacgacaggtgcacatttatcaacctatacagtttacaacatgtaacaattttggctataacttcttgtttgttcgagttaaaaaaaatgtatgcttttgtatcaggtgagatgcttgttggaccaacaggggtgttgttcatggatgaaatatccaccggtttagatagctcaacaacatatcaaatcatcaattctatgaggcaaattgttcacaccttgaatgatactgctgtcatctctttactccagccggcaccagagacttacaacctttttgatgatatcattcttttatctgggggtcagattgtttaccaaggtcctcgcgaacatgtgcttgagtttttcgaaactgttgggtttaaatgtcctgagaggaaagctattgctgactttctgcaagaggtaatgtaaatgtaatattttattttatttgttgttgaaactgttatcatctactaaatgtcatttgatgatcataattactaggtaacatcgagaaaagatcaagagcagtattgggcaagagaagaagaatcttatagattcatcactgtcaatgactttgtggaagcattccaatcctttcatgtaggacaaagaataaaagatgagctttctactccatttgacaagaccaagaaccatccagctgctttagcaactcgaaaatatggtgttgaaagcagaaaagagatgttgaaagctgtcttcagcagagagtggttgcttatgaaaagaaactacttcttttacattttcagactcatcaaggtaagagtagttttcaattcttcgactgagaaccattgctgatgaacattcaatcctatttctgcatgagtttaatttatgatctttttttcttgttttattttttttttaaaaaagattttgatcgtggcactcatagtctcaactgttttcttgagaactgaaatgcatcatggcacaatagaagatggaataatctactctggtgctctattctttattgtggtcatgtttgtgttcaatgggatgtcagagattcctatgacaatccagaaattgccagtgttttacaagcaaagggacctcaatttttaccctgcatgggcctatgctcttttcacgtggattattaagatccctattgcatgcttagaagtcttgatttgggtttccattacatactacctaattggacttactcctagtgttgcaaggtaatatgatttaatttaactttttatgtagaatcttagttttgaacctcttcaatagttgggcaaacttttgcagttttttcaagcaaggccttttgctcattttcgtaaaccaaatgggctctgcattattccaagctattgcagctacttctaggaatctaattgtagcggacacttttggctcatttgtattgctcatgcttttcgggctaggagggtttctgttatcaaagagtaaatggactttcttttatttcatttattcatttttatttatatatatttatatttctttctcattctgactgttatagtgtttcactacagatgatattaagaaatggtggatttggggttattggagttcacccctaatgtactatcagaatgcaatacaggtcaatgagttcctttcagaccaatggaatcatgtaagttattagactaaaaaacatttgaacatgtagccttcatatatatttgtcttttttacttttgagtaatttttgataatgggtttgatttttgggtttcactcaaaattataacagcctggaccaaatggaacaagacatctaggaattgaagtgttagaatctcaaggattctttacaaaatcatattggtattggattgggcttggagcggtggttggttacaatatcattttcaatattctttatgcactttctcttactttcctcaaccgtgagtatttctaccttaccatctttgatacgagatgacatgatattattaggagtgttttttccgttgattgtgttctaatgttgtttgcatcttcattgtagagtttgggaaatctcatgcgatttttctactggaagattcagagagcaataatcaaaatgcagaaagtggtactgaagagaggaaccaaaatagaaatagaggaatggttcttccatttgaaccacattggatcactttcaaagatattgtttactctgttgacatgccacaagtaagttttaaatgaagaatttgagtttattttgctgcctttgtaatccatttcaataatgcaactcatgtacttgaaccaaagcaaatttgtaggaaatgaagaagcaaggaattgaagataatgataagttgattcttctaaagaaattaagtggggctttcaggcctggtgttttgacagcgctgatgggagtaagtggtgctggaaaaactactctgatggatgtcttagctggtagaaagaccaaggggtatattgaaggagacatcaaaatttctggatatcctaagaagcaagaaacattttctagaattttaggatactgcgagcaaaatgacatccactctccacatgttactatctacgagtccttgatttactcagcgtggcttcgtttaccaaaagaagttgataccaagactagagaggttcgtttgacattgaattgaaattcactttattttatttgttcaacatctttggattctgactatatcacaaattgccacagatgttcattgaggaagtgatggagctaacagagctaaatgtgataaggcatgcacttgtgggactgcctggtgttaatggtctatcaactgaacaacgcaaaagattgacaatagcagttgagttagtagtaaacccttctataatatttatggatgagccaacttcagggcttgatgcaagatcagctgcaattgtcatgagagctgttaggaatgctgtgaatacaggcagaactattgtgtgcaccatccatcaaccaagcctcgacatctttgaagcttttgatgaggtatttaagaatttataataatttttttctatatattatgtttgtgtatccattgtcataacaaaagctactaaaattctctgcagcttttgctgatgaagtgtggaggtgaagagatatatgctgggccattaggccaccattgctccactctaatccaatacttcgaggtaagctcatgctttttatattctctattataaaatcactaatagcaacaactactaattagtagttttttgtataaagtctattgaaggtgtgaataagattaaggatggttataatccagcaacctggatgttggaggttacttcttcagcacaagaaatagctttgggaattgattttgctgatattttcaagacttcagatctgtacaggttagtgtaattgcttaatctcaactctacatttatatatattgttattgcttacaataaaagagtaatatatgttcaaaaaaaatgtatacatttcagaaggaacagagagcttatagatgaccttagcgttcctactcccggctcaaaggatctccatttctcaactcaatatgcgacaacatttctcacacaatgcattgcttgtttatggaaacaacggtggtcttattggcgaaacgcaccttacacttgtgtgagattctttttcacattgtttgtggcattgatgtttgggacattgttttgggacttaggtggtaaaaggtaactctatatatattattaaatataattcaagtcatgtgaaactgtttttggttttattgggtttttgaagatggaaaaattgcaggagtactcaaaaagacctcctcaacgcaatgggatcaatgtatgctgctgtctttttcatcggagtccataacggttcatctgtgagaaaagttgttgcaatagaaagaacagtctattatagagaaaaggctgcagggatgtattcagcttttccctatgtgtttgcacaggtattcttgttgttaatgtttatacaattgattgatggagattgaataaaacttatgcaatctccatcttcatgggacaggtgatgattgagattccatacatcttttctcaagctatggtttataccatcattgtttatgcaatgattggctttgagtggactcttgtcaaattcttatggtatctattctttaccacatttgcaatgttttacttcacattctatggaatgatggttgtggccgcaacaccaaaccttgatgtcgccaccactgtttcgtccgccttctatggactttggaacctcttctctggctttatcatcccatactccgtatgaagcttttttctttcttttccttatttcatcaaattcaatttttaatttctttatttgggaagaaaactaatttttttgtttggtttcttggaaaattacagaggataccagtatggtggaaatggtactattggacatgtcctgtagcatggactatgtatggcatggtggtatcgcaatatggagacgtaatggacaggcttgatggcacagaggagactctcaaagaattcatggaaagatttttcggctataaacatgacttccttggagtagttgccttagttaatgtcgtctttgcagtgatttttcctcttattttcgcgttgcagatgaagacatttaattttcaacagcgatagtgtagaaaaattgtggtgacactcaagagacaagaaattatgatacaggaaaatataagtgatcttgcaggaacctttcaatctaacaactatttaaattgcgacgaactttgtcattctctactaataaggtcagggaagtcaattctttaaatatttaattgtaattacctgtaattaattaaatatttaattgttaatgaggttggctaagaaagagtgattttagctaaattgagtgtttgagagttggagaggaaatattatattgtattggaactgaatcgaacatagtagatgttatcggcataaatttaccctccccgcgagaaggacttgtctatagagaactcgctgtattgaaggtggctc

SEQ ID NO: 24682 - DNA, 1798 bp, Cannabis sativa
gtttacgccaaaagcctgaattgtcttccccagaacggctgttcttctaactttgcagcagattgtaggccgatttgacagaataatggcctgatctctcaccagcccaggtccattgatcatcagtagcagagaaactgaggagaattcccagaataaggtcagcattcctgacattaaacatatctcgcataagagagacatcccaacttctatcatccacatgaaaaagagagttgaccgtatgatggtcgagacccggagtagtggtggatacaaaagggttaccgttatcagggagccaaggatgagccagaatgcttgttgcagtaccagtgccaatgatcctcctagtaccagactgtactaagtcttgggcattccaaatactacgccaaacaaaactggaattacttccgagttcagcattcagaaaatccgatcgtgggtagtacttggctttaaaaacttgactaacaagggatgaatcagagcataacaatcgccacccttgtttggcaagcatggcaaggttaaaatcatggaggtgacgaaaacccatacctctcaagtccttgtgaacagccaaccgatcccaagacatccaaataataccttgcccactagcactctttgttttccaccaaaagctagccataagttcaatatcattgcagattttcagagggatcgaaaacacagtcatggcatatgttggaagagattggatgacagtctttagcagaatttccttaccagcacgagaaaggaacttaccatcccaactatttatgcggttaagtgacataaataataaattttcgtaataaatatattgtgggacatatcgaaaaaaactcaatactcagcctatgaggcgacctaatctaaataaggatcacaagatttacgaagagaggtatttcagcattgtcgagatgctatttcgataaaacattcaacatctcgtagtacaaggatcttgtaactgaccataatacgatgatcttggatgagttcgtaatataaagatcttgcatcatctcataatacataatcagtggtgcatcacctcgtattacacagtcaatgatgtatcacctcgtactacacagcagtggtgcatcaccttatattacacagtcagtgatgcatcacatcgtaacacataatcactggtacatcatcactaataatgctcatatcaaaaacaaataatgctactcttgatgatgatatacatcatcacttattatactcttgatattacttacatatatctcccagcccatgtccattagtttcaaaattttatcgaaaaatcatataaattctatccaaaatcttcaaataaatttataaaaaagctatagaaaatatatcaaaaaaccaattggttagaagcttgaccaccttcatcatcttcaattatttggaccaaccacttgttaatataatgatgaattaataaaaattcaaacatgagataaagtaaacgtattgttacaaataagtttctattacatttttaatttatgtaaaaagttgaaatatataaaccccaaatatattattaattataaaccctacatattctattaattataatatataactaaacaatgccttaagatagccctcataaaagtagggtttctagattggaaaatttataaaaataacgatttttgattcaattttacaaaaatactaccataaaaattatttttatactatcttgaccaattttttttttgttttaaactgtaaacacaaaaaaaaaaaatgagacctccat

SEQ ID NO: 24683 - DNA, 1703 bp, Cannabis sativa
atgttcagaagtataatgctgttagagttgtgacattatgtcctttcaatatctgtgcatcataaagggtagctcgagtgtttggtgtgagtgtatcagaattgacatgtgtgttggggaggggtagagaagattcacttggacatgtgtgttggggtaagagactggcacattaatctttcagatttctcctttcatgcgtgtgaacaactttaagactaatagatgaaagtcttaaaaccctgcctcagaattgttcaatggggcagggaagattcacttggacgtgtgttggggtaagagactggcagagtaagctttcagatttctcctttcctgtattcgtgaacaactttaaggctaacagatgaacgtcgtaattaaagccctggctcggaattgttcaatgcttgaatccattaaaatgttttattctgatggaggaggtcccaatatttcccctagatgggtgttcactgaaggaattttcttttgaccaagtctattccttcaatgataatgggatgcaagctcatagtttgaaacattagaaactcgtcagatgccaagcaatcagtgatgaagggctgcagcttgtgagccagttttcccgattatggttcttgtgactaataagcaaaaccaatcatgggttgaagccactttttggttcttacaaactgggactttttgctgttgatgattgtcttcaaataaatttactgagaggggtatggcgggagcagcaagatccatttctttaaggcaaggcttgtgttggatgttttgaatatcttccttgtttgcttatgtatactatttatatatgtttatatgtacaatttctaattagaatgaccgattaaggaatttgaattagataggagaggaagatcgagaatatatcatagctagaatagaattcagattcagagcatgctaattaatttttctatcttatttatttggttaataaattaattaatacttgtgcagatatatggccattcaacatttcagtcaccactaccatcctttgtttttcataaggagcattgctattagacaccttaaaatgcccaacactatactgatatgacaccccttataacattcactgatgatcaagttgaccaaaagaatgtaattcagcatttcagccatcaacatccgatgccacgtgtcaacatgggcaacaaacatcatgttgatgagatcaagtgcttgggatgtcaatcaagattaagttctagtgatcatgaataagctgctctttatggctgcacaaaatgtaattgctttcttcatatgtgcggatcatatgcggagctgaagagagaaacaataatatccttctcatagcgtccatggccttcttcaccttcgcgtgttccaatccccgtttgagtgcaccgtatgtaacgatcggtacgatactggagcctttctttttttgtctcggcaatgtaattttaggctgtgtgtgaaatgcagtgccacagtaagagcaacttttaattatatgaatataacgagcacctcctttatttcactagggacttaaatacgcctatcactcagtccagtatggatgattcttattgtaagcaacatgatttttctttcggtgcaaagagtttgattacatctctgtttatggattttactgcgacgtgtgggagacagaaagagatccacaaata

SEQ ID NO: 24684 - DNA, 3156 bp, Cannabis sativa
aactattcggaatttttcaaaaatatacaggaatgatactgtaactataacgaataccgctataaaaaaattgaaaaaaaataccgctatgtaattagcactcctcaaggtactattagtgtctaatacattattcagtgtcataacactattgatataattaagtattgttcagtatcgctaattaattatagaacactacttataaaaagtggtggacactactcgtagtcaaaaataagaatcttatttgtacatattataaagaaggaaaagtgttatattttgtgacaacaaagatggaaacaatgggcatgcaaaaacatcaagtcatgttattgtttgttattattaacaattttctactctttcacacgcaatcacacgtgccattgtcattaactcgcacgcgcggacaacacactttgacaagacctttgactttgacccacaccaaagttactccaagttttttcacatattatttaagaaaaatgatacaaaaaattggtgctgaaatataaatataaatgtaattaagtataccgtcttaaataatttaaggtaataatttttaaaaaatatcactaattaattataaggtaatacatttagaaagtactaagtactagtgatgttcaacaataatgttctattatttaagaaaaatactaaaggacacttttatgagcaggcccgactttaggtataggtagattacgcttgtgcctaggatctacttagttcaagagcccaacagggtcgatcttgagagtaggcgagccaagcatgtgtcttgagccctgagtgtaattataaaaaaaatattatagtatatagataaaatattaaataagaataaaatgtaacaaatattgttagggtgtagttgcaaaggatcttactttaagtcaaaatatcgattctcaacctttacttttctaatttttaaaaaaatatttattgtgtagctatgaaagattgaaccttaaagctcttaaagtttttaaaagttttattattacattaaagctctaaaactatcatttttataataattaaactatatataggggtcctgaaatttaattttacttttccatatacattaagatcgaccatgggaccaaaaaaaattctttttaaaattacacattttattttactaattttgaaaaatattacattttattctaaataagggtccaaaaataattttttcttatgactcactaaattttagggctgaccctgcttgtgaggaattgttattggtgtaattcaatatcagatcttatttattttaatttaatgaagattagagagaatcactaagtaattatatgttgtcattctatactggtgctaggcatcttagtgtctcatagcaatgctcgttggtatttaatattaaagaaatgtgaaatgacaccttaaggtactaagcatcacaatacgtgacatactattattagtatattttaatattaggtcccatatattttaatttaataaataatatgaggaactactaaccaataataaaatgacacatcagtataacattagacatctcaagatgtcaaataataatactcttaatattacaatacaagattcttaacaaaaaaaaaagaaaggaaatgaaacattacgatatgaggcgactttcgaatgatttggtaagtgatattgtattcgtgcaataattattaattaaaataaataaaatttgatatttaattatatcaataacatttgtgacggtgctagataatttcgctaaaaacttaatagtagtaaaattaccattacaatttaggtttgattttgaaaatttataatgtaaataccattaaattatttatataaaaataaaattatacttatataccttatttatactaataaattttaaataagtaggcttatataaatacaccactcctctttaaattaaacatcactatatcattcttattattatttatattacaattcattactataacagttactattctattatcagagtcagaaattgaagacagacagaaagaaaatcatttaccatagtacaacttaaaaatatattgtttactaattattctcatataaaattgatgccacatgacatgaatcgaaaagacgattggttagcgatttgacacgattagaaaaagtagcccaattggagaccatggtagggtttaagggcttgaaaatgtgggggagaacacacttagttcaacatggtgcaagtgggatgggaaggaagattgcacaacacaacacactctttctctttgacatttagtccaacaaaatagatgcataaggaaaaatgtttcctttttttttttttttatattgtggggtctcaattctcaattaatagggttaaaacttattcttgaaagaaattgtgtttgtcttattaggcacccatttaatcctaagttcttatgttatacaagtgaaatttaacatttttatattagatacttggccaaacaaacaacacaagtagaggttagaaggaagtttgagtatctatttctctaatatatattaatatatatacattgacatgatacaataattattataatttgaaaaatttacctacaagccagtcttcaaaaaaaaaaaaaaaaaattaattgtttttcatttttaattataacactataaattacacttttcactttttttattatatatatataaaagttatagataatattaatcttaaaataaaaagtaaaaatatagtagtctacggtaacacactatataatagaacaccgtgttagagagtctcacattgataatgtgttgaaaccaaatactatatataagattaatgggctactcctctcattatcaattaattttgagataaaacctcatacattttaccatacactcatttattctactactttaaccatacactacacactgtaacaaagcaacaaaatagtatatataatagtgttcggttaaagataaatattatacactataaatatatatatatatatatatatatgatataggcagtctgattggaactacttgaatgaaaattgtttttgtcttattaggtgcccatttcatcctaagttctttttttttttcataactcatcct

SEQ ID NO: 24685 - DNA, 2763 bp, Cannabis sativa
gttgagaatcatagggtttcatcttaaaactaattagtaatgaatggagtaactcttatttttatatatggcttaatatttttactttttttaatctattaatttaggacaatattattcaataactcttgttcgaaattgtaaatatttaaaattttcaaattaaaacaaagaatatatatatatatatataattgaattataatttttgcatatacaaaaacactcgtacctaaaaattcatatatataaatatatataaattacacacaagtggtacatatatatattagagatagagaccctctttgtttccttttttcttttaattattattatttaatggaaaacatattcttgtattataataaaatatgatttttgttgacccctcatgttgttataataataaaaatctcatttagcttaacttgatctacaaaactcctctcaacttgtttgtctcaacttgaactctctaaacccatatatgcgtatagatagttcttacttcttagttatatatatatatttaaaagttttatgcaaaatgagattttttctgtttggattggtgacacataaacacacaattacacaattatatattatacggtatatagtagtaatacgtacacacagatagatatatatataatgatgataatatttactgttcaacaactctgttggaatcgtaccaacagcactgtacaactaaaatattcatgatgatgatgatacaatatatataggacatgctttgagtacacatgtacaccggccaacttttgtcccaacgtatagttttccacgtgcaactcacgtgattaattacatgcttcattatttcttatttcaaaattaatttccgtccattattaattacaaaatgttactttaaaaaaaaaaaccaaaatttttcttcaaagttgtatatgtgtagcactttgtttctctttattatcaattttttctcattaattatattcaaaaaactacctatatacgatcaatgcaattgtatatacttatatcttactataaagtgtttaattatatatggagattaatagttccacaaggttaggattaaggttatttggctttcccgttactcatgggacgacacgaacaaaaaaaattgtggttgggcaacacgtttatcatggtattttcatttctataaattaaattaaatataattaaacaaaattaatatataaaatccaaaactaacaaaattgaccctttctagagagtttagctagcttttgttgttatttaaatttaatccaatctagggcctaggcttcttatcttaagtatactaatatctatacgttagaaaaaaagaaaaaaaaaaggttaaaactttgaagaaaagctattcataaatatctattagctagtacataactttagtgggaatatgaagataaaagagtgcaaaattaactagagcctataaaaaaaacagaatatttttttggaaaaaaaaggcctaactttgaaaaaataaacttatccaaaaatatatttaataatagtaatatataaatatgtttacacatataattgataaccaattataatccataattgtattatagtatgggttctccatatcatatcattcatcacttataataataagtatcttttttttttcttttttttttaatttttttgtgtagcttttaatttatatatatatatatatatatatatgttattgcgttcataatgttagtgatttttgtcaaaatatggatgggaaataacaagtgctttgcacatgcataagcataacaagttgaaaaaatagagggaaatgtgtcatacacctaacaaattaaagagaaaaataaataataattgaagcttattttcaaggcaaaaatggagaatcgtcaagtggtgtcttctattgcttaactaaatgtggaagtggaatcttccatacctttaactaaaattattgttcccattaattatcaacacattaataagctcaaaattacaatttttcacttttttaaaaaaaaaattgaaattccgtttaacactcaattatcatattttggttacaatttctattaaatgtaaaatacttttacaataaaataaaattgtaattattccttgtaaacaaaagtacttgttgtgatcgtaagcttgaatttctcttcacaattaatttcgaattatcttcctaatattagggaaaagggaggggtggggttacttagttgttttcccctatcactatggtgatattaactcattatttcacttaaaaaaaaaaaaaaaaaactcattagtttagttatgtattggattaaaaataaaaaaaaataaaaaaactatttatattatagttaattccaataatatatacttttttaaaaaaataattataaatttaaatttttacatcaagttgagctcttgcttacagtctaattaactagattccaagaactccatatttaaaattttactaaaatatatacaaatctattaaaaaagtacttgcgattactttttattaagaatttaatttgatatagaaccccgtaatttaagataagttaaactatatttaattttcattttattaaatgaagtaactacgcgtcggttttgaatataagtaggccaaactcccgtttacactttgtttggtaaagggaagagaaagataaaaagaatggagggaagggattaaataatttctttgtttggcaagagaaagagaaa

SEQ ID NO: 24686 - DNA, 3074 bp, Cannabis sativa
tccctagtatcttttttatttattttgttttgatttagccaaatcaattcatcgcaatcctcttattttttacgatcttcttagatcagttgacaaaaaactgcgtcaacaacactgatatataaatgctatatagtttgttttgattattttattaaatagacaattcaaaataaataacctatttaattaattagttaaatattttacaggataaaaaaatatttatttttaaatgatcaaataaataaagttaaactaaattcaatataattctacaagtccacatttgtcatgtagtgtcgagaattgatctggaagactttagtgagagttcttcatacaaaaatcaaaagcgttaaattaaatgatcgattactatacgaaaagaaataaggataccctgatagttcatcaagaggtaagtcattctcatattgtattgtatttaatttatgtaaatgtgttgagatcttggggcttatggttcaaattatgatttcgtaaaattatttatttataaaacaacttttgcactatactctaatttggaccataaaaaccaacaaattctaaaccctagcccaggcggccttggctccggatcccgaaactaggatgccagtccctcgaccctggaccctagcccctcgatcctaactccagtctcagaccatttctaaatattatcatacaagttaatatgaatgattttatatattaaacagtatatacggatcacattaatttattaaaatttatcatcgtactatttaacaccctttatatggtctaccaaatgacaccgatgatgattaatagcaatccaaagcaaaaatgtttgttatagttatgtttttgcaaagttgaatctgtatcactcaatgtggatagtttgttatatatacaaaatgtatacacgtatcacacattataatggcttttctttattaaagttacctttattctgctttctcatattattatattcttagactatcatacaagaaagaaagaaaaaagtgtagattctaagtcttctgtcattatgtacacatgtttaaccaatttatataaaactatatatgggaaataaataaattagttgaatttttcatgtgaaaaacacacacacacatatcacttatctgagtgagtatgatagttgaaacttatatatatatatatatttatatttatgtaaggtgctcttcattttttattctttatttttgaacaaaggtgttcttcatgatctttgatgcaactgcatatacaactttaactttggaagctcagaatattcacttgttatatatatatatttgtatgcaagtgttagaaccgtgcggaacattttctttcattaatttctcttctatgctattaataattaaaattaatattctctatgtattatataatactttttataaatctttaattatttaagttctaaaagaaaaattataaatctttatttatatatgtatttttttatttaaataaatatagagattaatcatgacaatattaatataaagaaccttaatcaataagattataatataggttggtatatacagattcttactggaccatgcagccgttataaattaacatgttcacgtccaataataatttgaaattatcatacatatatttaatatatatgagatttaaaattaaaactcatatttttgatctgtttgaccaaattatcttagttagtgatttataaaagttttaaattcaaatttaattatttaattgaaagcagatttgctcaacattgagtcctattagtttagctgaaaaacacaaaataaagacctccatatcaattctacaccacatatacagtgatgctgtagcattcttttatttctcttttctttttcttactccctctccactaatatatatatatatatatacatacatatatataaaaatatatatttattaataatacatataaatgtgtccaagtgttatataacctgtataggcttttttttttttatgtgtgttatatattagttgttttataaaaaaaattgtatatattaatatatattatttttaagacaatatttctattaatattataattatatattcataaatttagattaattttaaatttatagagtatataaataagtattctaaatgttaaaaatataaagagatattaagatctaaaatatataaataataatatttaaatgatatagattaaaaaaatagagaaattaatgtatagcatgtaatgtaaaagtttgaaataaaataaaaaaataaaattttaataatatattttaaatgatagagtaaaaaagttgttagaaagtcctctaatattaatcctatatatgattatttcaaattattgacaaatgctgaatatatcaagtttgtacacatacttagtacaaatatcagcatgaactttttattttttatttttataacaaataaatatggtgaactattataattttgagtgactgatgtaatcccaactgttttggttgttttggtatctgtaagaattttttagttcaattttttatttttttatagtcatgtatcctataataaaatgtatcctataattattgaagatattttggaaaattttaaaaaattcaaaataatttataatataaaaattaatattcaaattgtctatttcacacacatataaaataaaaaaattactcgtgtaataaactctttaaactctatttttgacatgttaaacttttctctaaatttctcaaaattttactaaatataaccatttagaaagaagtgtattgtaaaatttgtatagatgactttttctttaatgattcaaaacaaagaaatattctagttataggaatattttattaagatgagacacgtggtgctaaaataatatgcacacaaattcttaccatagtagtagtcatcacatatactgatcatcatcatattcatgccccctatatataagagcccaactctctcaaccccttacctcaaatcaaaccaaaccaatccatacatacatatatatatat

SEQ ID NO: 24687 - DNA, 2446 bp, Cannabis sativa
tctcatctattttatattattttataacaaaatcaaattaattaaataatttaagaatttttttacaataatttgcaattaaaatatttaaatttaacactcagttacaaattaatgcctaaatttaatttaaggcaaaaatatacattctgttatggttctaaaatattcaaaaatatcatttgttaagtgacaagtagtgtacacttgtcatatatttattggtccacattatttaatttttatttttgaataaaaaaatatttaaatatttaaattaatataataaaataattaatataacagcaatttgagcttgataataagctcgacatgacagagctttgagcgtgccaaaagaaggccaggaaaaattttcctccaaccccaacgaccattttcaaaggtcaaaaactatttcacaattgatgtgcccacacggctcttgtagtcttgtggtgcaaaaatacatttttattaaaaaataaaaaaagaaaaaaatatatattgggaacgacagtgtctctattaaccccaataccctggactatggacacaactttttgtcggtcctaagtcaatagtagagcgttttttttttttttcttttttctataagtgaaatgtgttgccattttatatatatgtaggagaagaggttccacaaattgttaagaagttcataataattttatatgccaaaatgagaattcaaatagcttattacatatgcacgaatacacatgtatatttttagtttatatataattaaccctttcatcaattcaataaaccaacaaaaccagcctgaagggagccaacataaaaattcgagccacgttggttaaattcactgattgcggtattgaagtaatagcggtcaagagggatggtttgcaaaacgacaccatttccatcgatctttactgcggaagagattgttataccaatagggctcattgtgctcactgccacccaaaaatagtctcctatttgggtcttcttaatattatcaggtctaccttcaaattccttaataacagtggatgtaaaagccaaaggacctgtaagccaaagtttctggattctcttggttatgaactcagttacaagaacaaatgaggcattactacttatggccacgccggctgctccagctaggccccttagaagaactgatacttgttgtgttgtcttgctatattttagtaatcttcctgttgcgtcattcactagaactgctagtggcagttggctacaaaaacatgtacatgtgttggtcttaaaaaaatgtattacgtagtcacatatatgatgagttcacaacgaactcatctactatataaaaaaaattatataattatgtagctcttaattgttttttagtttaatttatcctcagaacatagaacctttctattttttttaatttgtttttttgacatgggtagttcaagcttattactttctgttggtttaataatgagcaaatgtacagtatattacaagattatgtatcttttaacatattaaattttaaacaaaaatacatttttgtactaataggtaataaaatttaagggaaaaaagaattttttcttattaggagctgagataagtattcttttcacaaaataacaaataaaaatttacaaggtattatttattttttcttacacggtgtaataagagacattgtgattatactcttttatgggtaaatatttttttacacactatattttataaaaattatggattggattctatttcttattcaataacaaattaaattttatattttttagaatataagtacaaaataatactctcagctgattttttttaacatacaaactgaatttaattcctagcacaaacaaattaatacacaaaatgtaattagtctggttataaacacttcaaaaatatattattattaagttttattttaataaaaattgaactattatgttgttctattttattctattttaaaaaatacaagtcaactcaattttcttttaacatattaaaactaaatctaatttctagtacaaataattaatacacaaaatgtaacgcacctcctaactattaagttttattttaataaaaattgagttctatatattattttatgttattttgaaaaatataaatcaactcaatttcagcatttgaatcaaatttctagcacaaacaaattattacacaaaatataatcggtttggttatagataccccatataaattatggctaattagtaatttttccccctaaactttgatatgtactaaatcgtgccccctgaatttttttggacgttaaaaattccgcccgtactttgatctgtctaattttagtaaaaaattctaacatgaatgaaagttcaagggacatgatttagtacatatcaaagtttgaggggcatgatttggtaga

SEQ ID NO: 24688 - DNA, 1295 bp, Cannabis sativa
aaaatttaaaatttatttaatcaagaattttttagtcacagtattttaacttttaatcacaaatttaattgtgactaaaagtaaaattttgtatagtatagcaaaataataataataatttggtaatttttattcagaaaaaaaaaatagtactttctttacaatctaattcattataagttctttttaaaaaagttttcacaaaaggaaaatcctacaaaaaaagaatatatgaaaaaattgctagaacactttccaaaaaagagtatatgtgcttctaaaaatttttattatgtatttaatctcaaaattctttttatacatattaccaacaataagaaaaataaatacaataactaaatgataatgagtaatattaaaataattttttaatttattttttctacataatcgatacattataatattctaagaccataatgaattttgaggtatcgaacctctaaaaccattattgccaccaacgtataattaagaaaaaacaacacctaacaattaagggaattcaaacctaaacctgaacccgaacccgaacttgaatccagacccatgaagcctatatagctagagtcctcacattcttatggtaataaataattaagaagtgataatattaaccaggttaataatgttcatttataaatgggattattgtactgaattgaccaatcatatgaggcaggtaatataaggcaagtaggaagaagtaagaaagtagtaatattaataatgtgggtcatcaccaacctgcgtacggcggttctgtcggtgcaaaagtgagcacaaaaaaacaattgcatgggtcacctatctattctatatagtattattcatcacctacctatacacctcattcatttttatttcaatatttacaacaactcatataacatatcatgtatatacattgtttactcattactacttagaggtggtgtgcaactattggcattatcaattaattaattatgtatcgagttttatataatttaatttaataaatgttattgaatatcgctaacaacttgcaagatgttatctcgagatagtgcgagggctgacccttagcattgtgacacagtagttccgtgatcggtaaggagaaataccaggtaagctgtacaatcccacatcgcctgggaaaggtcaagtgggatgattctgggactactgactgtcacatatagactggagatccaaggccgaccctgagttaatttgggccctagtaaaaataattttttttgggccctttttataaaaataaatagtat

SEQ ID NO: 24689 - DNA, 1894 bp, Cannabis sativa
ggccattagtatttaaaatttaatagttattcatttaaaatgtgatttaccccaatcaggtgatcaatgatcttaagcaggcttatataaattgtttatataacatgacttcaaacatttattagaacttggagtgttagtcgatttatcacaattcggtgtaaaagctttgaagctatgcctacttttattaaggtagtgtttagaagaattttgatatactcccccgactaggttcttcaacgaatagcagtgttaataggcaatgataaagagaattggaaatttgaaaagattgggaagatctgatatttgatattgaacgaaaaaattatatcaccttaaaaccacgagatattcgagacacctcaactctcactagaggtatttgagaaacctcaactctccctagagctaaagctgaattaccatccattctttctactctcatagtctcatatttacactactctatttcatctcattcgcaacccctcattacagttaccaacatactctctataatctatactacattatgtatcccactttacttttctattggtgtttataaaatttgaaatttaatagagataacagaaagaaaaagaagattagtaatctactaatcagtcttagaaaaaagtggttgatatttgtccaaggatagaatgtatgcttctttggcttttagaaacatctaactaatttaaagatgtttaagagattggtgattcgccttctttagctttttgattggtagaggatgtcagttaagaaaggctcctcttaaattagggatggagggaaaagatatataaatgaagagaaatccttcagcatgtacacacattatggcttacgatgatataacatatagtatcaactcatgcataatcttatttagataataaatggctgagtaatatcttatttttctaatgcaataatggtgatattcctgagtgatgtacaacacacatgggtaatttgttttgtaggctttacaagaatgatttcattatacaagtattacaatttttttttgtaatgtgctacttttacatcattaaattaagtatctatggtttactggttgaagtttggaaatctgtagtcttagttctgttaggtcctcatgtttgatgtttgtaaaaatactaaaatataaattaaatgtggttatttggatatgagccactgttcacgaaccttttgttttcaaagatctattcctattgaaagaaaaccttatgctctcattgttgaatttgctattctagagtttttatttgatccaattttatatctattgactatatgttgactgaaattttgttcagttgttttcatttggaagcaagagctcttttcagttttctgatgcttggaaaagaattggtatatttttcttttcccctttggaagtatcccgccttttttataatggtttctgcatctgtttttttttttcctgtcttctttgcggaacattgtttgaattgagtatgagagaattcttatatgaataatgattgcttcttcgctcactttgtcattatttttactttctcgtataagctgttttgctggatggggttgctactactgcttctgtggaacttgggaaccttcatcttgtggcatatctttctgaaaagaaagcaacaggacggcctttttttagaaatggtacgcggttaccatctttttagtctgatattagacaaagctgcattctttacttctcagtagtaacgtctctgaaaataataaccattgacattcatctgtataaaaattgttcaaatgatgtaagtataaggatattgctttcacgcttcacacctaaagtgtaataatttgacattgttattatgttttatataatatc

SEQ ID NO: 24690 - DNA, 3945 bp, Cannabis sativa
  modified_base (3386)..(3391): a, c, t, g, unknown or other
  modified_base (3441)..(3447): a, c, t, g, unknown or other
agttacagtgtaattacatggtcaaacaaacatgccaaattgtgtaattacctccaattacaacattgtggctttccaaacgcacagtgataaaataatagtgaatgcaggaaattaacctacgaatctctaataaaatcaactcaaagaaacatcaggccactcttcaaacaaaaggatcaaaattggtcgtgtatcagttcaccactaaaaaaaacagttttagtgtcgccaataagatttaataatagtaatagcatcaaatatgtaattgactttaatagacaaatcactactacaaaaatagtttttcttaacatttttaaacaatcgttaaaaaattctcgttggtttcaataaccgtcgcctatacgactgttgtaaaatgagcaaaacaggcgactgttaaaaactgtcgctaatgtgaacttctcgacggtttaaaatcgtcgcctataacctattataggcgacggttttaaaccgtactctaattgaacatacaacctgtagagtttcgtaggggtgtggatgagtttactagaattgctcgaatgcaaataaattcttttggagttactcgatgcccttgatgagatgtctaaatgtgaacttcaagactcctaataatattagagtacatttgtttatgcatggcatttaaccattgtacatgacctggtattctcatggggagtcgttcacgctactgattgtaaaaatagtagacaacgatatagaagaaataacagatgtgatggctaatattttaagagaagaccatagtcttaatgatacaagtactaccactgcttcttttaacaatcacccactgaatggtagtagtaagtacgttgaattgtttatggatatggaaattgaattgtactcgggttggaaaaaattagcgctcaatgctttggtgaagctgatgtactgcaaagttctcaacaagtggagtaactattctttgatatgttactcttcatattgattaattgatttatttctaaagagtacaaaattacccaagtcccatagtcaaagatgaagttgtctaaccttagtttagtttatgactcatttgatgtatgcaagtattattgtaccttgttttgaaaggagagtgagaaaaaagatttttgtcctatttatagcaagagttgttgaaaaaagaaaaagatagactaaaaaaagttgccaaaaatattatgcaatacttttcctaacttcgagattgaagatgttatatagttcaagacattcagtcggtgacatgtggtggcattactctaagagacttaaagagtatgacgtgcttaggcatctacagatacagaagagtggaagcggtttgacaggcgccatctatccttcgaacttgaacctagaaatgtaaggttgagtttcgccactgatgggttcaattcgcttggtaacatgaacaactattatagtatgtggcgagttatcttagtcccatataacttacttccttggagagactaacttgctataataatgtcatttttaatgaaacacatggcaactctcaaggtacattattgatgacccaattaagaaatgattaggtatgagttccctataattaacacgtggttctctaattagttggtctaagatcaaaggggtaaagaaggaatcaatatcgttatttgcatagaaaaattatataattttttaaataataaaaatgagatcgagtaaatatactacgtacattaaattttaaaaaatgctaagggacaccttaaggtgtcaaagaccacaaaaggtagcatgtcactattagtacaatttaatattgagcccaacacattttaatttaataagtaatataaaaaactactaaccactcacaatgagtgtggaattgcataagattctttatatatatgtgtgcactcttaatgggtattacctatgaatgggtaatattaaaatttttttagtttttatgattaatttttcagtttaattaaaaaaatttctcatctttacattatatatgtgtcggggttgttccatcagctgaaaaaaataataaaaataaaagttttttggaaaaaaaaaagacatgataaaaaaagttgagtttaacttaaatatttttcatataaacatatttttgatatagtgtaaaaatatatattttttgatattttctttacttaagcatagaaatttgaatttattttttattattcgctatcaaattaaaatttaattgtttaatatttttaaaattaatatttatattaaaaattttttagtacccatcaatgggtaatactcattaaaaagtgttccatatatataaattttttatttaattatttatttttttaaatggataattatttagtttcatcatcatcaattcttccaattcgtttttttttatatatatttttatcctcttttcaatttttttgttaatttttttttaaaaaaagttttaagaatgtgaaattataatactactatgtgaaattatgatgggatcccatgtattagtgatggtctaccaaatatagccaaactaaggttttttattttttatttgttgatccaattcacacgtgacttcacatgttttcttttctttgtttcttaaacttattcccatttacttcaagcgtcttgggaatctcataccaagaagaatctctatatcgaaattagacagtgacaaacctttacgaattaataatatatttatttttcaggtaatcggcattaaaagtgtgttatatataatcaattgttcattcatatagcttctttttaacgagtttccctacaataattttatgtaataatacttatatataattaaagaatctattgtgctaatataataattaaaagttaaaatttggaaaaaaaacttgatagatcatttatgtgtatatttaagggtatttataaaatagttgatccaattcaatctacattattcaatttaattcaatccgcaaaatgcagatatccatacttatggaaattggattggattagaaaatttaaaatctgcaattgtgtgaattagatgttgattgacatataaaaataactaatacaatccaatacatatatttataaaaaaataaaaatatatatacaaataatattttaatgtaaagaaataataatttaaacgtggaatacatataatataattattataaaacttaatagattaaatgtatattctgtttttatatgtaattttttttttgtatatacaatgtgaaacaaaattaaatatttctttatacataatttttttcttcttttgaatttgttatttattatttatttattttaatttgttattagagatataaaataacaataatttnnnnnnttttgttgttagttatgtgaaaaacaatattttttttcataaatattaannnnnnnaatattaaaaagtaactaatctaaaataaccgatctaatccatacttttacggattggattggattggatttaagctattgtacagattaaattggatctaaaaataaaatccgcaccaaggtggcgtttggttgtaggtaatgaaatggaatagaatggaaataaaataattttcattccattcctttgtttagtttcatattaaagtattgaaatgtcattctaatagaatgacattttactattttggtggaataacaattttattttgaaatagaaggaaatattattttaatgtataatgagacaaaatttaatacttttgttttttatcaatttttctatgtatgttaaattttattctatttcattcatattcatatttcccattcacattctattcatattcctattttcattctcattcctattcttatattttcattcctcttaactaaaccccaactagtgcaaatatgctaccgttacgtatctat

SEQ ID NO: 24691 - DNA, 5796 bp, Cannabis sativa
  modified_base (4749)..(4750): a, c, t, g, unknown or other
actccttctacacaactcaaggcttataccgagagtaacttgtctgttaatgttttttctgatgctgactggggtgcttgccccgatactagacgttctatgacaggtttttacatctttttgggagactctttaatctcttggaaatccaagaaacaaaacacaatttcccgttcttttgctgaggccgaataccgcaccatggctaatactacttgcgagataatttgcttactcgccttgttgaaagactttgggatctctcatccgcatccagtcctcatgtattgtgacaacaaagctgccattcatatttctgaaaactgggtctttcatgaacagagcaaacatgtggacattgactgccatatcgttcgtgagcgggtacaaagtagccagttgaagcttcttcctatcaacaccaaacgcaaccttgccgaccttctcaccaagcctcttttcccatctcatttcaaggagttattttccaagatgaatgttacaaatttgtacactccatcttgagggggcatattaaatattaaataatatttagtgtttgggtatgaagatatggctattcttagttgagtttggtatgtattctagggttggatatccaacccctatataaagcatcgtttattgtatcatttattattacattttcagaataataaaacaattacttttccttctttatctctctaatatgagcaataatatctcataacacattgtcatatcaatataaaaattagtaactttaaaatattatataattattgtgcaccacgtaaaacttgaatcagttccctaatagcattataatggagtgtaaaaaaaatgtcatgcattgatataatctagtacattctaataaaaatacaacttcagtgtattataacaaaatgtctcaaatttagaatatgctaaaaattattctaaatttgatatataaaatctatatatatatataaaggagaagtataagacggtgacgtgacactctaaaatagcttaaaacttgtttatctattttctgattttttctaattatttaaaacctatttatctattttctaattttttctaattatttaaaacctatttatctattctcttattttcttttatttttctaattttttaaataaaaaacacagtaattttttgttaagactttataaatatctaacaactaagttttaaaaaaattaaaaattaaaaaattaaaaaatctatctatctatatatctatatccaattaaaaatcactcaatatagtcttatctaattctctcaattacaattaataaaaaaaaatatttatatacaattttaaatcaaaactattaaaactaacactaaatttaattgtatctcaaatcaaataacttattaatcgagtaatttaagaatttaaaaaataataaaaaacctaaaatatctatataaaaattaattaaaaaaatatcgatatatagtctcttataaattgattgcctactattttaaaagttctggtactatattctcacaatttttttcgtttataattatatggtgagttttatttaattttatcgttatttttgtaaatctctatttcgaggtactatattctcacagttcttttcatttataattatatagtgagtttaattcaattttatcaattattttgtagatttctattttaatttagtcttttattaccctatattatttgacaataacccttctttctctttctgttttagatcacaaattatgtgaagatttttttttatagatttgtcaatttttttaagatctctattctcagtgagaatttttttcaatttttaatatttgtaaatctctattttagttttggtttagtcttttattatcctataccgtttgataatatctcttatatctctttcttttttagaccacaaattatataatgagttttttttcacagatttattaatttttttaaaaaaaatctttattcttgatgaggattttttaatttttaatcttttttttttatctttattttagtttcagtttagtcgtttattaccttatatttttttggtaatattctttttctttctttcttaggtcacaaattatatgatgatgcaagtaaagaatttataacaaaatcatttacttatgtataaaaaagttagtagttaattaactcaagtatatgatttattttatgtacatagcaaatttattttgatcaatagtgataactacaaataatatatgataataatagcgactttaaatatagtagcgactacaagtgagatacggtgatgacatcggctttgaatgacaacagttttaaaatcatatgatgagttttctatagatttatcaattaatttttctagatctatattttgtgtgatgatttttcaacctctattttttttatttttttttttagataagaaattatatgataattttttttaccatattaatttatttttctatataaaaattatgaaaaaatttagtagaataattactcatactattaaaaaaaatatcaactttaatatatttttataactaaattatcaataaacaaaatataaccgcacgcgaagcatggtttgtttcttagtataatataagaccaaatttatagcataagaaattttacaatttttatttagaaaaatttacataataaactaaaaatatgaaaaaaaaattataaaaatatattaatacggaaaaattttcttttttacgctttgagcttttttatttataaaaatacatctttagtaaaatccataaactatttttttttatagtttacttatagttgttattatattatttttttggttgttttatactttatttatagttctcgtgaagttgatttctcgttgttttttaattattttcttactttttactgaagaaagtgtattttataattttaatttcttacaaacgtatttttgtaaataaaaattttaaattgtaaagttgtagattaaacatacaaaaaaaaaatgtatttgtgaaaatttcccttttatttaccacacttattattattaattagttattataagatgtaacattctttatatattatattattatgatacaataaaaaaaatatgtatttatatttttaataaagattaagggtgtatttgaaaaaccactctatttaaatcttggtataatttaagataattagtcaatttaaaattgaccatgtaactacactataactatgaagtcccaattacattttccaatttccaataattatgaccccatgaaattttggtgtagtacaatgtctaattatgaaatattataatttttggacattcttttttttttttgaatgaataatttttttttttaaaagaaaaagtctgtatccattaaaagaagatcagaatagtacaggatacaaattataattgtaaagagcaactcttccccaaagcttcctgatctaggcctaaagctttcctagctaagcagtgggcagcttcatttgcccctcttgagatatagctaagaaaagttttagggaaataagatagcaagctgttaatttcagtaacaaaatgattgagatgcagattgtgagtatcattattacaaatataatccactaaaaccttacaattcgaaacaatactatccagataaaaggaatgagtatgacaccgaaacagagcaaggtgtaaagcttgtgcttccattaacaaaggtgagggaattccatgccaaggctttgccaaatataaaagtacctcccctttgtttgtttgaatggacataccgaaactcatcttgtttagctgtgtatcttgagcagcatccactgaaagctgtagattgtaattgggagcagatggcgcactgccattggacatcaacgaaacatcctgaggctgtctaatagtaggagctttgtcattgcagctttggtattggtccatatattctgttacttcacgtaatacctgagcaggaggagaagagaaaccagcatgtagccaactgttcttgcagttccaaattttccacaacaagcatacaaagtagtgataatttcaaacagtaaaaatggtggcagcaaggtgtaataaatccaaacaagttagtgaaatatttttagtaatgaaatcatgaatactagttaattcccatacctcctggacagcggggcatctgaaaagagcgtgctctagggtttcattgtgatagtgacattggtaacaatgtggggaaggaagggttttccgtttaaaaaggttatagttggtaggaaggatatcatgacaaacacgccaaagaaagtgtttcagtttgggaggtaaaggaagtgtccacaactgtttccaccatgtttgagaggctttgttatctcaaggtgttgggtcattttggtggatctgactatgggcttggtggtaacctgagttgactatgtaagtgccatgaataagcatcagttgcagagatgttggtaagagggatgctgaggatagcttgagtaacatcttcagggaaggtggcttggagaagggtaaggttccagtccttggtaggtgttaagagattttccactgtcatatttgcatctgattggtgtcgaaggtaatgaagtttaccatatcctggaatcaaggcatcgttgaagatagagattgtggtatcatcaccaattgatcttcgaagacctgactnnagaagttctttgccccaagtgatactagtccaaacaagagaaggcctatggccctttccagaattaaggaaactagagtgtggaaagtaacgggatttgagtaaggtggcaacaagtgagtgagaagactgaagaagccgccaagcttgtttggccaacatcgcctgattgaaagctttcattgatcgaaaaccaagacctccatggtattttgaaaaacaaagggaagaccatgctctccagtgaatttttcagttgtatttcgttcccccccaccaaaaccgagccatcatggattcaagcttagaatgaaaggaggcagggagcctaaagcaggccatagcatatgaggggatggcttggacaatagattttaaaaggacttctttacccccttttgaaaaaagcttggaattccatttgttaagatgagaccaaacccgatccttaatgtaattgaaggcatacttttttgttcttccaaatgcttgaggaaggcccaaatatttgtcaaaggtatctcaaacaggtatgccaaggatagtagcaacgctgtttttgatctcagtggtggtattcggcgaaaagaacaatgctgatttggtaaaatttaccaattggccagaggctaggctataatcactaagaatttgcttgataatagttgcagcatcgggggaagtagagctaaaaagaaggctatcatcagcaaagaagagatgagaaatacttggggctctcctggcaattttaattctaagtgaatgtctgcggggttggatctgttgagttttgaggtgaatgagagatgaaagaccttcagagcataaaataaataagtacggagaaagaggatctccttggcgaattccccgggtatgcttaaaatgcccaagaacctagtggttaatggagaaggaaaaagttgcagtagagacacgggccataacaaggttaatgaagcgctcaggaaaagaaaatttctccattactcggcggacaaaaacccattcgacgtgatcaaaagccttggccatatcaagctt

SEQ ID NO: 24692 - DNA, 2173 bp, Cannabis sativa
tatatatataaataaaatcaaaataaatactaaaattaacataaaataatataaaaaattattttaaaaattatttaaatttattatttttttaataatatgatatacttatgaggtataaataaaactcttatttattaattaaaaagacacatacgcttttcaaaaatttataaataaaaatatttatactttttaacaatttaaattttttacattttctgattatgtaaataaaataaaataattttaatttttttcgaatagtttagtgaatataataaaatattatttttaattattttatatttttaacctattcattattctaattctatgtacagtttagtaatcgtgagtattgcccaaacaattattgtaaagtaattttggtatctcaaggaaaaaaaatacttacggtcattctagttcttccaatgcccttttattcagtcattaattaaaactcgattgaaatcagcaacatttattatgtatggccaagaagattattattaattattgatctatgcaacttcaataatctctatattttttttttcctaatttgatatttgagttagaaataaccccacatgcaatataagaaatacaataccttattggtttgaattggaatcccaaatcccaatcctcttcctaatgaaatttcccctcaattgtaatagcttgtaaattcttgtctctacacttaggtaggggcaaaataattcaataacatagcaaagaaaacaaacagcagattcaattaatacaattatatgtcataagatacattatgccaatccaaatttaagccctcctacttacataataactataatccaaaatagtgtaaatcgattatgcactcgaccaggcaaagataacatacttgcattctaatacccataagatgttctcttcatcatcctgataaactcgtcgaggttaactgctccatcatctgtatatttcaacaacaattcttccattattagcaataaaaaataggatccactaagcacacaaaggaaaagaaataaagaaaatggcgagtaagaaataagcatccagatttcagcacgtcatttatgaaataatcacaataaagaagtaggtattagtttcctatgtacatcaagttccgaaaatggagatctgattacacaggagacatatttcaataattgcatgtcaatgaagaaatataagctgcaaaagatatacaaaaggtttgaacataagctgactcacgatctcggtctgcttcctcaatcatatcatctatctcatcttcagtgaagttctcacccagatccttcgcaatgagcttaatgtccatggcagatattttcccctaaattattatgaaagaaaattaggtacagacaacaggagcaagctcatattagtgagaaatagaaccttacatccttatcttggtcaatgatttggaaggctttcttgagctcctcttttgtgtccctctctccaattttggctgtcatcatgtgcacgaattcatcaaaatcaattgcaccacttccatccttgtcaacatccgcaatcatttgatttatttgctgcaatgaatcaccatagatacatttagcacttcaataatgaccataatgaaggaaagttaagtataatacatctatcaaaacagcaatatttgaatgactcagattacacttgtacggatatatatttaaaaaataaaaagactataagtgaacacattactgaaaaggcgaagttggagaaataataaaaacaaattataaaatgcccaaattcacaaaacacaatatgatcagagacaaacaaaggggaagccctttccaggatatacgttcaacacaacaaagattcaatatttccatttccagggcatgtaaccccagaatcacagacatcaacaactaagtgtaccgtcaaagaaagcgtattgaatttacctcttctgtcatctcaaaaccaagagccctgttatgacacagattcataattagtttcttcatgagtaattaacttgtaagactacagaagtacatctgaaattatcttcatacctcatggcaacattcagctctttagcatcgatggttcctaaaaagcagataaggaaaaaaaaaatcaataaatatgagctgatacatacattatt

SEQ ID NO: 24693 - DNA, 3653 bp, Cannabis sativa
aaaaaagataaacttcttatgttttcgttcatttcaagcattttccttctactttcttgaatatctagtttttatatcgatgacagataacaatccttagcgtactcatatagctagagtttttgttttttttttctttttgaacaaagagttgtatatttttatttattattttaaaaattacaccaaatataacaggcaacaaagaaattatattgttttgattatatgtattgccgatattttgagcacggtgacatatgttgggttttctatagatgaaaattattgcatatgtatgatatgatcatcagtactttattatacttgccttcctatacacacttcatcatgaaatatttaccactataattttccctaataattacgaagaagcttttttttttgtatgtgtgtgtatattgttttataggttctagaagaagatatcatcaatttaattgatcaatcattatgttatttagacctttaaattggaccacatgcatatttagtatgaatatgcatgtacgcaccttaaaaattaaataataaatatagttatagccccaaccaaaaaagattgaattaattaataatgatgcatatatataaatatatatgcatatgttcatatagttatatatatatatagtttttttcacatttagacattaaattacgagcaggagcatgcattataactaagtggggagagattgaaaacgtgatcggttagaataaatgaaatatgctacttctcagcttttaagtttttaaacatgtatgttaataaatttttaaacatgtatgttaataaattaagtttttaaacatgcatcgtaaataaagatttttaagtttctataaacttaagtagtattggaaaatttagggtgcctcttattggttttcttttaggattgtagtaactgtctatacagggtcatcaaaaataaaatattacatcaaagaaacttaacttttctaagcaagaaaaaaaaaattgaaataaatttggggaagaaaataagcaaattattatatgcacagcagatgaagctaaaagaatttgtaaaatttctatagcaaaattataaatgatcctaatatatatatatatatatatatatgtttttaattaatatatgattcaagaaaaactcgatcaatattatttttacacatcaaatattttgctttaaataatattgaaatagcgaatatatgtgcattatctcccaattgtaataaaaataaaatctcattttttttattaaatatattgtatataaatattcaataatgtacagtgctttctcgtttatgtaagtaaccatgaaataaagtgcaagaaaactataaatatatattaattatgacaccacaaaaaatacactttaagccctttaatcgtagcatatataatttttttgcaaggctattgataatagtactttatttaagtccaaatatataattatttataattaaaaataatatctaaatacaaattgtaactaatctaattttgttactgtgactagtttagtcacaaataattagaacttttgtgaataataatatttttaaccagtgtaagtatatataataattttctttagtcacaaaatttgttccgacatataaaagctagcaatatttttgtattatgaagagaaaaaacaatcatgaattatgagatacatattgatatattatttaattgaacaaaaggggctgatgaacataattacattcagagagaaaaaaacaagggcttaatttataagttagatattaattatcaaatagaattatattataattaataaaaaactgatcagattagctagaagacgaaaatgcacgtagtagtgtttttgttagttgaagttgtctttactaggacagaaatggcattccataatagcatgtaatgtatacgttgccctttctcaccaactatatcatagaaaaatatatatatatatatattcttatataggatcatttaatgaattaatggcgtatttatatatacttagtcaagtacattccaatcaattcttttcaaagtgtatatattatatatgatgaatcttaatttatgcataatattttgtatatacatacatattattattcataaattaatttaatttagttggtatctaggtcaactgttatactcatgattatttggagtcatttataatacgtgtatacatactccagatatgtttccttgcgcttcatgccatgagataaggaggagattaagacagtatctatattttaaatcattttaattacaaacatatatattagtttgcaaactataataaattaaacacgactagagaataaataagataacaaataaatttcttatattaatttccagctaaaacttctacttttcatgaatattattaaatcattatagggatgcgtgagacactcaactctttcatcctagtttttctacgaatttgtcaaaatacacatttgccagaaaagtcaaccttattaatattcgttattgttttatagtaaattaatacttgattatccaccgtccaattatagaaatgatcattagataattaatgttgcataataaactttctttttctttaaattagaaattctatatgccgtcctaaatgccgacctgatcaactttaacacatcgcatgcaacacctaatttaaacacacacacacatatataaaatatacatataactatgtatagacaatgattaaccttataaatgggtacgaaaagggtcgattggttggttccttataattatggaaatatataatattcatatactacaaaaaaaatttcttaatttagcgtaaatctaggagtcctcttttattatatatagtcctgttgttttttattatgattaatttggtgtcaaattagcatatgtttcggctttattactaatgtttatgttacatacttattattttttttatatatacttgatagacatgtacacatgtacataaaattaatcgtgatgattattcataatcatatgattaatgataaaaaaaaaaattattaatatgaaaagggaattaagaaatttttttgagccgtgtgatatagtttgcaagcgctttctttcttttttctttttgaaaaaaataaataaaattaattagtgaattattgactttaagatgaaaaacatgtcacagttttggattatatagttaattatagatgttgtgtgtagatagctagttgatggttgacattcattcattagcatacaaaaaagaaaataaaaaacaaagggttgataattacatatcgataaaatcatgatatcgtagggtcatgaagatcacacgtggaccctgtcattctcataacccatatgcatgcgttccaatttaatctctcttatagcttaataagctttctttctttcgtcatgctttcgtttttttcaactcaaatttcagacagcaacaccagctacctcctcctaattattttccctttcaaataataaatattaaataattaaaaacttccaagttgattttccacttaaattttgtgaacttagttattttaatatctagtttagattataaatagggatttgttagaaaaat

SEQ ID NO: 24694 - DNA, 3692 bp, Cannabis sativa
aatcaaattatgtgattctttagccattgctgggcattctctcactgatcttgatttgattcttcacattctcaatggactgggaccggagtttgaccccgtggtctccagcattacttctcaaagtgaaaacctctctcttgaagaggtccaagcacttctcatggcgcatgaaactcgtcttgaacgccacaattctgtgatggatctttccaccaaaatgtcagcaaacttaacctttggcaattcaagaaatgccccttatcgaccaccatttgctcaaggcagaggattccctgctgaaaacaattcaagaatgcctcctcaagcaaatactcgccccaacaacaccaactacagtcggcctctttgccaactttgcctcaaatatggccacactgcccccacttgtcactatcgctttgatcgtaactgggtcactccaagaacctctgcctctcaccctcaagtccacttgactgaacatcaacaaaccagtgactctcacgatcatgtttctcaatttcttcccgactttggagatgatgctggttggtatgttgatactggtgctactaatcatgtagcctttgatgtggaaactcttgacactgcagccccctatactggtcaagaatctgttgcagtcagagatggtaagacactgctcatatctcatgttggtaaagccacccttccctctaaatcttctcatcccttacatttaaactcggttctccatgttcccttacattttctttgaggtcgtttagcattattaccacgacccttagcatagttcttatactgcaatacatagtgccagtcactatggattaaagttcatgtatagaactattgttaatggccctctatccattgtaatactaggttctcaactcaattaattcaagtcaaacaacgttgtttgttgtatcaacaatattctcagacagaatgtttattacaacttgtttatattattatatatattcttttccaatcgcaaaattatatgtcatagagtgatatgcctaaagtcaaaagtccatttttaaatacatgtgtagataatattgtcataatgagtatgtatttgaatattgttaacgtgtgagacacactcattattggtttagttttcataaatcatgtactctatttcaataaaccttatccatatattgtaaattgtatgattttgtttacgtttaaatccagaaccatgtagtttttcgaggaggggaaacttaataatagatgaattagtttaagggtaatcatatatgaaccttatagtttacttttgttgaagtagtaaaagaaaggaaactcagggctgtgaattggtactacttgctcttctacaagttttgttgaataatatagaaactcatgaaagctataacattagtttttgtttgtttaaatgtaagtgtcaatacaatagatgtcaactcttcttatatttcttttttctggtaaggctaacaaccaccagcatgctttcgattactaaaagaactatcaacttgagctaaaactacaagtaatggataatcaaaaatgaataagtcaacagccatactcttagctataaaaacaaggcacattagtctcttaccatctcacccttcaattaacaaaacataacacttctttactatagccaatggcaagtcttaagctatccttgcttgtctttcatcaacttctgcttgttctttctgtctttgaaagggctaccgcacaaggcttgaaactcggcttctaccagcgctcttgtccatcagcagaaactgtcattaaaaggacaacatctcagtacatctctcgagttccaactcttgctgcacctctcttgaggctgcattttcatgattgttttgtcagggtatcttctttgtaactaaaatctacttggtcttatttttcttaacttttttaaatttctttactactttgtatgtttgtcatagcattggacaatatttttatttaatattattatcacaacttagtcaatggatgaataaaaatctaatgagttgtatatatgcagggatgtgatggttctgttctattgaactcaacaagtaaaaaccaagcagagaaagcagccattcccaatctcagcctaacaggatttgatgtcattgatgttgcgaaatccgcagtagaaaagatatgccctggtgttgtttcatgtgctgatatcttgagtttggttgctagagatgctgtatccatggtaattaaccaacaataaacttcaatttcaccaattaaaagcatattgtattaaaaaataggaaagatgaaattaagtaggcatgcactaagtgacaaaggttacaaatttgaacttttatctctgtttttagatttatggaccctcttgggatgttccaaccggcagaagagatggaaaagtatcaacatctttggaggctttaaccaatttacctcctccctttgctaacataacaatactcaaatccatgtttgctacaaagggtttagatgttaaagacctggttgttttgtcaggtaacttttttgtttaaacatttctatattttgtattattaccttttttttccaactttaagcatctccttttggatttcaggaggacacaccattggaagatctgcatgtgctgccttcaacaaccgattgtataatttcactggcaaaggagatgcagacccctcattggatccaaactatgctgcaaccttgagacaaaaatgcggtcctactgattttaccacacgagtagaaatggaccccggtagcttcaaatcattcgataacgattactacaccattgtagctaaaagaagaggcttattccaatctgatgcagctctccttgatgatcctaacacgaagagctacgttaaagagcaagcaacctcacaaaaaccctcatttgctaaggattttgctgtgtctatggtgaagatgggaaagattggagttcttactggcaattctggggaaatcaggaagcattgtgcttttgttaatcattgatcaatgtgccaatgatttctgatagctttttttttcttcttgctcttgaaataaacaagtttgtatattgtataatatttgatgctgtaaagtaaaattgcagccacaatgggttgcaggtggtaatatttattgccttgttcgacaataatctgcttttaccatattgtgatttagttttatgagattgaatcaaaattcgacggtcactctttaagttagtacggaagaaggccggaataaaaaagttctctatcgtaggacaatgttactaaaacttattttaaaaacatgtcacattataactactggaaacaacaacatcttgttcgaatcaacttctgtaattttgtttttcatttactaatcaagttataacttaaaatataatattttaatgtgtttattataaataaagtaataattttgttataatatttattaaactttttattatgacttatgttatctttgttgtatttgttagtgatcaatagttaatgaacttagtatttgtatgtaaaatctagttaaaacatatgcatgaacttttctagttaattgaagttttttatgagcacactcaatctaactagtgttatatagctaagtcttttccctaactttataaattaatacatattgtctca

SEQ ID NO: 24695 - DNA, 1891 bp, Cannabis sativa
ccagctaccaatcatagtctaagattttctttttaaagaattctcaatccacccaccactatcctcttcttttgcttagccacctaccgctgtcctcagtccaacatttatgactataatagagtgccgaaaagttaaggtttagtgttatattttagtacatttaaaaaaaaaatatattattctaataacgtttttaaagagtgctaaattatacgtgttaaaatttgtgttaaatttactacaaaatataacattgtggtaaatttattttactataatattgccttcagcccaacatttataactagagcatctataatagactaacaaaaagatgatctaatattatattttagcacattttttaaaaaattattattttaatagtattctaaagagtgttttaaatttggcaaatattaaaatttgtgttaaatttattataacatataaccaggccagttctaaagtatatggggcttaaagcaaaattaaatttcggaacctttatatatagtttaattattatcaaaatgatagttctaatattttagtgtaatggtaaaactttaaaaaactcttagaactctaaggttcaatcctccatagctacacaataaatatattttttaaaaaaaataaaaaagtagagattaggggttgatcccttgacctccataaagtaaaacattttaccactacactaaataatatttgttatattttcttcttatttaatattttatctatatattaataattttttttcacaatttcggggcctgagcggttgggggctcgaggcgcacacctaactcgcctaccctcagggctggccctgaaaataacattatactaaatttattctacagtaacattatcttgagcccaacatttatgactagagcatctataatataatgacaaaaagatggtgtaatattatattttagtacactttaaaaaaatattattctattggtgttttaaataatgtgctaaatttggcccatactaaaatttatgttaaatttactacaagatataacattattctaaatttattcactaaatattattttcttatttactataatatcaataattattatgatgtattaatttttactaaagttatattctttatttattatattatcattatttgaataataaatagaatacaaaataataatttttatatatcttcaataaaacattaaataattattaatataattaattaattttttatttaacatcttgtatatataattataaataataaatcaaatattgcaaaaatttatgttttgggttaaatttaacacaaattttagacgtttaaatagggtcttagagcatctataatggtagcaacctttaaggatgttcaaaatttacacatcattaaaaatataatattttattttatctctcttttacattatttttggcacccttacttcttaaaatactccaatatataacattttttaaaaatgatataattatgatctcacacattattatttaatatatatcttaattttttagctgtaataattttttagccttaattttttattaaaataaaatgaatagcatcaatgctataacataatatccatgcaaattcttataatgatatcattttctctctaagagcatcgccaatagtagtattttttaatgatgttatatatctctacatcatctaaaaaatataattttttttattttatttttctttcacattattttgcgcacatttacttcaaaaaacacttcaatagtgcaatacattttaaaaatactataatttccatctcacacattattatatatataatttttttctatattaaactattataaacatattgta

SEQ ID NO: 24696 - DNA, 3636 bp, Cannabis sativa
  modified_base (669)..(670): a, c, t, g, unknown or other
tatgatttttgtatttattatttacttcagtaatggataatgttatatatccaataccagaacaaattgtattagattatattatatatataatttttaacaatacattaatacgttcgatattgtacaatactaactctcatctctcatcatttcctttgttcttttctcttttataatattttagtaagtggtggatcatttaaaaaaacaaaatgtaaaatattgtcaaatcaagtgggagttctttaaagaaaatatctttctaaatttgactctgttctaaattaacagaggttaaaaaaatgaggacaagaaaaatgaattaagaacttgaaggaaagtttaattaactgagtgaaaacatgtaattaaatgttctagtctttcatattcaattcaataaactatataatcaaatataacagtaatttctctaagtttatttagcataatgtatatatctatttatatatggtaatacgaccaataaaacatttgcgcaattcgatctaaagggaacgcagatccatatttgattgtccatgaaagcatgtggctataaatgatgagtttagcctttctaaacttcttcgatacttgtggagttaatccactctttctccttgataaataaacccttatacataatgtatatatatatatatnnatatatatataaatatcatgtataagtatacctgtatgtgttttattattattacttttctattttaggtaaggtgtgcctaatttagggattgtattcagtatcactgttaattgattgacaaattttgattagctaaaactaaaagctagtgcagtaaaattaattaatgagcagagtaatatttataattgtcaaaagtacatatattatctttgaatattatctttttattttttttttcaatttacataaaatttgataacttttcatacaaaaattactctaatagttgatacacatgtcacaatttatatgtcacaatttaaatgattaagttttattaaatactataaagtaatttttttgaaatgaaaaaagaaagggaaaaataaagtaatatcacatgggtgttattaaatatagacaatactattgataaaattacattgaaaataatgatcacattgcatatgtgacaaaaacaactctatgggcaactcttaaaaatatctaacaccttttagatgtgtcacctttcaattgattagtgacacttcttaaaaattattttattaaattatataaaattccatacttaattacaccagtagttatattaacacataaaaaagtactaaataccactaatatctttcaatatttctcttaattatattaaaaaataattgttttaacttttacctaattaaatatcaaattttatccctttcccaagaaataaagaatttaaaaaaaaaaaatcaaattttataatgggttctacacaaattctgtcaaaattaattttctacttttttcaggaaaaacttaatttttgattttgataaaaaagattatattatatgatactgatttaattttataatctcagtacactttattaaataattttcaatttttaggttagtttaaactaacaattatattaatggtagtaaaacattatgatttttttaaaaacttatattcataatcaaaataaattttacaaacatgtcgcacaacgactataaaatgaaacccaagtcattccgaaattgaactctccaggtcacaccattttgacaagtacaatcatctctgagctgtagactcactggtgctcagccttagccttccgtttacctacacatattcaaacaatatatgtgaaacaacaaactcagtaagaaaagcgtataacatataatatattattggcttgtatttaggcacccatacacatatccacaaggctaaatagatgatcaagaatgttcttaacataagtacaacctgtgtaccacatgaataagtactcgtcccgtactagtgttggtagggctgaaccgtaccccgagtactgctaagtgttgtaccacatgcactacatacttaattgtactagtattggttacatcgtatcgtaccctttgaacatcatataatgtaccaatacactcagtaccgctaccgcactagtgttggtagtatatgaatcacatgtacaacatgcaatttacataagtacacatatacatatacatgttctatgctagttttacctcgcttctaaattcaagtgtgtcgatcgacctgaatggaacatcacaccctgaatagatgccctatgtcaccataacataaatgggtaaacaacttattaagaccttctcggggactgttacacccgaaaattggttgtacttcagaaagtgacacgtgtcaatctcagagaatataattcaacaaatataatggtaattatatcattaaatacaaaatggaataacccattaaatgcagaattaatatagtatatttataactccctcactgtacagtcttaagtgagatcagaatgtacaaactattcattcacgtattgacgagaaaccattttgcatcagaaggcataatcccgaggaagacatagacgacgcatagtgaggcatctaccttattgtatgggaagaggtattgacgaggtgaattgattattagagcacttagcgtataatatacattataataactaagtgaaataacctgaaggacgtgattgtctagtctgctaggccttatggtcaaaaaacagttcttaagtttgctcagtacactggtgctcatgtcattgttggatacaagtaaactaagtcactcacttatgtactaggtgagatgcctcagcgaggtatatttggcagcatgtactatgcagagttaactgtaaaaccacgtaaaaacctagtgtaatttttgtttctatcatctttcttagagctcttataatttctgtgccaaatctattatgaaaataggctcataatcgttaatgaaaatctgcgttaacagtttggtgctttcattgagagcctacatgataaaagcttagaaaaatccctcctaatcaaaaaaggaatttctcttccatggctgataatgatgaaaacgaaaacactcgtcctgaagagactaaccgtcgtcttggaaaagagccaatgaactcacgaaggccacccaattcacgaacaacacattcaacacggtcaacgtgttcaagaagaagccaacatgataatgatcaaaactcagaaactgggaatgagaattccaacacaaatgctggtgggtctacgcctatgagtgagggagcctatgaccccactagatacgtactgttggtcgagttggaaaatcgtcaactccaggaacgtctggctgaggcaaacaaacgaaatgttgagttggaaagggaggcaaccgtagccagggcgacacaagaaaataacacacaaaactaacctgatcctggagtgagaaggccgcgaggtagacctcagggctcgagaaccaagaggcaggaaacggctcaggaaaacccacaaagcactcaggaggagaaacttggggaaactggggatgttcctgaagatgaacaaccaaatgaccaggcacctcgt

SEQ ID NO: 24697 - DNA, 1492 bp, Cannabis sativa
agagtgtatattattgtaaatttcaaaaagaaaaaaaaaagtatatgtgaaaaattctaatttcttaactttgtttggagagataagttgaggtatacctttttttttgtatcaattaataaaaaataccttcatattatactttattaaaatctatctacttttctgagtgtgttgcctaatatatccttgtcctccacttaagtatagtacattaatctaaaaggtataatgaagacatcatctataaaaattagtatatcttaaaacaaacaaagtaaatggatatacaatccaatttccacttatttcaatgatttgaaaccgatggaataagcccaagctgaatatgagaagcccaagcccaagcccaagcccaattcatttatttattaattttttttgaaagaaccaatgttgaagtcagcacaacttcacccaccatctgtctacgttaatcaatttctctatttcttttcttctgtctttttttgatcgcgctccctctttcttctatcacttgctaacctctttcatcggagaggaggaattcataggctgtgttgggttgtccaactcggcttctttaccacctgcgcacgcttcgctcattgctctgataaacaattacaattacttcactcacaggtacgccatttcatctatttttacagactttattttttcccctttacataatttttttgttaatttctctctgtctttatattctctgataagtgttgaagtaattgaatcaacctgtgttttgttctgaaaaattgtttagaagaagaagataagttaatggttttgaaatatgataatacactgatttgattctgttatgctgtaatccaaattgagttctctacttgaaacatttgttttattatgcagccctaaatgtagagaaaagattgaaactttatcaggttgtttgatttttctcaagtgattctctctgttctacattggcattctaggtatctttttagagggatatgatttagctattatacaattcttttttccttcctttttaatggtgtcagggatatgatttagttctaaaattttgatactgtgtatatatgtacaccttatcgcattcttttaaacgttaatagtgtaaatatgttgtaataatcatacgagattttgttctagtctagatggttccgagattttgttctcaatcttttttcatttgaaacaaaagaaactttcatatttttgtgattttgtttcaatgggattacacctacagaaaagaaatgtctgcttctttcatgcgaatcacatttgttccttgtttgctttcttaatcactctagacatgacatggcttatagtttgtaaatggatactattgtggggtttgttttttgtttccttttagtaacatgtttaagtttaggataattccatatatggggttctaagaaataccagtattggttttgactaagtgtttggtgacattgagaaa

SEQ ID NO: 24698 - DNA, 4696 bp, Cannabis sativa
  modified_base (34)..(40): a, c, t, g, unknown or other
ttttattagtatatttaaactaattttttttaannnnnnntaaaaatttaatgacctagattaatcaaggattgtcacgtggtaatttactcaacacctaagagtcaagtatttacataaattctagaattataatttaagtattattacctttaaaaattaaacttaagtatttatttgtaatggaaaattaaatttaaatatttatattataaattattttttaattaaatacattaaattatataataattatcttctatttttaaaatttaatggtcaacaaatatcactatcatataactactaaagaaattttctaaatctatacatgttttggataattggatttgtgaagacaaagtactgtattttttgctatataaaggtaaggtactgtcaaattgaagaaacttttcttttaattattggagtgaaaaagaaaaaaaaaaatagtacaatttttctaggtttacacagtaatcatgactcatgaggcggttagacttttattactttaaaaaaaatatattaaaatatcatagcaaatttataataaatgttatatcagaaatgaataggtactatataattttggggtttttataaaaatattaaatgttaggtaaaagtttgtaattttactcaaacggaattttttacaaaaaatattatttttttataaaacaactgtaaaattataaaatagaacaattaaaacaacagtagaacaactaaaaaatgaccgtgaaacaacaatgaagacttattacagtacatagtataaaatttacatagtatttttgaaaaaaattccgccccacaataaaaaaataaaaaatttaaaattatttcagtatgtgatgtaaaatcccctataatatttgtgtagggtaaataaaattctctgtagtattagagcatatctctaatagtagtattctttaagattgttaaaaacttttacatcacttaaaaatatgttattttattttatttctcttttacattatttttgatattttttattttaaaacgatccaatagtaagtatctttaaaaattattaaaataataatatattattatttgatatatattaaataaataaaacttttaccttataataaaataataataaaacataaaaaagaaaaaatataaataatgttatagtatgatattttttgtagcatttttttccatttcaataataaacattaattaaaaaatactaaaaatatatttatatcatcaaacattatttgtagctgtagatgcccttaaacctcaaaaattgaatagtcacatgtaacattgtctttaaatgtggtccatgatccatggtagaaggactactaataattaaagttagtgaagaatttattttcttttttatgtgctaaaataagattttttttttctttttttcaaaaggaaattaaatgaataaagctactattcacaaatcttatcgcgagtctcaagtagtaggctatataaatagatgatcatggcgttaaaagaagtactcatatcctcaaataaaaatatataccatatttattacctaaccacacacacttctcttctctctttctttactcacaaaaaggcctctcactcactcaaattgatgaatataatgtggccttttcttctcaaaaatggaacaccattgctggtatgtatgaatttatgtgtatataagtatttgttaatatagaagatatacttaggggtacatcacttttactttgatcgtgttcattttttattttctggaaaaattatcttatttttaagtaaggttaaataccattttagatcttatgttttgtaaaaattattaattagaccctctgttttgttaacgacaaaatagattttgtattttccaaaatagtacaaatagaaccctgaactgattttttatcaaaataaaatttattaataatctgatctaaaagtattataataaaactgtttacatttgttatatatgttcgtgttaggaattatcttcaatttaattatattaaaaaaaaattgtcaaaaataatcttatttttactattttaaaaaatataatgtctactttgtcatttaaaaaaacagagttcaaaataatatttattacttcataaataatttattcaaactgttagttgcatgtttatctattattctatcaagtgattattttaaattttattgttaataccataaagtattataaaatttctaaagaaaaaaggagatcactgactcgaataactactctatccacacaccgttatataaattgcattttattaatttgtcaagtattaaaaacaaaaaatgctcctagtgatctcgtcccatacatttataattggtaatataatttacgggacgtgattgtactttcacggaatgtattccgtgatgtacgacagtcgttatctaagataagagagttatttgatttaagggctgagattgatctaggagtaattagagttaaaaaatagtaacgcaccttgacactcatctaatgtaccttgagacctatctaatgtaccacgaaatatatttcgtgaaattacatcacgggacaaaatcgtgtccctataatctacatatgttatgtaatatattatgtacggtatatacgactatatataggttgttttttttttcgattttattcattattattacttgtacaagattaatcttgatcttctctttccttttgttttttgacaggagtatttagaggcaaactccaatatgaattcgcagagcacgtgaagtatattcatggaatactcatttgagcaagataatacaactcactagtatttttgaaggtcaagaagtttttatggcttcacaacctcgtcttcggaccttcatattcaactatcctatagatgtttttttctattaattaggcaaattaatatattcttaaaattagctaggaagttgatatttatgtagacgtatatttagaagattaagttttttaaaagaaaataaaatagctctaccagtgtagtgtccagcccggccaaaaatcatactacagatcattatttacgttaatattatgttatcttagatagatttttattcaaccatttgagactagttgttggaggtactaaattcaaatatgtatacattgtaatatataaacgtttaattaaaacaaaaaaattattcaataataaaattttatatatatataaatcacacaaaatataatattttatattaaaattatatcatgaaattacttagtaactatactaaggtagcatttagttggaaataatgaaatataatagaattgaaagaaaataattttcattgtattcttttgtttagttagatattaaagtattggaatatcatttaaatagaatgtctttttcattattttggtataataattattttattttgaaatagaaaaaaaaatcatttcattacatgatgcgaaaatatttaataattttttttatcaattttaaattatattctcatttttattataattttatattttcattcttctcacctaaacactacttaagtgtataaattattaatatatttttgaaataaaataaaaatatatattaattatttaggatgggaccatggcactttataataataagagagggggttgaaataaagtagagaaaacaaaagtggtgaaggtccaatccaaaagaaactatggtggttgagattttgagtatgagagagcaagtgtgtgtgtatatgcatgccaccacccactttaaattgatatgacgtactgatgtgatcatacatatgtattaaagtctttgacagctaaaacactcccaattctttacgtaactttttaaattcaaattcagtattcaaattctttaaatcttttttttttttttaagaaaaattctttaaatcattgaactattaataaaatattatttttaatatgaattttatagatattaacggtaaaattacttaaatttttattttttttaacatttaattgtaaaaattaaaattttgacagtaaaatttattaaattttttattttattttgttctttaagtcttttcacttaagtaccatagtacactgactagtgactacatatatatttgttcacgcgtacacctaatattaattattaaaatattataaaaaataaataaaaattaaatattatgtttttttattttttttctttttctctttcttcatttctgtctttttctcaaagcttcttctcgagtatatgttggagcccagaatttgaccccggcgccgatctgctgcctccgaccaccaatgacccaggtggacctcttctctactcactttgttacacgtaggtcgctgcccaatcgagagccttccctcttcttcgtcttcggtggttcaaagagcttcactgtactccgatttccaaaatctctcacactcgtgccttctcctttctctcagattcaatacttttctccctctattttcctcgaaattaatggctggttgttggcgactttaaacggaacctccaccaaagatggggacgactacgtcgtcattacgaaagagaaggtgaagaggatgatggtgataaatctgatatttgccaatgatccatgtagatttatatttgtttctcatttattt

SEQ ID NO: 24699 - DNA, 3560 bp, Cannabis sativa
atctggtaaaatatattccaacactagattggccttatcaattactgtgctgctcgtaagctgggctaaggcattagcagttgtgttttcttctcttggaattgggctgagggtatagcccttgaattgtgcgagcatatcctgtatctttcttagataagctatctctcccccgggctttgtactctcttcaaacatgatttactgtgaatcactacagacctcaatgtattcagcatgcagctctcgagcaagttttaagccaccaatgagggcttcatactctccttcattattggaagctttcaatccaaatttaactgccctgtggagatgttgcaccaatgtgtgacaagggaaattcctacactagacagttgatctgtagccgacccatctacgagcaatttccaggtaggtctatcttcgttgttgttctacagggactcttgtactagctccgggttatcccttatgctactttcttctttgcccgtgcactcaactaaaaagtctgctaaggcctatcctttgactgttgtttgtggttgaaagattatttcgtaatggcccaactctaccgcccatttatgtaaccgtccagaagcgtcagcttttgcaatacttggagtaatgatcggtcggtgtatacccaaatagggtgggcttggaaataaggccttaacttctgtgttgcatagattaggaagtaagtaagcttttttatcaaaggataccatcccacatcttcaacgagtcttttgctaacatagtagactggatgttggacgttgttctcttctcttatcagcacggcacttacagcgtattctgtaacaaccgtgtataatcctaattcttccccttttaggggtttagaaagtacgggaggctttgcaagttttctttttaattcttgaaaggctttcttgcattcctccatccattcaaagtttttgttacctcgaaggatgttgaagaaaggaacacacttgtttgttgactaggaaacaaatctactgagtgcggctattcaaccagttaatctttggacttccttagtttttgttggcgacttcataattaggagggcttgtattttctttggattgttttcgataccccgagcattaatcataaaaccaagaaaggagcactataagggattgagtttcatgttgtattttctgagaattttgaagcattcatagatcactaactacttaaatgatatcaaaggataccatgagcaatggaaattcctaaagtattgtacatttgatcaaagtataattgtttaagttgtgaatgaaaatgcaaacaaaaagatatattaagttcaaatataaaagtacgaagcattcaataaagataaaataaaagcaagtcggtcatccatccttgcaaatttgtctttaataaaagtgcaacaagggtcaaaccattgtcttggccttgaggccattttcctagataaaattaaaaaagatgaaaaccaagtttacatagtaggagacttggacagttctttttcttctgcttcctcgacatcttctttgtaatttttagtcttgtcacagaaggcaaggatctcctcctcagactctcccaagaaacttgtgtccatacctggattttccatcaaggcttggtagatggtatgcaggccaatgacgttgcatcattcaattgttttggcttccttcccatcgagcattaccttggctgcatcaagttcctcttggagtttctcgcatgcatcagccttgtcctttgcctcctacttagtagcttcaagcttggcctcgaggttcctcttcaccttctcggcttctttggtaagacgagtgttatctagcatggcatcattccattgcttggtcacaacctcgcgctggcctatcaggttctcaatctcgccctccagatactttatctttcccatgccttgttgttgggcgacaaaggaaacaaaagatttctaccaacaaacgaaaatgcatgagtattttgaaggatgaaaaaaaaagtgaacagataaggataaaggaatttaccgagaggctatgagataagctccttataagcatctcccctagattcccattattgattaaatcccattcatgggggaggaaagccttgaaatgacgccagctattgcaccaaactctgcagtgtattctgggccagctttcccaacctcgacaggcaatgtttcgagggcttggcttgaggaggcagaagcttgaatcgctttaggaaaaggctcgccagtacttgcaggggcaagaggagggattggatcctgagtctcaatttcagggacctcaagattagtggtctgggaggctcgcttcttattagcagtagtcttctttggcctttttgggggctccacatcgaagtctgatggagcctccgagatggtaaacctcttctttccctttctgtggacgagaccctcgaaattcatttctgtgagacaagatgaagtgttagaatttattgcaaaacaagtaaaaggggagattggggcatcatttcctgcataaggaatttaccataatcactagaaggcgaggtagaaggactataattggttctaaatcccagctcgcgtctaaatgacttagcctatttgtcatggtcttgtactgctcggctatctcttagtacgactcagtacaactaatttggacgtggaacctgtgatacaaactatcaaacctatgtgtgatgcgatctacgaggaggggattccaagtataaaagttatagcggctatctcgaaatgaaacaagagtgttacacttggccctaagcactgtgggtgacggtgaccaacaacattgattacctcaagaagatccttctttggcttcctgaggggtagtattctagaggtattgtgcccgagcgacgcgatccttaatttcttcctctgctgggataggaacctgctgcccagaagaatacttgggatacttataatcacaagtaaacttcttgtcaactaagagacccacaggacctacgtcgctcggccatctcaggagtagaggcatgtcttctccagacaactgtcaaaaacaaagaaaaattataataagctaaactagaataaaagacatggactaatttaaccaagtcttgtgcaaataatcaattacgtattatgcagaaagtggttgtgccaattggggagagaccagccgtccaaaaaaattcatctttaaagggtgttttatttggcaaatccacaatgatcttatgctcacctatgtgagtcccaagatagtaagaacctcatgctacattcttcctcactataacagccttgtcagagtagagatactctatttctaagggagtgaggcactcccatttcaagatttcgtacagaaccttcaaacttgcgaggatactgtatgagatgggatttggttgaaatggggcatgtccgagatggtttaggaagtccttgaaatagtcttgcagggggattattgctccagccctaatgtgtttggtatcccaatttttgcactctgacatgg

SEQ ID NO: 24700 - DNA, 2626 bp, Cannabis sativa
attttctattttgttaaatgacaaaatagactctatttttaacaattttattttttaatataaccaactcaactcagagtttatcctatgttttatttttgttaagctggtatagtgtacatcttttggactgatagtctccttgcacaataaaaagaacgacttaatccgcaactcaactcagattttatttgataaattgtttcacactattaataaatgagtcccaaacccaacaacaacttttaattgtgaggcatgtactataaatacatattcattagaattggacctcaccttattatatatagtgtaaaatatcaaataggaaaacataggaaggtagctaggtatagtatagaaattgtttaaatcattatatcatcaaagtggaataaaatgagaaaggtgatgtggagatggacggcgtcgtttttggtgatttgtgttttgaataaattattattgatcagcgaaggtagtagcagtgatcatgtttcatcatcatcatcatcagtttcagcagtgattatgtttggagattcaatagtggatactggtaataacaacaacaacatcttatctccagcaaggtctaattttcctccctatggtcgtgacttcattggatcaaaacccactggaagatactccaatggcaaggttccttcagatctatttggtacgtattttattttttagttttggtagatgtaacaaaattagtgtaattaatatgttttgatattgttttctctttttgggttcatatttttaagtgggatatatatatctatctcctattttagaattatatatagttaagtaattaagtgggagtttaataattaatgtgcatgggataatataatattataatattctacttgttttgatgttcattttcaattacaattaattaaacttgtatatgttttaacaaaacttattaaatcatgtatgtctgtttagaaagtctagatatggttgattggatattttatgtatatataaattgataatgatttgtttgacataataataattaagtaattatacataaaaataatattttttattacttaattttataatagaaagtttttaataattataaaattagagtgtaaataatagaactccttaattatctttaattacaaaattattgtataatattatacaattaaacaagcatactaaattataaaattacctctaattatatctaaaacattcaattttattttaccttgatttttcaaacataatgttaaattttagtgagaaaagaaaagataagaaaaatatatataggaaaataaagttgaaaaaaaaaatcatattcggtatagaaataaaaaatatatatataaaaaaattcaattcaataaaattttccattttgaacttaaaaatattgattttttttttctcaccaaaattaaacttcaaaaaataaaagaaaataaaaataaaaaaaccttatttggaaggtgaaggggtcataaatgaaaaaacgtgtggtaggtataactaaaataatggaggaatggggatatttttttttttatttcgtaataaaagtgaaggaatgggaaaattaatgctggatattattgaattgttctataaaattattttataacatcaatttcataataaagaaaagaaaaacaatattaatatatcactgttactatttattactgcgtggtccccttttcatgagttttccttttcaatttttaaattatctattaatgaaaaaaaaaacaaaaaaaacaaacaacaaaaccttttattttccttttttgagagcaatattttagcatttgtacagtaaaagattttttttaataagatgcaaaatgattactgtcaatatgacacatgttaaaaattgtagaataactagtataaaatataacattcctcaaatttgacccacattaaatatcttttttcacttttttttatcaacaattaaatattgtttgtatttttttattaattaaaacattttaactttataaatccagtttggactattttttaacttttagaattaaaaaaaaaaaaaaattgagcgtgtttaggtaaaaaaataaaaaaaaaaatatttaaaagtctttttgaaatataaattatttttaaaattaaaataattacataatttataatttactcataatttttttttaaatcttatcttatgcttttagttgtaagtagtaaaagtaaaaatttaactaaaggataccataatattattagtttaatatttttttggaagtgagtatgtactatggaccacataaagaatacctttggcctgtgggtaaggtttaattaactcacttaaaatattttattttttgaatttattttatgataatatttttcgtaatgctattaattttcaaatttaaaaaaaaaaaaatcatcaaataatttatattaatgattaagttatacattttttttttgttacatttgatacactgtattatgttactgttggaaaattctcattacaagagagaataggaggattacaatcaaaatactcaaaatacaaataaaagtatttcatcaagattacaagaaatctagaaaagaagaa

SEQ ID NO: 24701 - DNA, 4349 bp, Cannabis sativa
ctatagagagagtgagaaagagagaaagagaactatggggatcgataagggtgttgatctcgaggttgtatcaaaacttagagatactcttgacagagatttcaatcaagttctttgactctgtttactatttgtacaaagttctttctactttaacggagatcgtcatgatggattgctcaactagagtaggaggaagttcactctaaacttgtctttgaaacaagataaacttttttgtgttcttactgctttgattacttgatttgcattgttatttaatcgatctgctttttagttttgtttgctaattatttatgattggttctagttaagtcttgactgtatttagtgtcatcttgagcatataatttcctataaattggtatcagagctgacagttgaagaaaagaacttaagatcttgatcattccgctacaagattgatcaagaatttgattaagatcagaactcaacaatggcaaaattcgagttagagaagttcaatggtattggtgactttgcactgtggagagaaagtctcaaaggaattttggttcatcaaaaggtctaaaaggttctcagagacaagtctcttcttgcttataagaaacctaggaactaactgagatggaataaatggcttgctacacgattattatgaacctgtccaacaatatcataagagaacttttcaaagtttcatctactaagaaagtttggaccaagttggaagagttttatatgaaacctctaatgtctgataaaatcaatatgttagaaagattgcatggattttaatgaattcatatttatctcttgaagataatattgatagatttaatgaaatcattgtaggacttgccaacattgatcacaaagtggatgaagaaagtcaagccatgattatgctgagataacttcctattgcataccaagaagtcaaagctgcaatcaaatatggaaaggatgttatgttagataatcttttatctggatcttaatttactactcgtgtatgttggattataactaatctaacatcataaacatagaatttcctaaaaaaataaattaaacacataagggattataaaaaaccttacgttggtcgcagcagaatattatgactcctttcgttcagatctctaactcttgattcctgtttgtagcagagtataataaagatttgaacttggatcttttcctcctttcattgtattcatccacaaaggcttgagtatcaacttgaatagtgtgggttgatattcaaaacacatttagaacagatatttgaaagagaaatagcataatgaattttgaatttttgaagaatgaagagaaaagagttgtctgacattgaattaggttagattagatctctcttctcatcatttttttttttttatataagcatttatctagggttaggttagatgataggctgaaatagaagatttgggcttaaatcaactatagggtcaaattatacaatgggccttagagttagatttttaccactttatttcatttatatgaaatagtatgtatttttttttatttaccacttatctcacctaattatttaactaccaattttattttaataattataataattatcaaataaaatacaacttaaatatatttattaattagactcacaaagagtactaattaacaaataaacgactatttctcttttattctcaaagttacctaaacttggtaaaaattcttaaataagacatagtctattttcaaattctaattaacttattaaatcaattaattgaatctacaagatgatattatttccgacaatgtggggatcatggacctatgtaatcaagctcccaataagtagatcttaaaatttaccaagtaaatacttattaattatgcctcactccactatagattcagaattgcactcctgataatatagaacactctatttaccaaatataaatactatgaattatccattattttaatcacaacatttattgatcctctataaatggtttgcattgagtaaggataaaattaccattttacccttcaatgtatcttatccttaaaacaattagctacatataaatgatatctcagaaaactaatataattaccgaaatgagcgctctatcatttattttgttaagccaagctctaaggaaccctttgcttcacttctaaatagttatagaagttatagatgtccatatctatgattaacactcctactcaattatactaccgatttcccaagatatacgtattatgcctacaagtaagctatactgaataagtcaaagaacttgtgccatacatttaagctagagcttaaccatatcaggattgaaatcatatgatctatgatcaactaagtaaaatggacttagaaaagatataatggtaagtttgtgatatcttttccactgtcaattccggtctagtttgatatatagctgatacattcgatgctagtttactttactaatatcctggaaaagacattccgcttatccaagtgtaagcaaactccatcactgattatcacgttagtataaattcagtgcactgataaattgtgggactaaatattttgaagcatattaatcacaattattttctactgggatgacatcactataattgtgaatgactatatgttcgagatttaatataacttatatattaaacatataatcacatataaaacatgtgaaagcatatgacaaggtcaagatatgatttctgatccttattgaaagtatataagattacaatgaagttgagttttatttaagacatagaatcccaaaaaactctcacttgcactaacataaaactaaaagtgcatttcattatatacttgatgtcttgattaaatatagtatttgtcataaattatgtaataggatctgataggttgtattcagtatcaaccttctccactattacattttccttagtcacaaaattcatgattttgcgaattaccatctatatgtttcactcttcttagggtacaagatttttttactgtttgaaaattacattatgttatcacagtgtcacactaagcaattattctatgtctgaaattatgctaaagtctgtatcaaaatttttcgagtctgaataatttcctaatggcctttaaggcatccttattactcacacttactggtagagttagtgattttgaattggcttttatacttctccaaaaatattgctccacccccagagtaattaccatctcatatatagacttctagaattgacgcaggtctaaaaatatgagtcgatgtaaccatagggttttaatacaccacccttgtaactaacatatagtttcttcttgtattgtatatgatatgtttaattatctttcaatgttcatttttcgattaaactaatacttactcacaactcccactaactagcaaatgttttgtctactgcatacaagagcatacataagacctcttactattgatgcttagggaatttcttttcttagcctttatcatttctagagtagttgaaattgttgatttttagggttcaaatcagagtcatagcgcaagagaataaaccttaattcaataaaaaaaaaattattgaatctgatatgaaccataaaccccagatctcaacacaattatacataacataaacctaactataagtttagagatttatatctcttgttgcctattagggtttcctcactatctttttgtattacacaaccaaacatccaatccagaagaacttattgaagagttcacatcagggtcttccaagccagccttaacactctaggaatagagtgggctattagattcaatttcgatgaatataattttttaagcacaatgtgtactcaactcatgagacactgtgattgagataggaaagaacaaactaccacatatagatataggcgtctgagggagagagtgagccgtgggttagagagagagggagagttggaaaattctatcatatttttaaacctgaaactgatctctccaaagtcatgtatatttcacttgtttgttatcctgatatatatcatatacataatgatataaataaaccttttatttaatcctataaaataaaatatgatagttatttttaattcaaattccaatataattattatataactgattagtagaaattagttataatattttatttaatattacatttttaattttaaatatattatcaaataatatatttaatacaatcattaaaaagaaattattaatttaatttgatttattttaataatcaaataaaattctcatgggtcctgatagtgg

SEQ ID NO: 24702 - DNA, 3761 bp, Cannabis sativa
acatgatcaaaaatgtaaaattgagtcatatataataagaacataagctactccactcattaccaattgattttgagatggaacctcataattcttaacaaagcaacataatctttcattatagcttgcaatctagtaacgatagtcagctaaatctatatttagaaataataaatcaaacccaaaccacaaagtaattgacttaaacaaaatatagactccctttaataattttacctctctttcttgaatgaatctcctcccaaagatagcggtgcttgcttcctcccgtagtaagacttgtagaaatcttctcacgaagatagtggtgtttgcttcctcccgaagccagacttgtagaaattttctctcgaagaaagcggtggttgcttcctcccgtagcaagacttgtagaaatcttctcccgatgatagcaattcttgtctcctcctgaagcaagagaaatcttctcctgagcatagcggtgcttggttcctcccaaagcaagactcggatgaaccttctcctgaagcttgttctgtattttcttcactttggaatttacttcacataaaagtaattgttatactcgtaatttggctacactccaaaagttgacatgtgtccaatagaaggaatatgaatcaattctgaataatataataatattataccaataaatgcatattaaataactcgttattattaaataaaaatttgatagataatattcaaaactcattgactttatagtcaaaagtgagacaaggacaataattattgagctgaggttaacgagaaatatgcatgcctcgaaatatatagacaagaagggggatgttcatccactcgagtagaatgaatgtaacaatgtaactaccttgcattacacataacgagaagatcacctcgtattgttaatgccaataagagaatatgacgagatgaactacctcccaacacttagcattttttcttattaagacggacaaggaggataactcgtatcaagcgagacacaatcttccaagtcactaataaccgtctaaaggataagagtaaagagtggttgggtagttattagatattatcccacatgtgattaaaatgaaacgcgggaattgtccacgtttcatgaactgttatatttgaatcaatcccaaaaagggtaactgccaacctatattcctatatataggggcagatcccatgggaaaagggacgacaaaaatttaagagagaaaaaaaaatcaaattctgaaacagtattctgtaatcaacaaatatccttaataataaggactcgtggagtatgtagattttaactacaaaacaacgtaaaaatatttggagttattctatcatttattacttattaattattgtagagaatttatgaccaaaaggctatttattttttgttaacgaaaatctgcattaacagtttggtgctttcattgagagccttggtgataaaaaaactcagaaaaatccctccttacaaacaaaaatctgtccatattcgatggttgataacaatcaaaatgacggtaattgtcctgaaaaaacaacccgtcatcctagcaagcaacccatgacatctctaaggcccaagacctctaaaataccacgttcgaggaggaacgatggtgatggagatcaagttctagaaagaagaaacgatgataccattaactctcccaaatatgtgcctaggagtgaggatgcttatgatccaactagatacttaccatttgtggagttagaaaataggcaacttcgacaatgattggctgaatctaaccgacgaaacggtgagttggaaagagaggctacagtagccaggacggcgtaaggaatagttccacagaatcaactagaccctacaataaggatccacgaggaagacctcgaggctctagaaccagaaggcaggaagcgaagtaggagacccctaatacccaagaagagtgacctggtgggaacacaaaaaatgtccccatggataatcaaccaaatccaaataatacaagaaattaggaacatcaacatgatgctccacaaacttcccattgatttaataaccaagggaatgaactaaacaatattccagaagtatctcgaaaaaattaagaggcatggcagcctcgaccagtgaatcccttgaaataatgaggaaatcctagaaatcaaccaaggttaagtggcgtcctccgagacatccttaatgaccattttaagctgatagagataatgtatacacatacttgaagagaggacgtgtatccaatatctttcacagcagaaggctagcgcgagatgaaacaagttcaagctcgggacaatcgaggtctcgagggcatagtcggtcaagcatacatatgggaaaaggaagtagaactcgacattattatgttgaccaagaaagtacgagcaatacgcgaagctaccaatttgagagttatttagagacaagatttgtgagtaattatgaatgaagacaacttgatcttatcttgcacttgaatcgaagacagcttgattttcgcgagcgatcaaacaaaaatagacataatttgtgccatcaactcaatcaaaacacaaatcagcaacaagtagaccacatccaactacgaataattgaactgaaggataagtttagaaagtatcaggatggagaacatagaaaattacttggctacgactcagatgaagaggtcaagaaattttatcctgatatcttaaattctgagtttcctcaaggattcaaaaacccacatgttttgccatacgatggaaccacagacccagtcactctcttgaacaactttaacattattatgcgagccaagcaatgttacaaataatttgtgttgcatttaattcctgacctcattaacaggggctgcgagcagctggttcaacaaatttactcatcattccataacgtcctgggagcaattgtccagggacttcaaaaagtaatttcaagccacaagggatcgacgacctgaagcatcatccttaaccaatataaaacaacaaccaggagagtcacttaaggcttatttaagtctctttagcacagctacagcaaaggtcaggaacctgaatgactgtatacaactcacgacacttcaggcaggcataataactgacttatccacggctggaggcgaactatgggatgaactccaaggtcaccctgtgagaaacattaatgagttcaatgaaagagcacgagtatttgtgtgaaatgaggaagcaagaaatgagatgaagctgttgaaaactggctcgaaaagtaaacccagcacgagtacagcaacagcaagcacagtttctactaaagtagacaatccaagtggttcaaacacgaaaagaaatgataattcaaaagaatcatctaagaataaaaagaaatagaaaaagcacgacaagtatgtatcgatttatttagtatacaccaagttgaatgaaacttgtgagaacatattcctcacaaatgaaaacagggtcgcatttcgcaaacttgagcccatgaggcatgcgagacataagtgagattcttcaaaatactaccggttccacaaagacattagacatacaagtgaagaatgtcgacagttgaaagacaagatagaaagcctgatctcgcgagggtatttcagacagtatgtaagacaacataggaaacgagcctaaccagcctaaccagaaaaacaaccctaatagcgcaaataaccagagaatgcaacctc

SEQ ID NO: 24703 - DNA, 1278 bp, Cannabis sativa
cccagctgctatccgatgatccaggctgcaaacagcctcttgcacgcacggacgaggctgcgagcaacctcctgcttgcgcggatgcggctgcacgcaacctgtgtggatagccaagggtgctttgcacccaaaaattcaattttttgtgatttttttaccaaaattcaaatttttccatttcaaaatcctaaatatcaatttaaaatattatttttaatatttgaacctaaataacaaattttgaaattaataatatttaattatttaatagtttattattaatttttgatattttaaagtttaaatttagaaattaattattttatatttatctattgttagattttaaaaatttgtttatttcttaaattttatagattatttaataataaaattagatattttaatattagatatattttaaattaaaatatatatttttttatccttttaatttgaaatattttattatgaattatattatataataaattaaataacaataaatccaaaattaacttaaatattttcatagacatcataaccataaaaattttaaattcataaattggttattttatgatataaattgttatttaaaaaatcataagttaaaaaaaataatatttattataatattataaaattttacttataaaaaatttataaataataatatatatatttgaataagttatatatttttgtaaaaattttagaaaaaaaagttaaaatgaaatattttaacttataattttgaaacttatcatttatttattattctattcttaaaataatatgaatcaagaatccatttgttcaatttcacggcatctttgccaaaatctgatcctgaacctctactgaattaaaagaaaagtgtaaaatatgtttgataattatgcattacactattaaatagaatgtggcatttaaattatttgtaatgttttgattggatagggacatgtgggcatacaagaagtgagacaaatgatttggttcttaagccaacgactaacatatttgcatcataaatgttcattttgtatattttgctattaataagcacccaatttttaaaaataatggaaaaaaatttcacaatctcatttttacagaatgttgtttgtacccagtaacttaggggtgttcattagatcacattcaatgtttttaggtttattcatatccgatccaatcatatattggatgttagattttaccatccgaatcgatccaattaattttcatcatccaatcgatccaacatcca

SEQ ID NO: 24704 - DNA, 2417 bp, Cannabis sativa
  modified_base (550)..(555): a, c, t, g, unknown or other
atattgattaacatataaaagtaaccgattcaattcaatctacatatatctatataaaattttaaaaaattatatatataattactattttaatgtaaaatattagtaatttaaaaatttaatacatataatacaaatatatttcaaaacttaataaatcaaatatatatttcattcttatatataattttttttttatttacatacaatttaaacaaaattaaatacttttttctacatacaattttttttttttcatattttgaatttgttgttttttattttatttatattaatttattattggagatataaaacaacaatagtttgttttattttgttgttaattatgttaaataaaattacttttttaattaataataaataatttattatattgaaaagtaaccaatctaaaatcatcgatttaatctatacttttacgaatttgattgaattggatttgagttattgtgtggattggattagatctaaaataaaaaatctgtacacttacatagcgtttggttggaggtaatgaaatgcaatnnnnnngaaatgaaataatttttattttattcatttatttggttgtattttaaaatattggaatgtcattctaatggaatgctccttctaccatttggtggaatgactattctattttaaaatgaaaggaaagaccattccaacgtaacaagaaaaaaaaaattgaatgatttttttatcaattttaaattttatttctattttattcctgtccctattcctgtttctattgctgttcctattcctattcatattctaattcctaatccaatattttcacttctcttaaccgaaggctatcttagtgcagatcgaattgattatgaataaaataatacagattgaattggataaacacccctaataatactattaccttacaaaaaaataattatacaacggttgaaatgtcttatttttcactttaacatctcacaggctttagaaagcgatggccaatggcacatgaccagatgaccttctcaattttctataaactattattttctagggggcatttttcatcaatagtgttataattaattttttattcattttaaaaagtagaaacagcataatggaaacaatataacattaaaatgaaaataacttttataaagtagaaacaatataacctcgaaatagaaacaacataatctcaaaatgaaataatttatataaaaataaaaacaatataacaaaatgtaaaagtgaaaaaaaataaaaaatacagtatgcatggcaatagaaatttcttttatatatttttatatttgtttacataaaataaatatatttttttttactattacatatttttaattttgtctttataatttttattcacgcatacctatttatgtgcctaagaaatttatatttttttctcccataaaaataatatttttttatcaatggtcaattttttaaaaaaagtttttttttttttgaaagagtaatttgaatcacactttgacaatcgtcgatgcagaaaaacttccaatcaacaagctaattgtctagccaaagataaacaaagtcagaatatgagtcactacaaacaaagcaacttatataagactaagttatctcgaaaatttagacaaaacaactcgagctagaccacattcaagaggcaggcatctgaaaaaatcaatcaattagacgaaaactacttgcagaatacatagatataaaaagtggattagcacactatacaacgataatattttaatttttaaattaaggataaaactcaattaatattttaacaataaaaatcttatctttgaagcttttttgacttagcatgtcaccgttgtatcgaaactaatttcttatgcccaactattagagttaagttttccaaagcagaaatatactagtcaattaacatgcaccggtcataaaaattgagagattaatcaaacttaacaaatcaaaatctaactaaactattttgcccaaaaagtagcaaagtcaattagctaacaaataaatgataaaaaaattatataaaataacagaaaaattattctaaaattgttaaaatatgattaaaatcaagatttaaaacttatctgtaaaaattgataatagtattttttgaggttgtatccatgagcaaacgagctaataatatactgcaaactagtaaaataatatggtacaaaagccaaacaaaatggcacaaacttaacagtgagactatagattgtctttagcatctttgaggtttgccatatctcatctttaagtctaggctaattagtaatttttccccctacactttgacatgtaccaaatcgtgcccactgaactattttggccgttaaaaattcccctcgaactattgagattgttgaatt

SEQ ID NO: 24705 - DNA, 3541 bp, Cannabis sativa
tatattacagtcctaaaggtctaagcaaataccttcttcagacattgacggccctgctcaagcccaacaccatcacccacccagaggaaaataaaagaaggtgtgtctgctattgcctgtgattacaacaaataaataacatataatcaatttttttttattattattatttaaaaaaaatgatgccaaaacaaaaagttaaattgcaagaatcaagtgctggtacattagctagaaatgaagcagaaacaatcatagccacaaaaggtgcaagctatcagaactagagttagcatgtttccaggcagaagtagcaaatttttgatacgattaccagatactgtactatgtttaaccatttagtagtatacaaacaggatggggtgggaaaacaagataagtgcatatatgacagtttactttaccaacacaataagtacagcttccataagatgtggttattcaacaaattacctcaatcttaagattcattatttcttcaaatgtccagtactccatatggtcagccacaccaggagcacggtgtacatattcctcccaaggagggtcaacaaggatgacatcgaacttggtcccaaaaaactctggtgacagctcaaactctttcaggtcgcactgaaagtacatgggaggagaagcagatttagccacaatttcatcctttttctgtatgagttccctcagcttggggtaatcctccacaacgttagtcagctctagctctctaatgaaattctggggtcgcataccagtgtcaacaaaattttgggagtaatcattttgctcacccctggaaggagctttaccgggaggtccattacctttggaaggagcccaaccaccaggacctttgtcagttggagttccacgacccattggtccagaagaattgaaattagggccagacatacttggaggacctcctcttccaggtcctgattgattaaaatacattgcaggattggctgcagctcccatatttgggggaaatctcggacctgatggcccaggaggaacagctaacatactcatatcaacacctcgagcaccaggccaaacaggtggactaaatgatggaataaagacaccaggggaaattggtggaactggagcaggtgacatgctaggattaagttgctgcatgggtcctggtggaggcattccaagatgtccaaatggtgatcccataattggcagtgggattgccacctgttgaccatctcttccagaaggtctgcctcttcctcctctcccaagtctacctccttttatcccttgtagagaagctctattgaatgatccctgctcctggtttccgtaaggaggttgtgaaccaccactagaactttgaccaccaacattgcgaccagacattgcacctttttggcctcggccctttcctccatggaaatcaaagtcatccctccataaattctgatcgcgcataccatcatctgaatatctctcctttccatcttccccaggtggcccagaagtaatctcagacctcctagatcgttcatcttgcaaatatccttcttcatcataaggggctgattttccatcagattgctgaccagcttcagttctcctagaaaagctggatcctgaatctgctcttccataatctaaaggcttggtttgaatctcaatcacatcataattttcatttgaaattccaaagtttgaggatgttttcacagcttctcccctacttccatcttttctattaccagatcgaccgtgaggcctttcattttgtctttcaatgtcacccctgtcacgaccatgtctaggaatttcccattctctgccatgctcataaccaacatccccacttttagagtctttatcattatcattgctttgtcttcttttccagttttctttggaagactctctgtccctactccgctccctccaagtgtcatccctactttttgatcgatcatccttgtaaacatccttttcaagttccttccgcttaaagcttctttcatactccatatcagaatactctgaatcatgatgacgcctcccatttctctctggagttctagacctgtgtgcattacctacctctcttgatcctttatcttttgtccatccatcatcatctgcattaaacgatctttctcggttttcaggggcatctcgactagaagttctctgctgcttatgcttctcaactttctcccttcccaatacatcttcacgagtaatgggactacccctactatcttcttctagtggttctgacctgcctttactcttacttctctctgtatcagcttttttgtcttctctggtattagatttattacctctttcattgattgaatctgtaactcggcttctactatcactgctttcatttctggtagatgcacttttgtctctagaactttcatacttgggatcagaagccttgccactttttgaatcagctctttcagaaatattttcttctgctttcttgacaacatctgtttcatcccatcttcttctggaggtccttgaatgttctgtcgatccatgacccttctctcgaccagtttccctcttgtctgaatacttagaatctctatccagcatcttctcaggctctatatcatttgacttttcctctttgcttttacttttactttgtgaattgtcataatctatactcttcgaattcactttctttttctcagtttcatcaactcgagttttccctttattccctgacttctctccaccatcttgcttgttctctaactctccatcctggtaccaactgctcaatttttccaagctgctttcttcttgttttttcttcacctgcttagtgcgcaattcttttcttgagtcataatcgtcttcttcactatcagctctgcttgagccacccgatttctttttcccgtcatttctgtccccataactttttcttctactattaacatcaaacccatcaatttcttctccattaccagactttcttgacctactggatctgtgtttcttcttatcagtgacatcccaatcatcatcatctccagccctatcactcttcacatctgaaccatcatccatgtctcgttttgtgtaattccgactgtgttcaggtgaatccatatgagcccgaggcttcaaacaacaataagtcactacctctttcttctattgaatttacctacgaaccacccatattgcttaaaaattaatttttgttcatataaatgtaacgaaattacattgcacccagatttcaaaatagggagatcccaccgtcaatcatgaaatattattaatccattattccgcaccaaaagagaaggaacgactcaaaggaaccaaatttcagaaagccgaaagactatatacatacagaaagagaaaattattatagaaaacaaataataaagcagcattgcacatgacaagctataacaaaataaatttatcagcttaataccctaaaaatatttcaaaactttgaatccaatcaacgcaccaaatgaatttacttgagttt

SEQ ID NO: 24706 - DNA, 4579 bp, Cannabis sativa
tccaatggtaaaaattagctactgatagtgatagtcatttttcggagagcggttggacctgctgtgggtaacccagaacttatttttgtaactcccttgtggtgaaagttgaggttgatagcttcagaatcgcgatttaagtgagagactgacttgatagatcattaaaatatcttcgaaacacaagttgaatcgcatcaatcatatcaatattgagtgagttatgaccgttttactgaagacagttcatgaaccaacgcctaggtgacatcccagctcctaggttgacatatggacactgggtaagtgtaaaaatgtccaaggattgtactttaagattcctaagtgatattttgagaatattttgagtgatatattgacatcacttagtatgtttctgtgttctcgtgaagtttgtcaccaattcatggagatgttgttttgcggaaactggtcaccagtcactaaatgtgtaaattttagtagtgtttattctcaacaaggatgatcacttttatgtatactattgtcaaagatggagtataacaacatattatttttttacgctggaaagtagccaacactagcttgccagattgatgagatgaataatgagtttaagtaaaaaaatttaaagagacacacacaatctattttagttagctccccatgttgcgatggtaatgaagctacatctattttgaatttatttctcacgagatagtaattagaaaaaaggctaagtgtttaagctctagtttctagagagaaactagagagatatgctctaaccgtgtgggtagttttctgcatgtgaaaaatgagctcagggagctctccttttatagttgaaagagacccacagaaataagagaaaaatataacttagatatttttacaatatattatgatccaacggtgaaaattagctactgatggtgatagtcatttttcagagtccagcgggccccgctgcaggtaacttggagcttacttttgtaacttcttttggggtgaaatttgaggttgatatctttaaaattgtgaatgaattaagagacatgacttgatagatcattgaaataactttgaaatgcaagttgaattgtgttaatcaaattaatattgagtgagttatggtcattttactaaagacatttcatgaaccagcgctcaggttgacatatggatgctgggtaagtgtagaaatgtccaagggatgtactttaagatgcctaaataatattttgagagatattttgacatcaattagtctatttctatgttgtggtgaagctagtcaccaattctcggagatgttgttgttctgcagaaataaaagactcgaaacctcttcatttttcgagtgagttttccatgttggaaatgagaaatgcgaagtttttaatttgacttatctaacttcatggatcttatttattgtaaaaactagacggacggtcaaaacagaatcaaaatcggataagcaaaacctagtgcactaggccatttgtcaacctcggcgctgggcactcattcctaagatcctgggatgtcattttgatacttttgagattcttgaacttgaggatgagatctcctacctcgtttttggccattccatatttattgttcgaatcagatttggcatttgcataattgaaaccagcgcaacaggttgattgtcaacctgggttctgggcccaacaccaggtcaaccttggcattgggccctgtttataggggcttagtttgtaattttatccccaagttcgcttgaatcttcattatttccgatgaaaaaaataaatgcctagaacactttttcaagaaaatgattggaaacagcccaggttaacagtatgtcaacttaggtgctaggcccagtgccaggtgtcaacttgggcactgagtcccttttatggcccttcaaaatttccatttggttcctaaaaataagtgaatcttaatctttgctgaaaaacgaagaagatgctcggaagagttctagaaaaacatcatcaaaatcaccctaggtctacaaaatatcaacctcggcgctgggtcagcccaaggtttcaacttgggtgttgggtcgtgcttctggcacccaagaagtgatgtttctttcccaaaagtacctatttccctattttttatgaagacaaagaagatgtgaaatttggattgtcgatctaatacttgaaaggcacccagattgacaaattgtcaccctaagcactgggtgcctgggcaccaagtgctccgggtgctcaaaaatgaacttgctctgaatattattcaaatgcctcaaatttgtctgtggtatgtctaattgatgttataatgcaaagtttgaccaattttcactaagacggtcctagttagggatgtcaacttgggtgctagctaaaaccctaggtgctcaacttgacttatggggtgcaggttcatgtaatttcagctcctggggccatgatttgattgcttcatgtattcatggtacagaatactaaaagatacaaagttggaaacgagttatcaaagtccaaacttctatcctagagttcccaaagtcaacctgagtgcagggctagggacctctcccaggtcgacttgctataatttgggactactcaactctgcgatgtcatcttttttgcaacctgacaaacattgatgttcatatcatcaaggttacttttggtgtaaaaatttgccccccaagtcaacttcgcacttgtgggaggttgacttagtgacgtgaactaagcccatttctcttgaaactaacaggtgggcattaattttgacaatcttagattattgtttcgattcttcaagcattcccactgagagtaggagtttaaattcccattccctgttgaatagtagaattcaaaattctaagtatagaaggagaagacaaaagatgaccatctttttcttatcatttatcttttctttttcaacttaaaatttatataactccttcagtgatttgttttgatttgagatactattaaatcatgccgacattggaatgtcaacatttactttgatttttggcttttgtcttagcattgactctctcgtcacactctatgtttatgtgattatagatgtaactcttgtcttccgtcaggttgtcgcttttaagtgctttagcattcccttggatatatttcagcgaaggtggtcttattcatctccttagtttgatagcagaggaggcctttattaactccttagctttatagcacatgttgccttcaacatcccttcgactttgcagaagaggaggccttcaacatcccctcagctttgtagcagaggaggccttcaacattccctcagctttgcagtgaaggaggccttcaacatccccttggctttgcagtacaggaggtcttcatcatctccttagctttacagtggaggaggtcttcttgaagactgtcagttttgtcactagctgatctttggtcaattgaggatatgacactgggtgctccaagtactaaaaaatgaacttgctctgaatttgattctgatacctaaaatatgttcgcggcatgtctattggatgtccaatgaaaagtttaacctttttgcactaagacggtcctaaaaactgaaatcctagttagagatgtcaacttgggcactggtgagaccctaggtgcccatgttgacttactaggtgcaagttcatgtaatttcagctcacaatgcctagatttgatcatttcatgtcttcatagtacatagtacggaaagatagtgagttggaaatgagttatcaaagtcctaacttccatctcgatgttctcgaagtcaacctgggcgcagggctagggaccccacccaggtcgacttgctaaattttaggactactcaattttgagatgttacctttcttgctacatgtcaaacattgatgtccacatcatcaagactacttttggtgtaaacattattagacactcctattactttttttgttaggagacacacctatagcttaattttaattaaatagaaaaatgacattggtaacatttttctttcattaggaaggataatttctcccaatattattattgatatgcaccattattattttctctcaatattaatttatgtactcttttagtataaattattttaaatataaaagtcatgtttagtattaaatatgaaaatattgtatgaattcttctagtattaaatataaaaatatttagttttaaagaaattatttaatagaaaaaaaattgacatgaaaaaaaaattaatatttaatttaatttagataaatttaattattttgaaaaaacatcttaagaaagatagtttcgtgtttctgataacaacacagtcgttgtgtaaaaattaagttaattatcagattaattttttggaataatttagtggtgagaatatattttggcttagaagagaaaagtttatgataaagtagtaagcttttttagggctatttacaaaaatatgggaaaataaagataagttttgatatatatggcataaaaatttaattacactaaatatggcattt

SEQ ID NO: 24707 - DNA, 4717 bp, Cannabis sativa
tttcattttggagatgaaatcgagttgggcaaaatcaaattaagaaatatgaattttagttattttgagtgcctttctagggtacgttattggctaagatgatattatggtttgttcgggaaagaactaatcagatggagactggctaaggtcgaagagagtcattaagggttaatcaagaagaaacaactgctgtatggccaaacaattgttaaattagatttgagagctgaagaaatgatacattacgatcttagtgttggtctaggcatcagatcaagaaaagctcgtggttcattgtgagttatccagacaggatctggagtgcattttaatgcaagatgttagggttattacttattcttcttcttatttggagaagcataagtaaccttaaccaatttataatttaaaacttgtagtagtaattttggcttttaggttttggcaagctatctctatggagaaaagtgtgaaatttttttttttatcagaaatggctgggatatgagacaaaggaaatggttagagttaactaaagattaagactgtgaaactctttgttaccacaagaaggccaatgtagtggctgaaaccctaggtaggaaatgacccgagttgattcctagtataaccatgatttctccttagttagcagttgtcatagtcaggttaagcctggagtttgtaataggtaaactcaatgagtgaacactttaactagatttattagacataaaatagaagtgcttaattggtggatgcgaagttaatgaaaacttgaaaagaagttttaacctggctaggtcagagaattgttagtgtcagatcataggatgttacattattaaactcgagttggtgtctctcagacagtgttgagaacataagagaaataggaaaacttacaccactctttaaatggttactaggttggtactattaggatgtaccaatacttaaaattttacttactgataaggtagagtgcaaaatgatgtggtagattatgtatttagaagcttaatttgacagtgaattggggtaaaccatcagaatcagggaggttactaaaagttctgtaattggagtactttgaaccataagcatgttttatttcgtgtgattgaatatgaattaaggtactatttcagtataatggttagttaggaaattatttaagggagatagaatgaccttatgtgactcaaaattttattatttcagatagaaaactattgcctgtacgttttgatagaatttacaaagggccataagtacaaaactaaagtctagtctggttttctacccttaggttgattgttagtccaaagaaatagttcagataataaaagatacgttgcaagtttacctgatgggcttcaagaattcatcaaacaagtatatgccttcgagtaagttttcatacaataaacaactatcaacgtatgataggaatggttccttataggatgttgaacagtatgaagtatcattttgaaacccagacaaaaaatatttagacccaaagtcagttcagcgaatttgtaagactttaaggaaagttatggccaaggtgctgcttttcaaagcagacagtaaaagacatgttaatatgaagctcataagtagaagaattcctaactaggggaaaacatgtcagtccatgtacgttatcagtgaaagaagtaaatactttggggataagggtaagatatgccctaggttcctaaaaaatttagagttttttaagaaaatcagattcataatttctcatttaaccttacgatcagcatggacagcacacatgatgcttccatgttgtttgtatcaagaagtttgacacatatttcaaaggttatggaaccctaaaacttaacctagacttatcatatatgatgaaatacttggaactctcgataagaaagataatgttccttgaaacagaattatagttatggtcaaggtgtttgaagaaacattaaggtggagaaaaccacctgagagttagaatccaacttgagggctttatgtccagagttgttaagatttgatttcgaggataaaatccttttaacaggaggataattgtaatgactgcatagttaaatcaagaaaattagcaaataattaaggatttaattattattttatgattatatgtctctcagtagaaattaggtcttattgctagaaatagtccttaggaaaatattttctcaattatggagatatattttaattctagatgcattatatatgttgtatatgaaattttataatttacatgttttgtgttcggtaacagtggaatgtaacgatttagccaatagaatcatttagatacgatgtagtatcttagaattagcggggccagataatcagacatttaaaatgtcaggttttatttggggttatggtgttggaccattttatccctaagtgggttacttcttagtgaagtaaagggcgaaatggtcttttgctcatacatgttttaattttggaattattaggatttctaataaatcctttagtattaggtgagttataatcttaattttaataatataaattaaggatgaagcttaagcacaaaaaaaaaaaacaaaacccacctcatcactctctctctctatgcttcggccaagcatgaaacaaaacaagaattcttagcaaggtttcagctaggttggtggagaggaagatcaaaggtaagcctagtaaacttacttccttcaatttcatagttgaaagtgtaggttttcatgcattttgtgcgattttcagttctgctcgttttaggattttagagaatattttgttggattgttgttaaattacatatgtggttagatgctagtttttatggttatggtagtgatttatttaggtttgggcttttgagttctaaattagctctttaatggtgattttgcttcgagggggttatcaatgcttttagttgttgaaataggtttgttttagccttatttgaagttttggacagttaggaagggttggatttgatttggttgagttttggaatttcgagaaaatcatcttgacgacctaccctttttccaggcagaacaacccagaagcctaccattttcacagaaacgacatgccattttttggggttcttttctcgaaatctcatttttagcgagtttcttgatatgtaaggtttagtcatgccatttatcgatagagaaacctttagtttcaagtttaaatccatgatagtgatttagcggatcacttaccagtttcatgtaaattgtgacttagggccataaatcgtcgagtagcagtttctactccgagttaccggcacgcttgcattcaaaattaagccaagattagtagaattatttgcatatatgtatacatgtttaatgtgcatgtcagtagccatcaaaatatcatatcagtatatcagtgatgtgtatgtagagttacaccgagatgcgaacagatatatgctagtcttccagatagtatgaactatttgctacaacatcagtacgactagagtactgagtataggctggattcgcagtttgtcatacttgtcgtggatgttcttgacctagttaccaaattgtgagtaggtgtatgggcgcctagttacgatctggatatatatttatgttaatgattatgcttttcttactgagtttgttgactcacagttattacgtgtatgtgtaggtatgatctaggatcaaactgggacgagtgtaaagttaatggtgaagattttacatatcaagacggttagacctggagcgtttagggtcttcaggacaatttaggctcacctttttaatagtcatataaatacaacttttgtaacggaagtattttgtagacttatgcgtattttaaagggatctcagatttataaaaattatgtttatttcaaaagttatattatttaagaaagttttatatattcacatttttcattaaactctttaattagcaaaggcgtgcacaacactaaagaaaatcataataacacgcttattctagtaggacgttacacccatactaggtcttaaactcaaaactgaaagttttcttattaataaatagcgtggcaataccttaaatatcgagaaaacacatagaaataagattttggggggaagtcctttgaaaaacggtaggccgtttttcttgaacactgtcaggaaaaatagtagactgtttttgagaaaacaatatgccatccaaaacatcgagttttaaacatcacaacccaaataaatcttatccaaatacaaccaaactttatagaatagcatattagcgtatacacaataacacaactcaaacaacacaaaacaccacccaacaaaatctgacattagagctcaagcttgagttctcatgaactcaataatccctcaaccaaaagctgcaaaaaaactcaactaacaaccctatataactcaaattaaagttgggaaacttaatttaacatcaaacaatttgaacagaaccaacactgcaaaactataaacttaacctagctttaacctagagaaatcaaagagactaagagagaagagcttacctttgattagcgctaacacttgaagaattctgctgagaatttttaagttctgatatgaatttggaagaagaaaattttggtttttcctttatttttctttgaaccgaagcgagagagagagagagagag

SEQ ID NO: 24708 - DNA, 1457 bp, Cannabis sativa
gggcacaaaacccaacatttatatgatatatagtttctgaataattttatgatatagtagatcaatttaatgatgggttgttattctgcttttgaatttcgataatggactgtttattttatgccatatattgtctgtgtgtatgcttattttttcttcttcttaaatgcatacacaatgtgtgtgagaaaatgccacaaagtgttaaaataaagagaaagtaagaatgacgtttatgttgtgttcaaaactgcaatttggtccacaaatttgagctgtattggctcgtgtcttgtacaagtagtggttggggatactgaaaatatattgcttaatgatattggttcgaaatccagctgcaataaaactgaaatatcctttgctttttgtgattttttgagaggatttaaagcaatgtttgatagtgattggatttgtaggagtattttggtgagtgtactagtggaacaaaacttgaatgggtgtactagctagtattttatattttctttgaaaaaataactcaagtgttcaaacttatgtgagatatgctactcttttcactgtgtacttttggtgtaagagtgttaatcgtatctcattgttctcagttctcagggtctcatacaatggtttgacaactcataatacaatttattttttattaaaaaagaaaatgagtttattgtcttctccttacctggttaccttctcaagatattgttttttttaaaattcaaatttaataaattaaataattatgctgctctttctcttctggagcttttactctgctcacttgttttctaattgaatcttcttgctatatataatgtatgctataattaaaaatagtgttggtcctaagatccttcatatcacttagtgaacgacttgattgagtttatctgtgtgtagttttctgctctgtttaattttcttaattgaataccttctggatgaatgattgtgtagagcttagtattacttgcaaatgactgtaatttgctagatctatttagctaatatacaatgtcggaattgattatatatactatgttttaatacgtgattattaacaggacaagcaaagcaaatgaataataatatttgaaaatgggagagagatttacaaatgttattatcacaaactcttttggtgacagaaaaagaggacaaggccatcttcatcattgtatcagaaacttgtattttgtgagtgctttaatgattatatcagaaacatgaatttttttggggcatattgtatttctcttcaattttttttaggcatattaattataatatatcatagaatgtttgattttcttagcacaagtgagaggtactttgtcgacatttactgacagatatatatcttttcttgaacttcagcaattgactttgacaatagagatataatatggttgttgtgcttagagatcatctttcaatct

SEQ ID NO: 24709 - DNA, 2219 bp, Cannabis sativa
ttctagtgcagcccaagtaagagcttcttcatcatctatatcatcttctcttctagactttgagaaaaactcatctttattattattattattattgcctctccacactgatgaacccttactacttctcaagctgtttccagctttatacagatctcccacctccattttccaatggagatcatgacctagattaatttcataatgtatgtggtatatatatatatatatgtgtgtgcatattaggcaaaacgacaagaaatttaaaaaacaaattaactaataacaaatatttactacgtacaacaaaaattaatgtagttggggcaacttaattaattaattatgataatatagccatattgacaacgggtgggaatgggaagttaggcgcgcttggcttgcaatttattagctagaatttatcgtgaaaaattaagctttctcttatatatttattatgagaattgctaaaagttacacctagtagtactctcacgtttaaaaattaataaacattattaagcaatgctaaattattaggaaaatcttttacacttattttagtataaaataaaagggtgtatatgtttacatttaatttttttatatatatatttatgaaatcccacacagaaattcctataagttataacaattaatggagtaatctaaatcgcaactaaaatttatataacaactcacataaaaattatcaaaaaaactaccggaataaactaaatcgtaaatttaaaaaaaaaaatatattaaaaattagtatataaagtaatttttctaaaataaaatttttaatttttttataaaataaactaaataattacaatatacactactaataaaaaaaaaaaaaacggcactacactacagatttttgtgacatcatatgtcatcacatggcaatcgagctatgtatatagatatatacatataatttcaatttccactgtaaataataaatatagccctagcaatgggggaccatagtgagtagttaaaaagtactggtctctattcatgtacagctactatactgccaaattatataagagagagagagatgagagataataatgatgactacaatgcttcaccatcactacacatgaattttgttttggctaaacaaaaaggggctcacacactttggttgcagatgaaaataataatgggacttttgcttattatcatattgatattcataatatttaaaaattaaattcaatattgaatcttgataatagaatccccatcgtgttggtaatgaatcacatagaattagattcaagaaatattttgaatttatccctcttcaattttattaccacttttaagtcatgtccttttcctactaatacaaatctccactgtctatatttacggaatgaattttgaatttatatgtatatatttagtacatatttaatttttttttttaataaaaacttattaaaattaagaaattaaacacactttatattaatactcataatgctattttttatttttttctattctaatttcacttattcatgacgatagtagttcgatagtggcccgatactacctatttttttttgtttttatatataaaaaaaatgatagcatcaagcggtcatcgaactaccatcgaattatattctgtatttatagatgttaagcttcattaattaaactcgttagaaatgcatcaggtcaccatcaaacttatactatcagatcatatcctacatttataggtagcatcagggtattatcagaccttcgtttttaacctttactcattttaacaataggaaggcatcaggccactattggaccttcatctttaacctttactcattttaacaacaggaagatatcacaccatcatcgggcttggcaaaaaaaaaccaattttctctccaaaactcaaatccgaccgttttctatcttaaatctaacatcaactcacagataacaaacattaattatacaatttattcatttgacaacattgttgatggagaagtcattgggtctgtgggtcactaggtctggtgtggtcattgggtctgtggccacgctggtcgcggagagaagagaccgagattgtgggtggtgggttgtggatcgagtccttgtggtgagttcagagagagagagaagagagaaagagatcaagagggtcaagtgtttgaaatgggagggatggaattgag

SEQ ID NO: 24710 - DNA, 1171 bp, Cannabis sativa
cctgttatcacccaacacacaattaatatcaaaacctacttcactgtggattaatatcaaaatgcaagtaatgagatcactcatcatatgctgcaaaacttgaacatagagaaagtgctataactagaaacaataattttgaatattccaggtaacttagcacaagaactcaacattgcttctaaaggtaaagtctatctaattacatgaattatttctcatgacaacaaatcataagtttggaccttgttttttgttatgacaattaatatctttataatattataaagtaactcatcttttaaagggcaatataatagtatacctttgaagaatgagcaagggactatcctttactttactacttccaatcactaaatctgcaagaaaaataaaataaagaacatacacatgagagagaatttgaaacgaaattgaaacaaaaaaaaaaaacaattaaagcacaatagaactctccatttcataataaacccttaatttgttaccatattagttcttggtaggaactcaatatcaagacaattataagtttagaaatctcagtccacctaatttttttcagcagcatgtatgtacttcatgtcctgcataaaaatctaaagagtaaaaatctgcacaagtttaataaattaatatccgagagcctaaataaaaatgaagagagaaagaggcagagacagagcaaaccactctttcaataaatataaatgagagcatagcaaaccattacacctgtatcaagtccctatttaagagcataagaaataccatgattcacatctaccatttcagtagtagttgctgaaacaatggttgtcaaaatggaatctaacttttttaaaagaatatttacattttcatattgtccaaaatgatctgagtagaaacaaaccttaacatcttggaacaaccttctcggaaggccatgatagttttagtgcttgtcgttaactgtcagttttagcattgattatgtctttgacaagcctagctcttgaggctctctattctacatcgaactggtctttcatgtagcaagtcatccacacaaatttgatgcttctggcatgtttttctaatgttgctctctttgttaaatgttagtttgtcattctgcattcacaaaaactccaaaaacagttagtaaaaa

SEQ ID NO: 24711 - DNA, 2169 bp, Cannabis sativa
agtagctatcggtgtcggaaaagtcgttgaagttacggccaacgccagaaaagttatcgaaattggcactatcatcggaaaaatcaccgaaacataccaagaaaccaatttttgaagaaactggtttcttgatgaagaaaaccggtttcttaatgtagaaaccagtttcttggtgatttttccagcgataatgccaattcctatgaattttctagcgccgtcaacaactctaacgactttttcgacactgatagttactttggcgacttttccggcactgacagaaaatttcggaaaagttatcagaattggcattgtcgctagaaaaatcaccaagaaattgattcttgatgaagaaactggttttttggtgatttttatcggtaatttttctagcgacaataccaattcagatgactttttggcgtcgacaacaacttcgacgacttttctgacatcaacagctattccgacaattttttcggtaccaacagcaaattctagcgacttttctagctcaataactccgataatcactgtaatttcatttgttttattcttttaaaaaaaatatataaaataaaaatttaatatttttcaaattaagtagcatatctcatattaaattttgtctagcatatcccatacaacaaattttaatatattttttttttatggtaattgagttttctcaccatatttatataaagtagctttatttttttttttcttcatatatttatgtaaacatcccttcatataaatcagaacggcccattttgatatcattcaactctattgcataacatcttccttgcctattctttccttccttttcaagaaatgttctgttttgttttctttagatttaacaaattttgtagaagatcaatcagccattgataagtttttgaaaaaaatgaagggccttcgtataaccaggcacaaagaactacaaagtttccaattttgattcacctgagcattaattttagtgagtgttgtgaaagatcattaagtcgtttgtatagtagtttacgacaagtcgtttcatgtggaaatagaagttgtcgtttccttcagaaaccaaaaaccctaaaatatcagcagcaggaagaaataatactcccttcgttgtcactctctgagctccggcaatggcggaggagaaagtccaagtctttgttaccacgctagggggcaagggatcgtctctgtcctcatcctccgtctatgccattgccaatggctttgcacaagtacgaatcgactcctcggcgcttagcaggcttgccgccttcgataaccgtaccccgaccatcaaggactacaaattcaaattctccaatcacttaaccgcggaagagtccagggcctttgtcgcggtactcctcaacaagcttctcatcatctccggctcggccagcatccgtacagttctcccagttcgaattgctgaagcattgaacacgaagaactcgcagaagctagagattgaatcgttggatttgaccgaagaggatgttactactttggaaacattggggcttacctcttctctgtacggagttttagctcttttggaccaccaaacggcggcgctttcgacgattgctgatgcagtggcggcgatatcatgtgaagctttgaaagctgatgtgacagggtttaatttgatggattctggggatggctatactgcgaaggatgagattggtgtttctggcgatatgaaggtactgctgaatgggtctaagttgacggggaaggttgagattaacgcagtttcgaaaatccccaaagttcacggctgtttgagggagcaagctaaattggttcattccaagactcgcgttgagttgaattctgctgttaaagctggcaaaggagggcctgggagcgttgcgggggcagccgggatggtccggactacgatattgccattggctgcagtgttgtgggacttgggtacttgtagctttgaccgttctaaatcaaatttagattcaatgggtagccatgatttgcggtcgagtttgggaagtttgtttgagaagaattgcccgagtaatgattccttgaaaaatgagtttaagctggtctcggaactggttttcgaaggggaagagaattatgacaaattagcgcatcaagtgaatgttttgctgg

SEQ ID NO: 24712 - DNA, 5751 bp, Cannabis sativa
  modified_base (2561)..(2567): a, c, t, g, unknown or other
ttaaataatcaaactgggaatattaaaatacggaatttcaaaattgaaaacatcgcatgtgtgggttgatttgaaaaaatagtcaaaaaccgcaccgcaaacactcctactatctttagcaatcggattggatggcgcagaactcttttagtcaacttattatggctcgaacagtaagctggatgggatggttgatcttgttcttgctaaagctatcgaggttaaggaggtgttgagttggttgaaagaaatagaccaaaatgatgtggtggtggggtcgtacagtttggtcacgatctaagccatccgaagttcgttagatatggcttttatttttagattttgcatttctgagtacagatagattctttctagtttgatgaataatgtttttttaattttttgtcaagagatccactaatcatgttgctcaccatttgattagaacttcatggttaaatgttagctgtacatattcatattctacgattccaagtagtttacatgatatacttttgaatgatttgagttaataaaattgcatatttctattaaaataataataataatttatattttagttttagctttttaatcattaaagttaaaatggtaaaaaatatttaatttgcattcatttattaactactatttactactttacttgcttcacgataaaattatatagtatataataaaaaaattacattattataaaagttatatttcataaatattattaacaaatcgtatactacaaaaatacaacttaataatataaaaaatcaataacaaaaaatactaattaagtatataaaactatacttaatcaataaaatacaatatatattttatggtaatgtttcacacgacttggtacttttttagcatttctccaataataaataaatgcaaatcctacacctatgaccattttattaaacttagatgagagttaattctcaaggcatcaaatgtttcattaagtcatgcatagttaaatgaatatcccttggttgcataaaaatattataatttttttctcatataaataaatatatataggtgggctccactagatctagatgttgatattgataataaggctaataaataacaatattgctccaaaagagatggtctatttatggaccatttgttatttgtgatggtttctaatgggacattctactaggaatagtcacatgatatactatccttcaatattaccaaacaaacaagacttgtttctcattctgcaaatttagttaggtttgcttctttatttttggtatggttactaaaattagaatgagacttatttgtattatttataattttattattaaagttcattttttttaagaattacaaaaatattattaccaaaaaactaatttgtatgttttactaattaatgtgatcaatatgaggaaaaaaaaaaacactaaattcaacaattaaaattttataacttatacattaaacggataatttatttatttatttttttgatagataaaaaaaaaaggataatttaattttattattcctataatgatgcaatggtattttttttttccttatcatcttaaatcaatataatacaaaaaaattattcttattatcactatattattcccctaattaatttaaagaaaagaaaaactctaactttattgattattattgatccatttgtaggaaaattctaaagtaacaaagattaccaaaagttacaatattgataattcattcaaagaccataatatacatcaacactctatccctttctacccaataatattaccttatattaattcttacatcgatttgcataaacatgtaaaagagaaaaacccaaattccttcccactctcaaattttttatttttatgagagtgtagacagaaataaaaaagaaacaaaaccctcataaacaacacataatcgatgtaattaatactaaaacaaaaaacaaaaatttaactaaaacattattcttcttcttcttcttcttcttctaaattagaactaaaaataatgtcttcaaagatgacattattatgcaaccattattattatcaccatcatcatcacctcatctgttttttctgcataaaaaaaactccattattggaattatatacataaattattataaatttaatattatggtgaaatttaaggtacccaatagtcatattgacccacttgatcatcttgatcttgagatgagtttaaatagcatttattgctatcaaaatcatcattattatttgtctgcacattaaagcaattagttataccatcaacaaaaccaaacccacttcaaaaaaaatcatatatatatatataaaaatatataattggaagcaaaccttacagaatccattattattgttgttgttgttattatttgaagcagaacaagatgaagaagaagaagggtcaagaaaatcttcaacatgccaaccaggaagtgtttccattaggtactctgatatactacttgtcaaatatgaacaaccactttcatgactattattattattattatnnnnnnnattattattattattattagatgttgaattgtatggaaattgagtcatttcatcaattgaagaacagctacttatctcattattattattattattattattattatttgagattactgttttaagtctttttgttgttgttgttgaaaacaatggagtgactgagcttctgttaatggctgcttcagagctagtagtagtagtaattgatgatgatgatgatgaagatgatgataaaggtgagagctttgctcctgttagaagaaatctatggtgtttttgagtgtgttcattggctttatgaattggaatatcacattctctgcataatattgctcggtcttcttgacagaaaagaaaagctcttctttcctagaaaaaatgaaaaatacccaaaaaatttatgtgttaattttggtaaaatgaatgaggaaaattgttctactgaagtagacaaagaaaacccagattttggttttttctgttttgaagtatgtattaagatattcgtgtattgaatattattttctcgggaaccaaacagaaaaaagaaaggatttttacctgacagatgtcgcagagaggagattctttgaaaccaggttgaagaagagagaatcttgagtgtttactggcgagtttattggcatggtgaacacgattatcacaatcatcacagagtgcagcttcatcagctgtacagaaaacagaggcttcttttttgtcacaaacatcacaacggatcttcattttcttttcttttcttttcttttctgccaaactatctttttttccttcctatatatattatgggattgatgatggagacaaaaaattatgggctttgtggcattagggaccaaaaaagataatagctagtcagatgagaagttttatattgaacagaaatttctggacaaagtcactcattctctctctcctattcaatataaatgtgtatatatatatataaatatatatattttttacccctatcaatagactctctgtgaaatttggagaaagaaagtttggatctttggtaagtaagttggaaaatgaagtttgcttatatacatatatatagagagattatattatagttataccaaatttatatcatatcaaaattttgttctcctatttttaattagtatattgtgtattggcacagaaagagagagagttaagtgtcagctaatgagagacatgaacaaaaagaaattaagatattataataatggttaatgaagtgtgatttggttgagttgatttgactaactctttctttatacttttaagttttacccatgtaaaagagaaaagagaaatgctaaaatgtactattggtgtctagcatctccatatgtgtcagtatcgttactggtccaattaagtatcgagtcccacatagtttaatataatagcttttaggaagtatcgttagccaatcgcaacgtaacatatcgagaaggtggtggtacctaataacaatgctccatgtaaaataagagaaatgctaaagggtaccagtggtgcctaacacattcctatgtgtcaatatagttattggtccaactaagtatcgggtcctacataatttaatataatagattttaaggagtatcgttagccaatcgtaacgcgacatatcgagaaggtgctaggcaccactggtacctaatagcaatgctcgtaacatagcatttttgtagcactgtaataatatagcatcttgaaaataattagtggttttttataattattattaaaataaaaaaaaaaataaatttcatatcaaattgtactaatagtgataaatatttcataatgatgctaaatacggtaagtatcctttaatatttcttatatgaaaaagtaaaatattaaatgacactaatagtgtctagcattaattaagatactatattattattggtataaattataaaattaagtatcgaattatacataatttattttaatacatggaaatccatcataaaaatctattatgaatgacatgacataccatgaatttttattttattaattaatgtttcattttcttaagatttttttaataaatatattgtcacaagatgttatgtaatgactatatatttaggcatggcacttagtaacgcattaatggtttattaattaattatttgtgattatatatacattagtggaaatggaacctattgttagtagtttgagaaataatttttcaactacagagattttattaagttttaggtgtgaatatacatattatattttttatattttatgtccggtaagaatagaatatagcgatttgtctattagtatcacaataatgcgatagagtatttaagaattagcggggtgagtattatgaacatttggaatgcaagaactatgcgggattatggtttttgaccatttacccctaagccttaagataacctaaaagtgaagaaaaggatattttagaaatttgcctaagttggattcatggtggaatttctagataaaacctaagtgtatatactgaataatatttggaatgaaacaaatgtttaagagataaaacttggaatcaaaaaatcaaacacaatctctcactttgtctctttctctctcggcaaacacaatcctaatatttctcaagctttcagaccaatttcaatggtatttcagctaggttttcaagtgtggattggaaggaagatcaaggtaaagcccttgcccttcatatctttaaatttctaagcttaaagttgattttagtgagtgttttggtgagctcggttctgtaaggctttagaattgttagaaactattttgagagttggttttatgtttgttttgatgcttattagtgagttgtggctgcggtagttggtgttgagaaagtttgagtttttgaaactcaaagcttgcttaacaatggtatttttatttccatagctttgatgatgaaatttttggttgaattatgttcattgaggtgttattaggtatgctggaaagttttataggatttggggtgaaattgattgagaatgttgagattttgagtttctgctagaaaattgtgaaccttttggtgatccggtggatcgcatggggtggtttttgggtatctcgtacttacataaacactatatttcatatctgattcgtgcacttgcga

SEQ ID NO: 24713 - DNA, 2399 bp, Cannabis sativa
tacttctattttctcttgcacatctatagcgagtgttggccaatcttttgcgtcaaccccattagatttaaatcaaacgctacaaaaatgtctctacctgtgagagcaaaaaaacagtgttctcacctaagagtatctctaatgatacattatcatataaattagtgtgaaatctttacacttccactctatggatacattaaattttataccaaattaatatgcatcaaattttacaccattaatgatgttatatttagtatctacaccaaattggtgcatacttttttcttttcatttaatttttttattgtattttaaaaaaaaaaataatcataaattatctgttgaaaatatgtataattatgtcttaaattaactattattggttattaatgtaaaattaaattctatttatacccacaaaaagataagtacactccaatatttaaaaaaattaagcttaaaaaaaaattactcttaatatttttaaatttttttgtctcatattattttgtattaacttaaatagttattttaattttactttcatatatatatatatatatatttttttttaaaaatgatgtataattttttttcttataacatttcacataattttttattttaagtttttttggttataatatttgaaatatattttatttttgtatgataggcatattttttaagaatataaattggaagaaaacaattaaaaaaaattaatttaattaaagatatatatatatatatattttgtgtaaaataaaaattgttaaaatatagtacatttataaatttttaggcacaaataaaattcttaatataaataacacaaaatgttgtatctttaaagaaaaatgtcatatttagtgctaaattaagtaacaatagtaagtactacaccaaattgatgaaatatgtacacaaaaatagtgtcattgttagagatggtctaactaccctatacttatatgctatctcatttcattatttaggataattatgaatagaaattattagcttacaaattgattcatttccttccacctaaactaaacaattggagaaatgttaaaaagtattatttgggcctaacattctgagatattatatcactattagtgtaattaagtattaaatatcatgtaatttaatgtaataacatttaaaaaatataggtaaccaattgtagtgcgacaactctaaaagatgttggcaccactaatgtctaatagcagttcgaacaattaacaaaaaaaattaaatctccgaaatttaaggatttattggtaatgatttcatctaatgaagatttgcgacataaatatctaagtttaacttctatccatttgtagtgcgacaactctaaaaggtgttggcaccactaatgtccaataacagctcaaacaattaacaaaaacaattaaatctctgaaattcaaggatttattggtaatgatttcatctaatgaagatttgcagcataaatacctaagtttaacttctagttgcaaataaatacttaaatttaattttagcagtaataatacctaagttatatttctgaaactctgtaggtacctaaccgttatatattacgccattaaatccacgtattattttcttatagtatatttggattattattttttaaataataaaaatttaataatttggatcaattagggattgacacatgtcaatttactacctacataattaaacttggtatttattcattagtaactgaaacttaaagttaagtcaaattactctaatcttttattctaataacaaaatcataaaaaaaaaaaaaaagaaaaaaaaagctcctaaaatcaaaaacataaactccgtgaaaatgtgacatagttacagaaccaacacgcgcttgaattgcttttattgatctcatcaacgaattcccaccgcatttatccccacacactctctctttactcatttcgtttcttctgtcttcttttatctttccttcttcaaactcttctctctctctctctctctctctctctctctctctaaaatggcgaaactagttttgttaatggcgcttagcttccttccggcattggctttggcaacccgttgggtgaaggacccccttgtagttgaaggcaaagtttactgtgacacatgcctagctggttacgaaaccaccgccactacttacatcgccggtaacaattgctttcacaatgctcttttcatcttttatttttctgagtttcataagttttagggcctattttcgtatattttgtttgaataactgttaatctatggaatgtgcttctgtgttttgtagatctatgtttgaaagtgttgtattatgatagtgaagttgatgatctacttgatctgaatgattt

SEQ ID NO: 24714 - DNA, 2167 bp, Cannabis sativa
  modified_base (32)..(60): a, c, t, g, unknown or other
tttagaaagttcttatttaggatgttaataannnnnnnnnnnnnnnnnnnnnnnnnnnnngtaaaataatttccaacaaaaaggacccattcgcacgaagatccttctccatgcttagctgatctttttccttgtacaaaggactcgtccacccacgcgaaagacccatctaagcccgttcctttactgtcagagctcatctcccatctgattcgcctcccgtcttgttggatctgcctcattctttaaaaagaaaggtatgattcaaaaaagaaagtttattgtcagttatttaattttttgtggttgatttagagcgattatatattgtttgtgttgaaatacacataattttgataaattttgcttaatttttgataggttttatatggtggttatggtatttttcaatgtggtgtggtgttagttgagaaaaaacagaaccagtgctgttggttcataaaaatgaaaatggtgtcaatagatttatgtgcttgttgtttgtatttgtttggttttgatatatttttcgctaaaatcgtgagatctagttttctagtgtattctatatgttcgtatctttctcgacactttttcgatatgttcttgacgggttctcgacgtaaatgtcccaagatcagagaagacttttatcaataatttttcgataggttttggataagttatcgatatgagtgagaattctttttactgttgttatgttagttattctcgcttgattattgatagattatcgactttgacaagttttcgatagttcaagttttacaaaaaaaaaattagggaatttagttattatcgattaattatcgatgggttgtcaaaaagttcttgataaaagtgagaattttattttgttgttgttatgttggttattgttgctaaattatcgataggttttcgataggattaagaattagttttgtagttgtcatttttagtaattgtctactgactatcgatgggttctgaacaggttttggataaggcttagtattgtacttttttgttatcatgtctgcattttatttttgttattattgtattgtttaatttttttttatatcactaataagttgtgtttttttttcctctgttgtgttctgtctatttcttgataggttttcgattggttgttgatatgtttccaataaaattctaacatttgctatgttttctttcttcaatagcaactgattgttatgattcatctcccagatgaagaagcgtatgccaagacaatcacttatgatgctaagatagtgattgagatgggtgtcgatgagacgcatccttaatatgatgcccaagaccttgctgttttcgaaagccatgctaaaaagtagcagaacaaattaaaataacaacatccttgtattagaaaatattttgtatggttttatacattttgagacaattagtctaactttttcttgttatcaaagttaaactttaaaaattgtaataataacatccagagcctccatataaaatattatcgaaaaaccatcgagaaatcatcatagaacacatttactaaattttgtaaggattccacaaactatcgaaaaagcatcgagaacatgtcaatatactatcgaaaatttttaaaacttgcaatgacaatatttggagccttcacaagagatattatcaaaaactcatcgagaacacattgattttctgccaagaaactatcaaaaaatacatttaagctaaatagcaatttcaattagcataaaatataacagaaacaattttatggatcccaagtaacattaaattatgcctcaaacatggtcttttcatgtagttttgttgtggcctgaaccgccatagttgtcacaattttgagactgtgttactacttatttatcactaattttaaatcatactccaagccaactcttcatataaaatgttgcgcatgttttgtaagattgtctcagcttcaaccatcaatatcatacttttttttcgcttttatatgcccaattaaatcacttaatactccaaataccatcatacaatacaatcaaaaatgtcggcaatcttgcaattcaatacaaataaaaaataactgaatcagaataacaaatattaaaaattacaataataggaaatagtgtcaagaacctgttgaaaa

SEQ ID NO: 24715 - DNA, 3856 bp, Cannabis sativa
gccactgccactgcaactgcaaatgtacactggtaaaagtttgatctctttgccagcgcagtttgcaaaatgtgcttaccagcgcggtagcgaactgtactggtaaaagtgacatttcttgtagtgaaactaactcacttagactctagtcgtactcgcctcacaagtatgtagggagtacccttacaaaaccatttgctcttaagcttgaaagaaacaattactctctatcgaagaatgtacatacaaccatagttcgcgttcatcatcttgacaaatatctgactggtgccaagaccagaccagatgagttccccctgctgataatgttaaaggagatcaaactcctatgatacaagaccagttattacttggttggttatatggttcaatgacaaagggtattgctacaaaggtaatgtgatgtgactcttttgcagcattatggcgtgccttcaaaacgttgtctagatctcattccaaagctaagatggatgagtatcgaacaaaaatccaaaacgaaaaggaagcatgaacatgacagagtatctcaaacaaaaacaccaatgggcaaatgttctgaccctggctggcgatccatatcccaaaaaacttattgtttctaatgttcattcaggattggatatcgtatacttacctattgttcttcaaggttgaagctcgtggggatctatatcctgggaagaattacaagatattctacttagctttggcagcaagttcaaaagacttagtgccatttatggaaccaacaaaactaatgaagctcgaccattgccctctactaatcttgctgcaacatgttcatttgattttcaaggaggaagaggcgcaaattataactctcccgaggacgtggtaaatttggaaattataaaagtagtacaagatctcatggaagaggtcgttgttgctttatttttataatctatgcaagtatatgtaatctattgttgttttaaactcacacaggtgaggttgatccatagaaaattgttattgagcaccactaaattagatttatgttcttatttggtaagatcgataaaaaggttgaataattgaataactggaattgaaaataggaaaataacaatgaaaaaaaaagtgtaattaactatggatgaaggtttaggaatatgaatcttgttagttcacttttctaatcgttaatgttaattattaatttctctctttaggcgatgacaaactatcaaaataatcttaactcttctcagattattaaggtcctaaatcttatactatctacttacatttttgaagtaaattaacatataacttgcattaaatgtagaatctaaaaatcacataaattgtgtaaatactcttattttacataaaaacttatggttgtcctattaaagcattgttaatattcacttctcagatttcatattaagatcataaatcacattaaagatgaccagtctaaaatatgtaattaaaataaaaagaacaaatcacaccatatacattcatcatatccctaaactggaattctagttcatgttcatatccataataaaactaaaatagaattaaacataaaagaaataaaaggagaagaaagaaactgatggtggaatgaatccgggttgccacttcactctcactgccatcctttactgcttttagggtttaaattctgagcgtccctgcttccttactcgaagtccatttaaatagagtcaatttaaacttcaaatatcgcaaaaatacaaagtttccctcgagtagtatggacattctcgctgcagctataaaatgtctcgtcgcgatgaggtcacctcaagaaaaactttgatcctctctgcccatatctcgccacgaccatgaataaatctgcttaagcccgagttgggtcttttattctcgtctggccactctcgctgtggcgagcattggcctcactgcggctaaattgggaaaataaattcctggtatttttgcgtgtttttcaccgcgaccacaaataaatccactgcggccagatggatcttcaccacggccattgtacgatcccaaaaatattttttttttgacttttcacgctttgcacagtttaaaaaaatgtctagttctacaaattaaaagaacaaaaattataaaaactaaaaagtaagcaaaacaaattgtaaatgtcttaacataaataaaggaattaaaaacttgagttgcctcctatgagcattgtctttattgtcatatagtcggacgctgaatttttttcttcaaagaggtgccaatatgatggcggaattggcttggtcaatttgacctcccaattagagcttcaatctttgtccattgactttgaaagtttccagtatcttgcctttcagttcttccgctccataggggaatactttgaccattataaatggtccagaccatctcgacttcaatttgccaagaaaaaatttcaaccttgagttgaaaagtagaacttgttgtccgggtttaaactcttttctaaccaagtttctgtcatgccacctcttggtcatttctttgtagatctttgcattctcatatgagttaaccatcaatctaattgaattacaactgtcagattttgacataatcctgggaatggattttctgtctaagtatggggcaacaatcgatcgtaagcggaagatggtggtgtttgagcccgacactactagcccgacagtgtttgtgggtaaagtttaggggacgtgcatacatagaataacacttttaaaagctaaagatctgatgtgtagagcttgtttgggattcctagtcactgcagtggataccagccaacctgtgtcatttggacatgagagtacaagattagtgtgtgagttccttgacgtctttcctaaagatctatcgagattaccaccttcctgagagattgaatttgtgattgagttagttgcgagagcagaaccagtatcaaaagtaccgtatcgaatggctccagtaaaattgaaagaactaaagatccaactctaggagttacttaacttggggtttattagaccgagttactctccttagggtgctctggtactattcgtaaagaagaaagacgggtcactgcgaatgtgtattgattatcgagagttgaaccaactcactatcaagaacaagtatcctctacctcgaattgacgacctatttgatcaattgaaggggaagacagtcttttccaagatcgatcttcgctcaggttaccatcaactgagaatttgagaggaagatatcccgaaaactgtgttccgtactcggtatggacattatgagtttctattgatgtccttttaactcaccaatgctccaacgacatttatggacctcatgaatcgggtgttaaaggattacctagacaggtgtgtgatcgtgtttattgatgatattttaatctattctaagtcagaagaggaacatgaattacatcttagattagtattgcagaggctacgagatcacaaggtgtacgctaagtttaaaaagtgtgagttttggttatcacgtgtctcttttctagggcacatagtggataagaatgggattatggttgatccggccaagatcaaagctgtttgggattggccaacaccaaaatcagctacagaagttagaagctttttgggtttagctgggtattattgtcggttcgttgagggtttttcaaagattatcgtacccctaacagagctaacccgaaataatttgaagtgtgtttgagctgatcggtgtgaaaaaagttttctggagttaaagctgttaggctaaaattagtctaagttttgggtcatattttcggttagttttcact

SEQ ID NO: 24716 - DNA, 2321 bp, Cannabis sativa
ttttatatttttttttaattttttaattaattaattatctttaattaaataaaactgactaaaataatttaaaaaaaaagcatacatgtttattaaaaaaaaattcatcatattatctcatataaaaatagggttcttatgaagaacctcatttcaatttgtggtttgtgattcctcacataagacaaagaaaaattatgatacacaaatccatgtcagaaaaattatattctaattggttttttttattttttttttttaaataaaatataattttgagggatacttttgtaaagtgtattcaaagagagagagagtgagtgagtgattaaaaagtgcattaatctttgggaagaatttataaggttttccttttacaaaataatttataaagtgctattattataaagatagtgtatatagtttttttaaaaaatattaaaggatattcatggtttagggtgcttagcactcttgtgaggtgtaatattattattggtataatttcatattgaatctcacttattttaatttaataaaaattacataaaattactaaccaattataggatttcatctcatagtggtgctaggcacctcggtgccctataataatactctatttttgtagcatgtgccaaattttacataacaataaatatcactttttttatttactcttttgctactcattataatgtattttttatattaataggatttttatacactttcaattaaaatttaataattttgttgacttttttataaaaagtaaattaatttacccttatacaatggtaaaatgttgatcaaatataatgtttaactattttttgagttaaatttaacacaaattttgtaatatttattaaagatggtctaactagttgttcaaaaaaattattaaaggtttgttgtagtttttcaaaaagggatcatcaatttctataattaaaattaacttatataataattaaatttatggatttccattgagtatataaactttaataggcaacatatttagtattgagaaagaaaaaaaatcatatttaatatttatagacctaataagtaattaatcataatgagattgatcattcaaaaaaattctaataagattgatcgagtaatatctagtgagtcttattcgtcttggttgcaattctacacagtgacttgaggaggatgagcaagccaaagatcactctcgattcctgaaaaactcttcttcatattaaaatattttacttaaaaaaaatatattagaattcagaaacaatcttaccatcgagtactccccatgttcgaaagagctcaattaggaaatctatactgtaatatatatgtactttttataactgatagagtaatttgtctcttatttccattagttgaggactttgaagaagaataaatttttgagagttactttgccacttgtaagaatatattttaataaaaagaggacaataacaataaatatagccggttatatgtttatcttttcttctacccttactttcaattcaatgattgtaatcttgttgaggttttacatcactaaaagtgggaagagggattacataattagcctattataaattgataatttttttttttttttagcttttgaggcctataaatagttttttttatgagcataagtatttggtactaagggtgactaagcattatgggtgaaaatttgtatttgtgaattgtattcgtgttgtgtcgagacctatgtataataggtatatgtttgatctggacatgatctgtttaataatcgtgtcagaatataaaatccgaacacggctcgtttataaatgagttgatatgacatgatttgtgtaatccgtttataagcatattttgtttaaacatgtcaactaataatatgtttatgacatattcaatactcttatgactcatttatgtcctgttaaagtactataataactttaattaggtcattaataagttagttttttgttagccatgttaacccaaatacgacccgtttattaaacgtgttagacgagtcaactcgaacacgattcaaacccatttaacgcaaactcaaacatgctaactcgcgtacaagttattatcttaattacaccaatagtagtatgacaccgagcagagtgctagatatcaataatgcttcttagcatttccctttctttaaggggtgctaataaagtatgttaatgaaagaaagtgaattaattttattttattttatgttgggtgtacatcgaaagtcccacattggctagaaatgggaaggatcttgggtatataaggat

SEQ ID NO: 24717 - DNA, 6850 bp, Cannabis sativa
  modified_base (196)..(202): a, c, t, g, unknown or other
taataaaatgtcaccattttacctcaaaaaaaaacaattttttattgtaatgattttttttttattgatgttttagtttttcgttgtttatatattattttaggttagttttaaaatttctctttttaaattttataatattaaaatatggggtagattttttttttttttttatctttttattattattattatnnnnnnnattattattattattagagtattttagtaaatggttgttagagttataaaagttattaagttatttaaaagtattaattatttaaagtagcttatgttcaaaacctactattcaaatcaattatatttgacaagataaattttctcattttcacatagaacaattattgttaatatttatcaatattatttatttgtagtgaaactatattattaaatttgcaacattgtttacttattatgattattattttatatttttttcccttactaataatttttttttgtttgcagttaaaacattctttttccttctcacattcatgttactaagattgatctctctccaacctagatttgttcattgctagttttttttttttcctttgtcgagagtgatgttggaattattgtcaatacttgttcatttttttcaaaaggtgtctttgaatggggctcctttttaagatctattaaattttgaaatttgtttttctgggtgtatgtcttcaacatgtcatgcaaatgcactacagatgaaaaacgagatttcttagttgaaagaaattcctctttatttaatgatgaatgtattatttgactctcaacaataaaattaattattatattaatatatatatccatatttatatacatccaatctaatactatcatatatacataagtaatttcttcccatctcaacgcaaaatcaaagtttgcgtttaaaataattgcccaataacctagatacatatctgctggagtaaaactataaatattggacaaaataaaatatgaattcatttttgtatcgaattacactttgcattgaagatgatcttaacataaaatgcaatgaaaaaatagacagtgttaaaatttagtgaggttattaattgtttgcttagactttgtttatacttcgtttcaaatgacaatctgatctaggacttgttacaagaaagtgaggaattttttttcctttttataagaagtaagcgactaagcgttatttgacttttgtatctaagcagaatttttgtacactaattatgacaaaatttaccacagacaagtgttagcacaaagttgaaaaaccaaatccgaaaattctattgttctgagctcttccgagagcccaaagctgcaaatcttgagattaaactggacattcttcggattaaatcttcgaaagatggacgttgttctggatcactgcatatttttttaaggaaaaaaaaggtttcaagtaagaaagagtgtgattatattgtagttttaataagaattgtacatttaactaccttttccaacagtcttggatgatggattctacttggggatcaaggccttccggtagttctaatcttctatccatgaaccccacaactcccacaaccttatgagaaagtggtttacaattatggtttcagaattaaactaataaatcgaagcagaaatatagtttagaaagataaacaatagagagaaacctgtaaggtgtttatgttgttccaaggaatggattcagtcattagttcccatagaatgacaccaaagctgaacacatctgacctgttaaagacaatcaaactccttaattggaaatgtttctcgaaaatggagtaatgataatggttttcaaaatcaaccattgattttctgaacttacttctcgtttgaaggttcatttcggaggacttcaggggccatccactgaggctattaagtttaagaacgcaacaccttttaatacaatgtgaaagcaatgaaaattaaagagctagatacaaactatgagaaaagtttatttaccgttcctctaccagattttgtagtcagaaaggttgcttttttcaacctagaaaggccgaaatctccaacctgatgacacgaattgttaaacaggcaactccaatgttaaacaggttatatgctctttattcaaactgagaatcattgggcataccttgacagtccagttcttgtcaacaagcaagttagaggacttaagatctctatgcactatggggggatttctccgatgcaaatagttcatacctctagtctgagacaatatgaaaaataaagaagcaaatttaacagattcagcattagcaacttaatcacatgaataaactggcgggttttatatgcaaactataaacaaatcatgtaagagagaaccatagcgtactcacaacatcaagagccatccttagacggcgtctgatgtctaatgcttgattgctcttatgaagtgttttaaaaaggcttcccctgcccaaataagaaagattactccattattgggagctttttctggtgaaagccaatagtaattactacttagtctttagtaaagcaaagaatttacaaacatccgttattggtaggtattttttgcattctaatttctaaggtagagtaaaatcattatttgtttactcctcaccttttggtctctaatctgtccagaagcatttatatacttttcttatcttacctgggtaagaactctgtgacaatagctagccgttctcgagagtatgatgcgcccataaataacaacacatttggatgtctcaacctcttcattatatcaatctgaagtacatccaaaagttgatgctccccttcatcaggtatattcattttaccagcattattcataaacagttcagttaaacttagctgagagtacctcttttttgtaatcttgtaatgctccttcactgtattcgtttcgcaagtaaaccttaatggcaacatcctgattggagaaatatattttagggttagcacattcttaaaaactaaaactttggtatgaaatttgaggtaatctttcaagttttaaacgcataccgagccattccaaattccacgatacacaacagcgtagaaacctgtcaggtgagaacaaaatatacatacattcagtttcagtccagacaaatgaaaattttgaacttacatataatgaaaaataaagaaatttaccatgtccaatctcctccccaatatgcaagtcatcccagtgaatctcacagtcaacaacagagttggactcgagatcacctttgcttgatgaacttccatggcttccactgctgctgtctcctgaacttgggaattgtttaccatgtctttgtgcttcatcttcgacctggacatccatcaagttggattcttctgtttttgtttctgttgattttacttcagtgcttaacttccccaatgaattataacgtttggatgacccaaaacattcattgcattcattcctttcacgtacattcaatagctcatgaccgcatccacctgagtttcctcccttaggtggaagggaaacatgtcttttcctgggtcttcccctcttataatctgaattgacaaagtagccatctggtgatttctttgaaacacttggagaaccagactcatttttcacttcgttcatcactggagaactaccacagcttgtaccattttgtcgatagcttccatgttcattttcattactagcgttcccagttcccttgatttgcagctttgctaatacttttgtcgcctacagacatttaaacacaactgtttaggacaaaaattggcaataccaaaaagactatatggtttcacgaagtagaatccttagggaaagaaagacagcaaaactaaaaccatgtggccttattttcaaacaaagttatcatttcaacaatttgtctgcttaaagatacaatacaattatagttaaagtgataaataaactaatgttaaattatcttatggagaccaattagaaagaaaaacaaaattgaggagggaaggaactatggtagtgttacgcaagcaccagattcgaaacagatgacgcaatctctggagccaccgggactattgggggccgagggtgccactgtaaccttttgaatcttgaccgctgttgatctcttctttggtcattggcaacatcatcacaaggacttgcgttctctgcttccatgctgttgatcaaagctgcatcacttgcaacaacgatgaccccagcaagctcgccattttcatacaaaggacttttggtgacaattgccatgagtttcttgccggatcttgtcttaaaagggaattggcctgaccatggttctcctgttcgcaacaacctccccatgatcttctgtaatggaacataataatcttcagggataaggagttcagtgaaacttctttgactaactacttcacagtctctccatccatagaggttctcagcagaacgattcctgaaattggttgagtgctcttgttctcaaattcaaaacatgtggaagaaaataaggcattggaacctacttaaatcacatttaataccactctatgaattttccaagcaaaggtaagtaatttttacagagctacagctttcaataatgatatagaaaataaaagttggctttactatgcatcttagtttaatagcaaggttgatactgtttaacttagaaattacctaaaaaaaactctgtttcagatactaatctgtctaaacagagttcctgcaatgttccttaaaggcttgaacttgagtttatttatattgctctgggaacaaataactaacatcgaaatcataaacagtttatgcgtaccaactgtatgatttatgcaactctactctctttctcaatcatttggtctagtcattaactttttaagtcctgggattgaatgaaaaggacttcatataagctgacaaccaatcttccaaagttcaaattcttcaaaaactgactttttgtctcttttcctatccaacaagtatactaattccatttttttaatgaaaacttaattcgagtttcaagtttaataaaacttcgagatttattaaattttattaagaaaaatttcatttccagatcatattaaaattagatagaatagaatttctcttctcagtggacatatgtcgaacacttctattacttaaaagatataccaaaccactgtttcacaaaaagtatacacaatactgtgtatatatatgtatggatataaatattaaatcaaacacgataaaacaacgtaagaagaaacgaaaacgaccaaggctttcagagtattgtataaacaaatacacatatacatatatatgtaccagaagacgatctctccggatgatgcactgcataccagaacagcatgacctattgactccaacaccttcttgtacggactaccggaggaaaagttacccacaatacggtcttcaccgggataatcatcagccatattgccggaatctgtcgtcaagacacaatcttcatctttctggatcgacatctccctaagctgctcactaagtcttgtgtgactctcctccaagctccgacaccgatcaaccagagctccgtaaaaacgagaagaggaccctaatccgaccatggaagtcgccggagtaagggctcgcaatggcaatagtcaattcttttatttttaagctcgagctgaccgccatggtttttttttctaatcttttgaaaaaaaaaattaataaaaatgtatattttttaattttcgtgagcgatgacgtggagctaaagcgtttgcgccacgtgtcacctaccaaattgagggagttctcctgtaacgagaggtctacgaatcggaaaatgggatttggcaggcggagtttctgattggttcgtttgtttcggagatttgtcataggaaaattgccgcagttttattaagataattacgattatgccactcagctacgtcattggctcatttattggaatgggttagttaggttgcttacactccacttgaattcaattcaggtgttcttgtacatgagatgacacctaaaagcaagacaaattagtgatcaaatgtggttatcatcattgtaagtactgtggtttcttcttttttaactgttgatcttttgagtaactgaaataaaaccaatggatgttaagtatagggaagtgagaatagtttgaattgtgtttctgagtgtagacaatagttttcttgtcgtcaaagctataattaacccaactgtgtttccactttgtttagtcttctctaaataaatcgttgaaatatttaatgataattaacatagccacctcattgctacacccacttatttttataaaaatctcaaatcttataaaaattatttttcaaagaaaaagtccatttgatttatgtgctccaaaaatgagcataattacatcattacacctacatattttcagagagaatggtggactgcaggacccgcctctaatgaagcacaaattccttatctaaattgggaacaagatatggatgaggcaaaaatagaaatagtattttttacgaggaaattatactttatacttactttttattttttattttaatttttatcttcattttattattctttaatttatactcaattttatagatcgtatccttattatgtgcattaaaaaatttaaatttaataagttatgtgaggttatctttggtactttgtttataaaagagagtatttatcaattaaaattattttagagttatatttagttaagctggagctatggcacgaacgagatcgagagctcaggggaagatgaaatcg

SEQ ID NO: 24718 - DNA, 2133 bp, Cannabis sativa
tataaaatatttctattaatgtgacttttaatgctttatctcagcatgtcaggaataataggagtccaaaaatgttacgtttctcaatttggaaattactttgtctttatatatatatatatataaataatttacatatctggttaggctaattaataaacattatactaatttattaaataaaaataattatattaaagaaactaaaaaatgagatcgagaatatgtaacgtataattaaagattatcatgtgggtactgtaaagagacattaacagatttcataattacttgttaattaattaagtactttgtaaattaaattaaatatatcatgcagtcatgttcggttattttatttattttggccaattatttgtactgcatatactatataagtatattgaacttttttgcagcaaaaaaaaaaaaagagtatattgaactttggttcaagcaaaaaaaaaaataaaaaaaaaaggaaatggatacaaattactatatttttggtaaaatttttacaattacattctttatataattttatgatgttttataaaaataataaaaaaattacataaaaataacaaaaataacattcaaacaatattaaaataacataaaaataatatacaaataacaaaaaaaattactagcataataaaaatacaacataaatatagcataaaattaccaaaatatcttattttctataaataaaatcttaaaaactatgcataaaaatatttaatttttttttttaatttttttattattttttaatatttttgagataattctaaaaaatcatatatacatgtacacataccatatatgtataacaacaaatgtttctgtaattaattttatgataatatatatacatagctttttctttttttgtaggtgattaaataattaattagtcaatgtgaacacaaaatatgattccttgatgatttttcaattagtccaaatagtctttaatttaattaattcttataattattgattagttggagccagaactaaaagctccctcaccagccaacctatatataaatatacacatataaattaatatattttaattatatttaatcttatccctttacttatttgggactatttttttttgttgtgttaaggtaacatcgtatctttagaggattgtaggaatcataatcacgtgggttctacccaatcagacctcacattaacaaagtcttccatttaagcttaaaatgtttcaaaataacaaaatatatcttattggtaatttttcaaactaaataataataaataaaaatgtgtaagagatataataatgagatatatatagattggtcccccacgattaattatgtatataagtttaaattaaattgggtagttccccaacttcaatgaatgttaattatgaaaccctagctagctaatattattaattattcagttaaatataatttaattaattaatagaagggtaagcatgattaggaggtagcttagtggttatagcgtactgttgttccttaatcttaattaattggttaatgtttcttttttccttaataaaaaaattgaagaaaaaaaaactattttacattatgaaatagcttacaaaaaataaaatagtgagaacttatttttgtactctgattatatttcattaatatgttgatgttatattgtgaaaaatagaacctatacactaataaacattttaaaaaaaaaataagtttgatcgatcattaacttgttgaaggacgaaatgcgaattttgaaataaatttgtttgatgcccgtcttagagtgtgggacacacaagctaagtgttatggaaaaatttgaaggcatttttaggcccgcccttattagggtggggtatacagggcctaggtcctaggttccataattttgaggtctcaaaaatagaaaatttgtgtatgatgtataaaatagaaaactaggttgattgtgcctggaactcaattattcgagatgatatggaggaagtcggtggttgattgtgcctggaactcggttattcactcttgggctcctgccaaagtcttgaagaaaataagggcgacacgggtcgctcttttgcactggaatagaactcaattt

SEQ ID NO: 24719 - DNA, 1643 bp, Cannabis sativa
atagacatttgtcttttaataagactgtctcctatgagaagatgaccatgaaaggcttgccaaataataaaacaacattttggagctgatagattacaccaaatagtcctcacaaacaatacatgagattcattcttcaaattttttttatacattttacttaccttgaacctattcgccacacaagcctcttggatctcaactccgaagaaaatctccccaagtctcatgagctttctctaataccaactcacatcttgtttaagctcatgagaccacacatattggcctcgtaagatacaatttatcaacaaaatatcttgccttaaattaaaagcccacaaatattttgcaagagttggcttatttcatttacacccatcccaaaaactaagacccctaaattttctcggcttacaaacacactctcacaaagaaagatgcatcttactcgtgctcccattgtctccccaaaggaaattcgacaaaattgatcaatctcctttgtaatctgttgaggaagcaggaaatattcatctagtaactccttataccaattagaactgaattgataaggagagatttgttagaatttattccttgaaaagcttgtaaagatatttctatttgtaaataagagttgaacattttcatatatgtttaagttaaaattatttatagtttatattgaataatttatttataaatatcgtaaaattttctattcatacatgagattgtgacttttatttcacagagaattaagattacttagccatgaataaaatagtcagcaacatattaaagttatggaatatttaaacaacgattgctagtactattaactcgaaaactagccctgatgacatggacatcaatgtttgacatgtggcaagaaatatgacatctcagagttgagtagtcccgagtcataacaagtcgacttgggtggggtccctagccctatgtcttggttgacttcgagaactctagaatgaaagttcaaacttcaataacttgaatccaattaactccctttcaatgttctgtaccatgaagacatggagcaacctaatccaaggtccgagagctgaaattacacgaacctgcaacctagaagccaacctgggcacctagggtttcacctagcgcccaagttgacattcctcaactagggttttagtttctgggactatcttagtgcaaagtgcccaaaacttgtattgggacatcaactagacataccacgaacatgtttgaggcatcagaatcaaattcaaagcaagtttatttttaagcatctggggccccgagcacctagcgcataggttgataatctatcaatcttggcaccttccaagtgtctgatcgaggatccaaattttacattgaatccgtcatcataaaaaatggggaaataggtcgtgttaattattgatattgttataattatgcatgaatttattatttgtgggccccatttttcgaaatgggcactagagttataatgtctcaattttgaagattttattaagcgctctagtagtattatttgtgctatatatgaattatgcaatttttatgatttttgctcggcgatgactgaaaaatgcaatggatggccgttagagtcacatgggtaa

SEQ ID NO: 24720 - DNA, 2484 bp, Cannabis sativa
  modified_base (332)..(333): a, c, t, g, unknown or other
  modified_base (2383)..(2385): a, c, t, g, unknown or other
ctaatcattttcataatattgtattcaagatggttgtaaaaaacttttacactccacggtgaaagagcctattagaattagtaatataattagttggttagttaggatagtgacaagttagtcacatagtctactttgtaatatagcctatataatggcaaatattccagattcaatacactttgtcagtcttttgcttctttctttaatattaaggattgatgttagggttggtttggcggtgataataatggtgggggtaaatagcggcataagtacctaaagttttaagtttgtaagcggataaatccaatgtttatttttagcggcannagtacccaatgtttgtaaaactataaattttcttcagttttgtcaatacaaattccgttttaaatttattaaaggaacatttggaagtaactaatactacatgtttttgtctagacttaatgatcaagaatctagaccttatatgtggcctgtttaagaaaataacagagtttgtactgacgaaattagagaaaaattacagttttacaaacattaggtacttttgccgctaaaaataaacattgagattatgccatttacaaacttaaaactttaggtacttttgccactatttacggtggtggttatcgtggtgctgatggatataatatgggggtgtagagtagtggtaatggtaatggaatttgaaaaaaaaaaaaaactggggagagaaagatatatatgcggcagtagtaatttaatttgatttaaaatttttaaacaattataatattttattatgttttattatttgaaactaaagttgtaatcacgtgcatgccatcagctcattgtatatctatggatggtcacacttattcagaccactatagacttaccaaaagatataatattatataagtgtattgtgacaaaaaggaacccaaaacctaagaataaatttttatttattatttatttattttagtgatgcaagaaagatataaactatcgtatatatattcatgaaaaaagaaaaaaaataaaacttgttttacaacagaaacatatatattcattgatggccacgagctcactatacatgtgaatctcgtttcagacaatgaaaacaatcaattaagaaattcttcgaataaactaataatttttatggaacttcaaagttgtcgaaataacaggtaaaactattaagaaaagcaaatgttccattttacccaattaattgtggtatcaagtaatattaattattagtcagtatgaacttcatgtacacgcttcaatcatcatcatataggagtaaataaatttagaaaacttgacattaattaattaactcaattaatttcaataaaataatataatataacttgcaagagagactataatctactctacatggataaaaagtcaaggaaattgataaattaataatgtacctgaaatttctttagcagcttctctgtgtctactgcaacctcatatatgctgtatgcaagtgaaaggagtttgcgatgacttttcctgcaatatttccgtccttaacaatggaatatggaagctactgcctcatgtagtagacccaaaaaggataattagtcattaatttttattttattctaaattctagtaatcgttgacgaagacttaaaaagcaaagtaaaaacaaaatgtaataataataataactgtgacgaagaaagttccccgaaatataaattagtgaaaaaaacagtgttaggtgtacctcgcgcaccacagtatcatgattgaggagtcaataatattagattaatcaaaagtttattcccatgatggaatggaagaggtacttactcattactcaacaacattattggctgtcccatttattcattattatatcttcaacttctgtggtgctcgaattatttcgacattttgatactaaaaaataaatatcatggcaacagataatttaatatgcaggtctaaagtagtcagtataaatttgactccacactaatttagtcctgtcagcatcttcgaggcagctacaacgttttgtccttgtgctcttcagaaagtaagaggcgtgcttgtgtaatacttttatttttttttaattttttgaaaaataaaaatatgttatgtaatcagttttattttgtaataaaataaaaatgtgttctgtaaaattcattttcatttttattttttgattttatttaagtcgggtctaagttcagggtcggatttgggttcctctcagaagctgggttcagcatcaggaccgtgggaaaggatttgggtccaggtctaatcggagtttaaaatattgatcaagaaaaaaaaatgttcaaaaagtattgaaaatgattttttttttttnnnttgtttttaaaattttgattgtcaattaaaaaaataaaaagaaaaaaaagttttatagaatatgtttttgaaaattattttcactttttcaattttaaa

SEQ ID NO: 24721 - DNA, 1002 bp, Cannabis sativa
tatatattaatataatataatattgaagaacatatgtacgtttgtatattagagaaaagaaagaagaaaaaaacaaagtgtatgggttgagatgtgaaaaaagaaagtacttattaatattgatagaaaacaataggtaacaacaacaacaattaacaaaaaaaattcatatatatataataattatttatatatataatagagaatgaaaacaaaggagaaacaactttgagtttggagaaatttgctaaaactatctattttcttcaaaagcttaacccacctaaagattttggcttgcgttgctagatattctccataattaattattattattattatgataattatctcttcttttatttgtttttaaaagaaaataaaataaagacttgtaatgttagatcaccaaaccattatatgattatatatatcattatgtaaatgctttgtcatttgtagctaaaatcttgtgtttttttggttaaattatattaaagtagcttaatttcaattttattattgatgaattaaatgcatattaatacatggtaattaatgtagtaatttaattatattttatatatatgatactatatatattttacaattttataacttttttgtatatttttctatgaaatttggtaggtgtgggtgatgtattccattttttttattattatataaatatatttttttaaaaaatgaaataaaaacctcaataaaacaaatttatatagttattatttagttataatatgtctcctaaaagttaatttcaataaaattgatgtcttgtttggtgaggatgtagaggaaatgattattaattagttatcaagattagatgtgattaagatatatatatattaaaaaaattattaaatatagtgataatgataataattgtttaatctatacacaaaaagtagagataacaaactatttgttttttaagaatgttattatagcaaacaatgtttagaagctattttagaa

SEQ ID NO: 24722 - DNA, 1646 bp, Cannabis sativa
  modified_base (1001)..(1006): a, c, t, g, unknown or other
tataaattatatatatattaaaaataatttcccgaaatattagggggggccatggccaccccatacaataacatagttccgccactgagtaatatattcatttttagtgatattttttatctaaatattaatttttagtcataagtaatatatatttttgataattatattgtgactaaacctatttttttctttttaatttgaatatatatatagactaaaactaacatttagtgattaaaaaaatcataaatttttgtgatttgaaaagtagttcactataataattttttgtttatttattttgtaaagtgcggtgtttataattctttagttttctttcaataccgatttagatcttcagttccaattaatccaaatagagtatctttttaaacaattatgtaattaaattggtataaaaaggttgagggatttcttcacttttgacttaacgtaaggaaccttttataattacattgacgcagataaaaaatatatataaattaattgtttgaattttatttttaatactgtaaaaatacttaattaataattttaaaaaacaattaataaaatgactcttacaattataatgtatgtggtcataaaaaaaatgaatgtaatttctttagatatctctctgaaatataatttagaatacttctgttgctatttttgagtttgtggaaagaaaaagagaccaacatttaaacaattggggttaaaaaaccctttttctactaatttacatatgatctttcgtaatcaaacctcgctaaaagatactgtttaatattgtttaggggtggtcatcaaaccgctcaaactgtctgtaccgcaccacactgcaaaaaaaaaatgcagtttcaaattctttgcggtgcagtcgcagtctgaattttttctacactgcgcggtgcggtgcggtttgcgtttttgaattgttaatatgcggttcaaatcgcaccgcactgtatattataaaaataccaattttnnnnnntatttaggtccaatatgtgaagactcaacctaagtccactaattattgtattgttgaaacttgaaactttttctcgtatttattttcaagccttatggtatttttgacaatttttactcaaattttgttgtatttgtgatagtttaattatttaatgatagtccaaactgcaaaatcgcataaaccgcaccgcactgtactattttttgcagtgcgatttttgcagttttttagtttcgcggtgcgggtgcggtttgagaaattgaaaaaattgtatgtacgagctggtttgaaaaaatagtcaaaaacccgtattacccgcaccgcaaacacccggatatcaaattataatattatgaattagtgtaatttaaaattgtctcattaaatattttaattaagttataataactgttatgaaaaattgttaactaaaatcacgcaataaagttagtttgaaatctaattaatagggaagtattatcacatatttttttttatacaagatagctattaatattgaaaatttgaaaccaatatttttttttttgaatggaaaatgtaaaacttcattaaccaacaaactccgtcaccaaacaaggtaacaaatcagtaggaacagactccatactgaaggtac

SEQ ID NO: 24723 - DNA, 4535 bp, Cannabis sativa
ccgtcagttattagagaataatcgaggcataggtgcacacgtgtcagtaaaggagtgcacctattgcgtctattattccctaataaccaacggcatagggttaataattaatcctgaaaaatattccaacccccaaccgacgctaaagggtatatttaatttctatacttacaacttttaccaaaaaactgcctctaaatatcaatttcgaacctgcgggtattatcacaccctttaacttccatttttataaaattggttgaaaaaaaacctctaaaggcccatattatagtactgattataaaatcactaatagttttatggaagaatattaaatattttagttgaaagagttcacttacatctgcaaatcacttagaaatatccattttcaaaagaggctgagtttgaaaagttgatgaagtgatacttgaatttttttattttttttttttttttttttgagaattttcttaagcaaaatattttaacatttctcatttagggaagcaaattttgtgctggtgtccttttacaaataattgtagaatgtagatgatagatattgcttgttacttagctttttaaaaatgctctggacagctttgtgtataacaatttaattagtaactctcaagaaatgtattttttgagatgaattttagactgtcattgaatcataaaaattaggttcaaaattcttggtgctcttctttacttttggtttaagttgtctttagctttattcttgtgtttattaaactgttttgtactttgatttgtttatatgtgttggaagtttgagattaaggttgaattgatttccaacaggttagttaatggtaagttatgctcttttatcagctgatatccattctttttactagtgaatactattaatattttctagaatactgatctcatactaattctagccttcatatatatgtcactcatgtaagtggatataaatattactgttgtgcaaattaatataaaattgaagaaagaacttaatttctttttcagcatatttattctgagattcatattgtatgtattactttcatttgttttagcaaaatttattacttttagttgagatggttttgacctttatttcttttttttttttctcttcattgtattagcagtttcttttatgtgtataatttatttattttttatataaaaaaaaaatatattgtaaatattatataattgttataatttttacctgtagctctaagaataatgagacttttgaaactttataattactccaatatgaattgatttccttcttgcatttttacaaatgacaaattacacaaagtttagtaatttttcattctttagtttccgtagcattaatttttatcttaaactcttgtcatcttctttttaaattacaacaattaatttaaaatataacattccacaacacattgatctttatatactctggctatctcttttttaattagaattgttaactatttcctttactgtcattgtaaataatttaatttttttaattgctagaatggtgggttattttgtttgaccaactgttttagacttttaaattttgtttgtttttttttttttttaaaaaaaaaaaaaaacacaagaaaatacatattgaaatgggcagtcatgagtgaatgcagcactatacgtacagacaggaggcataggcgggctaggcccgtacctagggcccacacttttcgggagcccaaaataaaaaaataaaaaaaattattaggtttttatttaagtaaaatttaagtgtattataagtaataaatatctattgcttagttggttgaggtggatggaataatgtctaaggttgggtttaaatcccataacactcttcttttataattttttttatatatttttgagggccccaaaatttaattcgtcttggacccatatattttcagggccggccctgcgtacagaggttagagattgtattgtactgtagtattaattactaaagtattatgagatctattactttcaattcaaggttgtatttgtatctataaatgtgtgattctaatgtgttgtttatacatatttggcatgatttagctacatgtatttagatagttatagaaagtatgttggttcctctttattcattcttttgaattgagctaaactaagcaaaatgcttatttttgtttatagctgaattttaagaaatgatgttctctagtttttgcttaattattgtcattgtataggataatggctcgtttaactataagagaaagataatttttgagaaaaaagaagatcacggctcttttaatgcattggatgaatgtgtgttgcatgtagtgcaatggtttttcaaataatatgggaaaaaattattgaacatagtattgaatcaagctctttgggaaaacaattatgcatacttgatatttttgtcaataggcaaattgtacattaattaaatagcttatgagagtgatgtcatttgttttgatcaacttaggatgaataggaaaacatttagaattttatgcataatgcttgaaactagggtgcgttaaaagcatctaaatatttacaattagatgaacaagtagctatgtttttacatgtaattgctcatccatgtgaaaaatagagtcattagattttgatttatgagattgagtgagacaattagcaaatattttcataatgtgttacatttaatcatttggctacatggagaattattgaaaagacctaaacttgttcttgaaaatttaacagacgagaggtaaaaacggttcaaggtatatatatatatatatttcttgaatttcttgaattaaaatagtttaggtagaaatggtttatttgtttgtaatactaataaaaaaaaactttgtttatgtagaattgcttaggagcactagatggaactcataatagagtgagagtacttatggatgataaaccaaaatatcgtactcaaaaaagtaaaatagctacaaatgtcttaggtgtatgctccaaagacatgaaattcatatatgtgttaccttgttgggaagactttgcagtagatggtagagttttatgtgatgccataaaacaaatagtttttgtgttccaaatggtaaggttggtgttttagattgtatattttttatttttgagtagtagctcatttaggagacaacttaatccccatctttattttattttaggttattattaccttgcagatgctagatatactaattgtaagagatttcttgcttcataccgaggccaacgttatcacctcaactattgggaagatgggaatcctcctaaaaatccacaagaatattttaatatgaagcattcatctgctaggaatgtcattgagagatgttttggtccaattaagaatcgatgggcaattcttaggagttcgtcattctatccaataaagactcaaaatcgaatcattttggcatgttgtttgcttcacaattttataagaagaaaaataccaactgataattatatgctttcagagaatgagattgatagtggagatgaagaagatgttgatggatccataagaagtattgaagcttctgaagagtagacaatgtttagaaacaatttagcacatgaaatgtatagcgaatggaggaaacataggagagcaagctagtttttttttttcttagataaaatgcacaatgtttatctaagtttttatatttgtattcacttagctatggaattcatttgactacttgtgtaattgacaaaattaaaatttaactttcaatttatgttttattattggtgtatatatcaatttagttttgttttttttactgttgattgtctttatttttcatttaagttcaacattttagctttagtttttagttttacattactgtgattccttatttcggcatgaagactttaaaaggaagaggtctaggataaaataaaagattttggagtgaagataaagaaaaacactttattaaagcactaatggagctgactaataaaaggaagtttaaagttgaaggaaacttcaagccatatcatcttagagctctcaagatgaaactaaaggagagaatgcctggatatgacatacaagttaagccacacactttgaagactcattttcaagtagtacatgaaatgttaactaggccattttgtggtgggtttggatgggacagtaacagaaaaactgtaactgcagaaaaatcagtgtgggaagcatatttacaagtacttatatatgatatattatatgaagtttttatattctagttctttcttaatcatgcatcatcatttattactacaacaatttctccttaaaatattattggtttatattggtatgatgacttgtgtgcagtttttggtaaagatcgtgcaactaaaaaacatgtagagactataagagatgttgttgaagaacttgatgttagaatatattttaccaggatctagattcactaacaagtatgtttattaacacccta

SEQ ID NO: 24724 - DNA, 2724 bp, Cannabis sativa
  modified_base (1308)..(1315): a, c, t, g, unknown or other
cgttttagaagttcaatattaggttgttaaatcaaaatacttgtgagtagatctaagatcctggataaatataattccaacactactgccacccctagttcaattcccagatgaattgatcgtaaaactcactgcctattcgtttggaatagtgatggtgttagatcgcgggttctagagaaccactgttgaccttgaaatcgcttgaggaactattcaaagaaccttcaaaagaagaattaactatctagactggacgatgttctttgcagagaagactgagcaagtcttcatatattcagttatcacctccctcaaagtagtgtgggttcatctgtgtaaaaaagaaaagggaggtaagaaaccggatgaaataaaaagacatagataaagcacaggtcaactgacctaaacctaagggtgtttgctagacagccctaatgtacaaaactgttaataggcaaagtataagatttaggtgcaaaaaaattaattagacattgagttttaggccactaattgcctgagatagattctacctaacatatgtcgtacagagttcctataagaatcaagtactagataaaggtgaaatgggctcgagaagtcatacagagtctttacaaagactaagtactggcaagaaccggtcaaactcgtgacaccaaactgcatgccatgaaccggccaagttttggggtacaaaaccatgaaccgactaggttttgggtacaaaaccatgaaccggtcaagttttgggtacaaaaccatgaaccgactaggttttgggttcaaagacatgaacttgctaggtttttagggccagagtcacaaactgatcagggtcccaaattaagttacgaatctgtgtgccagccagaagctcaagagatttaaaattctatttttctaaaaatattcttcgtgttcttcgtgactcaaagattcaagaatccaaatggagtccaaaatccaatccattttatcaaaatacattatatattctaaaactatcaagtgaattataataatatgaaaaggactacattacaacatgagaattaaaaatttcaaaaagcttaaaaaggcttaaagtcatcaatggaagattcaagaaatcaatgagaaatttgaatttgaaggcttacccactgatgatgacggctttagatatttagagaatgatcagatcgtcgaaaaatattcaaaaacctcaaggaatagaggagcttaagccgtcgggcttgaggaggaaatggagagttttttctttcttttttcttacacacacacacacacagagagagnnnnnnnnagagagagagagagaggataaaggttaaattaagaaaattgaaccttatacaggtttcgaggtttttttcccccaaaaaaactaaatgggtagttatttttccacaaaaatagccatgtagaagagaagatcgaagaccaaaagttcaaaaatagggaatgtgtaaccattacacaaatccccataatgattggcaatagagtcattttttgtcataaagatgagtcatctaaagagtccaatatccaactaggcaacattgcccggtgaaggctttcatagtcaaggcaagaggtgaaaagtctctatatgtacagatgtccacatagggacttgaggggcaaatattatcccaatttttaccgacttgatgtggcatgtccacgaagacaaaactgaggccacgtggaatacaacctgccaataagtgaacaaagttaccttgcacgtcatatcaattgttgagggcactaaggtagtcaagcatggtcgagcaggagaaaatggctagccaggggtccttggccaaaccaaacctggccgaccaatgaagttccatgtgtcggccaggcccttaaagtagcgttggccagccagcacgtgcaaacaacatcaaaatgagtttaaatgaatggtggggtccacaatgaacattctgaatgattctcaagcttaattttagttatgggacagatccaacaacccataaagacaaggatattcccttaagatattagtctaatactttagggatttaattatccgttttgaaatttaaacaaaagataggaaaagttattttccctattttggagggatatttacctattttaattatggtattttgtaagccctacatcatataaagggaattaggcaagatgaaaggggacccgaactctaagtctcacacgccctatatctcctctctctcactaggcactttgtctattttttcacaaaatctcacttgttctgaatctgcaacactcagttctcactactataatattgagaaccaaagctagaaattacgaggtttaagcctgtaattttcttggtattatctcaagaatcaatccaactaaaacgggagtagttcattactcgctaatcaagggggtcaaactgctataaatctatgtgttacttttatcatttattactattatttacatgtggtgattatcagcaataaataaggctccgctgttagttaaccaaattctaagtcaatctggccaatcctaacctttcaaaccctacaaattctgccaatacctttaatcctgctaattctgttaacccagtgaatcctaatgatcaacccttgctgccatggacaaatctgttggaaatattttaccaggatttagatttactaccatgtatgttttattaacatccta

SEQ ID NO: 24725 - DNA, 3143 bp, Cannabis sativa
attgctgactaatgacttgcgaatggacaaagtttaagaattcattcaacaaggagaaagtagcggcgttcctagatcttactagttatggctttagttaaaagtatttgcaatgtaatccctaaattaaaatagacgttatgttatccattttccaacaatataatatcttcccaacatcccttgtgtagctacatcaacttagatgggattccaaactgacccatcatctagaacccgtagataatcatttgaagtatgctagtaaatctttttttgatctcaagagctcccatcatttaccctcccttctgccaaaaaaaaaagagctaccatcattttaacttttttatgctagtcttgttattgtgtacattattcttttgttttgttggtttttatgtttcatgggaaccttaccttgattttctgatcatttcctcaattcggaagtcaactatgaaaatttcacgattttatttgtcatgggattctctttttccaaaccccttccttcacaagttacaacccatttcctttggttgggacaggtttttttttttaaatcaatttagagaagtttcaaagttatctgatgttacagtcttcatgtaaatttgggtcttattactaaaacatttaagtcgaggaccatactgaaggaaatttatatgagacagctgctaacagaaatgtgctccaaacttattcttgtgaggatgatcacacttttcagctgtgttatctgataatgaatgtcaattttatgaagattttacattatatatttggattatttccaaagttttagtggcttatatgcttagtatctttatcttgattagaactttcgtgtagtttggagaaatgatgggcacataaatgttattttaagtattactgaggatttagagatggcaatgtctgcttttaatgagtgcattggtgaaagatcgagtgttctactaagtaatatatgtaatactgcaagtcttaggattttcataaatacttttgttaagcttggtgtgtggtgtcagtcggccattaaggataacctgcatcagtgtgagttaatataataggagcctctttttcttgctatgataaatagttacgacactttgtaagctgctgagttaaagtctttctaatttttgtcaaatctgtaatttgctttttcttaattgttacatatggtttttattcattttagttaggagcagaagaaaaaattatcagaggtctcaaatggagcaagctgcttgatcctgataagaaaggtcaatggtggtcgtctgtggatttggcttcagccagagacgatgttgaggaggttgccagcacaatagataaagagattctcgaagcgcaaaaaatgctacagcttgctgcggaacaaaggatgaacacagatggtagaaaggcaattttttgtataataatgagtggtgaggactacattgatgcatttgagaagcttttaaggttggacttaccaggaaagcaggtgtggctcttgttttattttcatcttttttctgtttctatttgtatatttatatatataaattcttccatcatatttcaatgttctcatgtgggttttgtaggaccgagagattatgcgggttcttgttgagtgttgtttacaagagaaggtgttcaacaagtattatgctgtactggccactaaattgtgtgagcatgacaaaaatcacaaattcaccttacaggtatttttttttaactcgccatgggattaagatggcatacgcttagaattatataagagatctaaaactaatttgctggtaaatggatgtgcaaagtgcttctttcttagctgtgctttactaaggcatactgaagaattgtattcccttgagaagaacttccataatttctaccttaatgtacatgacatacagatttcaaatacaactaatgatattatatatatgtcctatcattttgaatcactccaagatcatgagtgtttgcactatttatttaaattcattgctgatgtaaaagttttcagctattgactttttgtcattacaccttaggtattcatgtatataagctttgtctcttataatataacttgacttaataattttgccttaaattttgttacctctccacagttttgcctatgggatcactttaaacaggtggagtcgatggcgcttattagatcaaggaaccttgcaaaatttgtggtagagatggttgcctctttctccctctcccttgcagtattgaaggcggtagatttgaatgatatcacacttctaactcctaaaaggataatgcactttaggatgctttttgaggccatgtttgagtatccggataagctcgtatggaacatatgcacgagagtggctgttgcaccagaccttgaaaatcttcgtcaaggaattgaatactttgttaaggagtatcttgtgaaatccaacagagctactagtgagaagtttaaggttatgagaaaagcgctaaacaatgtagaaggaattctcatgtgaaattcctaacacttgtctaatagcaataccaattttgtagttcaattttaggttttaaatctttcgtagttgattctacgggttcgtttattatctttattgctgtaaagactgagcaaaaggtttgataaagaagcatcattttctcttttttctctcttcttttatcttatgatacaaatagtaataacaaattaattgtagaaaattacactaccattgtatttttgttaaaattggtgaaaagaaatcttggctcactaattaccaatatatatgagattttacattcggaatttatacagaaaccccacaagcgatcccataaaaataacaaaaccattccattcaaaacaaaggctccatccatgtctgaccgctttactccaaccaacttctctgctatcagaaaccttcatcttcaatcaagaatacaacaaatagtcaaaatcacaatctctagtgattgtgcattcgtacccgtggaacattttttttcttcttctcctatgcctccggatctctatctatttacacaacttttgccatgtttactctaaatctccatctattactatcgtttaccaaatttactaaatattttat

SEQ ID NO: 24726 - DNA, 3599 bp, Cannabis sativa
atctgagtagtattatctctcggtatcaatacaacgagaaagggaggaggtcattacctgccaactaagggggtcgaacctcataaaatcttgtgtttatttactttattgttcttattgtgtaacacgtggcaagcatcaacattatatacgactcctttgtcggttggccaaatctaaggtcaacagtttggtgcttttattgagagcaagttgatttagttgattaaatgtcatggttaacacaaggagaactctagctacaacctctgcctcatcgggtctcccttaagaccctttgactacagatcctgatgttcatgctccagtcacaattggaattttcatgaacactacagatgtggaaaatcctaccgtctcagtaggcaccataaatctagccactacagttttccaggttgacacaaacatctctgtggatctgaataatatgcacttgccttaaagggaagacactccacttgcacctcccattgaaggaaggacacacagggagtaaccccctggcacaacaactggacctgttccccgatactatgctagagaaacagggctaggaattggcaagccttctattggcgagccccatttagacttgggagaagatctcaagttagtctgacttagagaggtcgtgtgccaagccaaccaaactgaagaatcattcattgttgagtctgatgtatttgctcaatagagacacaaatttctaagattgatggatgaccaagggtacatcctctaatcttaccaggcacaactagattgccacaacagagaagtcaatgacctaatacgacagttcaatgaaagagctaccagaagaggccaggatctcatcatagatccactccaaggaaggctagttgatagatcggggagggtctatcaacaaactttccaaccaggttcttcaagaacaaggatagactttcccttactagatggaggatagaacttgccacaaaggtctaatggcaaaaagagccaaatctcgaaaataagtagtctgggggtcgaccagtgatctgaggctcaacaacttccctattggccagccctctagtagtacacctctggcaggccagggaagtgaaatcccttcctgaggcatctgggagcaagtaacccaaaggctaatcatcaaccggctagggcttggaacgggtagaaacacccaaaataataatttgagaagtgagtttaatcacttctagtttttggatccacctaattctagcaattggtgcgatctacccctattagcatagtggctaccctagccaatcaaggaagaatgggcagccaagccctacccaacatagggttgggcagccatgaacagttgcccagtataggctaggcaggcaaggaccaatctccccacctaggagtggccgatcaaggctagcaactaagctcacagctgaccggcctccaccatacagtctcctaatgtatggctggctagaccttgacacattcaagtttacaacctgtccaaggagggccagtcagccaagtccttgcagcaacaaatccttctgtgcaagcacaattggactaaataagggacataatcaagggcctaactggtccaaaacctagaacttgacagatcaaggggatcaccattcttggcatacaaaaatgtgttgcgcttgcccaagttcaagatgtgggtatgaaagatgtataccgggtgagaagacccacttgcacacattaagtattttatgatgcaactcgatctccaaaaaaatattacaggtgatgtgtagtgttgcatatttatgaaaactttgttagaaatagctcaatagtgatacttaaagcttgccgtaggattcaattctcggaactagttttcttgagaattctacacacaattctcgtcctcaaggcttataccatcatagctagaagaccttatcgaagtcaaataatgacaaagagaacctttaacagattacatccaaaggttcatggccgacgccctcaaggtcaaaggcgttatagaagaaggccggtatacggccatactggggggcatccttccactgagtgacttctggaaagatatccaaaggatcttaaccaaaaacatgaaggagttgctcgatagagtttatagctttatcaagttggaggaagctctttgataagccaagacagggaaagtcgacaattggcaatctcaatgcaccttgtagccccatgattttctaggtgtgcagacttgcacaacaactctgcccaaacctctagtggaaagaacgttgggggcaagtgcaacaacaaaagctctggaagaaatagtggcaaaaaggggaggtacaacacttctcctataccatgaagccaaaaagaaaaagaggagaagtttacctatttcaccttcctaatagagaaacctgaggccatcatcatggtcactcagggaacaatcccatacaagaagccctctcccatcaaaagggagttgagcaaaaaagacatgtcaaagttctgtcggtttgaccatgaaaccaacaagtgtcaaaatttaaagagggagattgaattccttataaggaagaaccatccccgtctaggcacaaggttcctaaaatggagacctaatgtcacctctagtggcgggtcacttagggatcattatcggggaaccccatattgtaggcgagactagcaaagctaggaagcactacgctcagacactccatcacaagtccaaaagcgacatcctggctatcggagaaaggggttttataagcaaccaaaacttgtaggcccacgatctctttcatagaaggagatgttgctacatatatctaaaatcggtgagcttctggacttataatcctaaactagattcaagctggtattggcacaaattatgtcatctgaggaagaaatttttgagaactgagattcttaaagcaggtacaactcgccagtttaagactaactggttatacaatagtagtttggtccaaaactaagtcaattatcacaaagctctttggagttcattacttgtgcctaaacacagatttatcttatggaaagtaacgaactcccaccttctcacaagggacaagttgagttggtttcacatcgagctgagatcttttttgtgccagtgtgtgaggctgatgtagagactcatgaacacattttttttcaattgtgtcatctatcaaaaagtcctagttctggtttttagttggatgggatacagaggctggcctcttgagttttctggttggtcaggttgggttgtagcgaaagggcaagatccaatccaaaggttcaacaccattatcttggtagcggtgcgataaaacctttgtttcaataaaaatagatgtattttcaatggtaactcaaagtcaatttttgggatggtacgtaaataatgtaaacaacattataaagtatagattacaagttacaatagaaagatgtatattcaagagagtaactatttgcttagattacaaaagagtgtttgttagtgtttgtatttgctttttggattaatgaagtcattttttcttgataataataataataat

SEQ ID NO: 24727 - DNA, 4215 bp, Cannabis sativa
aggaaagctagaacaggagacaggttcaacaagaagtacaagcctagatttacaacatactctattctcttagccccaagagaagaaatatttctgacgactcagtaaacagtgtcgtactgcaagcctctttccttcaaagagtcagggaagagagacatgaacaagttctgttgctacaaaataattacagtcatgacactaatgagtgtaattagttgctacaaagaatcagggaagagagacacgaacaagttctgttgctacaaaaataattacagtcatgacactaatgagtgtaattagttgctacaaagagtcagggaagagagacacgaacaagttctgttgctagaaaaataattacagtcgtgacactaatgagtgtaattagttgcaggatgagatagaattttttattcaacaaaaacatgctgcttccagcggtatgtgagatcagaggtgccaataggaggcaatgttcctcttcagcatgaagcagtggcaggtcggcttgatatgctagttggaggtccacaccttttccggtaattcaagaagagcacgacagaggtacgctagatctttgcaagatgagtaaagatcaaagatgttagaggttgtggagaggcctctaaaatctctacgctttgagtgtgatccaatcacatttggagaattcaactcagaccatgtctggtacgctcacaacacgatcctctcattgttgaggcccaataaccaacatgatggtttctagagtaatgattgaagatagaacatcatcaaacatctggttcaaccaaaccctggagcgaatgggtttgtccttaaaagaccttgagccatgcgaccaactcatgtatggctttagtggggatggaatttctccttgtgatcaagctaccactaactgtcagcactgccctgaggcagaataccattatggcgactttcatagtggtcaccaccaagtctccgtacaacatggtgatcagaaggccaacattatatgacctccaagccatctcgttgatctaccatctgtctgtcgaattcctgacacaaccgacattggtcacctcttcagtaaccaaagagctgctcaaaagtgatacaacacctcattgatgctcgcaaagaaggcctcctcagttgttccaatagctagggggacgactaagacccctcccgctatgtttggagagacactgaagacctctaaagttatgaccaatgagatgatgcagactgtacccaagactacatgaaggtacgaccaagacaaggatgacattgatcctcgtttagaggatattaacttgggagttggttcgaccgaggaacttagagaaattacccttacaacagcagacccaacaaaagttttcaagattggaataaactttgcagaggccttaagtgagtcacttagggcttgcctcaagaaaaatgaggacatcttttcttggtcacatgtgaatatgatcggaatcaaccctaatgtcatttgtcatgtcctcaacattgacaaagaaaactttaagcatgtacaacaaaagtgcaggctccttgacaaagatcgttccgaagctctctaaggaagaagttgaaaggttgtgggaaaataactttattagagaagctttttacctgttctgggtatccaaccctattaggacccctaccaacgttaagctaattgactccatttcattggagacgcctgaaccttgcatccttatgttttcttgtcaaatcattttcaaaaagagtcgccaaagaggttgtacatttatctatgttgacttaaaatttggtcaactgactgcagagccttattaattgttgattatcaccacgtgtaaataagaattataaatagtaaaagtgaaacagagatttatagaggtttgaccccccttatttagttggtaatcccccttttgttgtattcactcttgagatgataccatggagatcataggttaaaaccttgtgatttctagctatagctcttttcagcattataattgtgagaacaatatgttacagatcaagaactgataagttcctatgaataactaatgaaggaaaaagaggttttgagtctaggaagccttgatggcatataagacttaaaggaagagaggtatcacacgtgtgggaagcttcatggagcatgagagaagacttgtaaagaccctttagtgcttgtggaatgacctagccttgagagaatgatctaataccgtttacatagtatagggtttacaaaaaagatcctaatttaaatagataaagatatccctttaaaatagtgatattaacatctttttttttttgggaaatcagcagtgtttttcgttactccaataaaacatttacaacttaaacatcacctatttaagaaggcctaaagttaactaatacgatttttttctatgtttaactgtatttataatgcattataccattctaaatctcctatttaaacttttgtaggccacacactatgaattctatttttacaggaaattttcactttctgtacaatggttgtcggattgtcatgagattgctgccaaaatctttcatttctagccctccatatttgatacactaatgctgttaggactgccgagaaaaccttcttttgaaatattgttgcttttttccattcaatatgtcgtaccaaatcagccaatcggttagcagaggtcttccaccccatccatattttacctgcttaatacaatcactagataatgggcattcaaagaattaatgctcacttgttttgtctcccatattacacatcaaaaaggatgcatcagatgcaattttaaattgatacatcctttcctttgtcttcaatctattttagatagcaacgcacatcacaaagctatgttttggggtatttaatctaccccacacttccttactccactttactcggccagatataggacatagtcgtttgtatccctctgttattttgtatttgttctgaataaaataggaaggattcattattattagaagaatacctttcattgcaactatcttcctccagtaccagctgccttgttggggggctgagtaactccaccaatctgcctctttgatatgtacactatgtatccacttgacccatagattttcttctttagttgcaatagcccatacatatttgaacatagccactttattccattcggctactctcttaaagccaatgcctccaactaatttcgcttgacaaatgttttcccaagctatttgccctgcttccgtcatcatgtgttgccccttccataaaaaatctttgcatatagtctcaatttcttttatgatctttttaggaaggagcataatttgactccaataagtatatgtggtgagaagaactgagttaacaagtatagttctgcctgcaaaagatacgcgcttggtactccatggtgttattctatgagtcgttttatccaccaatatgctggattcctttgatgagattctattagggctgattggaatacccagataagaaaagggtacttcacctctctaaaatcccgatgcatcaaggatgcactgcacctctgtgcttaacattccactgcaatagatggtcaacttgatggaattaagctgcaaaccataggtttaagagaataacttgagtccttgtaagagatagtagatgcttttattgcagaaaagtagctcatcatttgcaaaaatgaggtgatttatctttaaatctttgcatttatcatgaaaaatgaagtctgacttctgcccgattttcctcatacatccctctttgttgcaaaatatccatgaagtgatccattaatcatgagggaaaatctgggtgaacggatgcatatcataatgagatgtatagattgctcaagaaaatgcaatccatgcaacatttcttcaataaagctcatttaaattgtatcataagcattttacaaatccaatttgattatgaaactagcttttgacatcttcctcccatagtgacgaacaagatcttggcatatcattatattatgagcaatattttaccaggatctagattcactaacaagtatttgaaattttgaattaacatcctaaatatgaattccctaaaacaatgaaaataaacacataagggtttaaaaaaaccttacattgattgcagcagaatataat

SEQ ID NO: 24728 - DNA, 3732 bp, Cannabis sativa
  modified_base (2184)..(2184): a, c, t, g, unknown or other
ttctttttctatgcacgatcatattcatgatcttgctgtgtatgtatctggtcagagttttttatcatatgatagttgcaaaaaagacttgcacaagctaaatagcaagactcaccatctatcttacaaggatttcttgaatacaaaagaaattgactttactgaagtgaacaatttgcgcagcctgattgcattaccattacagtcaaggccattttcattacttgaaacatttgtgcaagaaattgtgttatggaatggaggactaagagctctttcttttgttggagagcatattgattcgattagaaatttaaagcatttgaggtacttggatgcatcacacattaaagtcaaagagttacctgcttctatttgtgggttgcataatttggaaacactgttgttgagtagttgcagaatgctcacccagttgcctgattcgattggaaatttaaaatatctcaggtacttagatgtatcttacacaaaagtcaaaaagttacctgattctttgtgtctgctgtataatctggaaacactcttgttggaatcttgcaaacaactcactttgttgcctaccaaaatatgtgagctaatcaaccttcgccatcttaatatcaccgggtcgtcactaaaagagatgccgccgaggatttgcaacatgaaaaatcttcaaaagttaagtgattttattttggataaaaatgacgggtccaggatcaaagagttgggtaagttggataatctccatggaggcttgcgtatttcagggcttgagcatgttagagaagtgagtgatgttttggaagtcaacttaaagaacaaagagtatctcacagagcttagattggaatggaaaggtgaggcaaatgattctattagggacagagaaatacttactgcactccaaccacatacaaatttgaagagcctcgagatagtctgttatgaaggtacgaaattgccggagtgggtagtagatccactgtactctaatttggaagtagtttctctggacggccaaaattgttgtttgtctttactgtcatttcagcacctgagttcattgaaaaagcttgatatttgggacgcaatccatatacctaatgaactttgtaataattgttcgcataattcatttccagttttagaagagatgggtctcaaaaggataactgcattagattggtcgtctatcaatacaaattatcaaaatggtgacatttttccctgtttgaagaaatttgttctagttggatgtgggaagctaaatgtgtcattacctatgggtaatttttcatctttggaagtgatcgagattagagattgtggtgaattgatgactgtatttccatcctgtactgatattgatgttgcatatccctccctcagaaaattggaaatagatatgtgttcaaggttggagtcagtttcagaaatgggattactgcctgtttctttggaaagtctacatattgattccagagggaaacaggagaagattgggccaacattcaacacataaattacatacgtatagatgatcaggtaagttttcaaaagtggtatactcgtggtaattgaaagtctttattctttttagttgtacttagttttccctaagattttctctcatgttcctgtctttttttctttacaaaaaatgtacaaatttattttccaagacataggaatctcttttattcaccagctaaattttctttctcagccctaccaactatacttactacaaattttgtatttcaatttatatcacctaacatacgaatataatatcaaatgtaaaaatactttcattgaaaagatactctgcaatgaaactatagaattggtataatgtgatataatgtttctttttaattttcctctctcttgtagtatgttaaaggggtgttgactgaggatcggttggctcaggagcggttgatttaggagctgattgcgtcatttgagaaggatttgtgtgacttttgatggtgctggtgttgatgtctttggccttgtttcgtgctgctccttcggttactatcttgttatctgatactgttggatgtttgttgacaagttggaatgtaattaccatgaagactgcatatctgatactgcatatctgtaaaagttgagtactatttgtagttcttttttggtttctggtttgtntgtggatttcctttgtttttgttatgtgggatttgttaccacggtattcttccgctacaagtgaagttattcaataaattggggaagaggtcactcatggacatgtgatcatcttctcttcttcttttactgtacgtgagttgttcttaattataatatgatcttcttctatacttggtagtctaattactctgctcacttacaaattttagtttagagtgagtaatctgttatgttttgagtgatctattatgtacatctgcttaacttgttctaaggtatgtttgtgtagaattaagaaagcttaaaaaggcaacgtggatgttttagactggtgagttttgaatttattgttagcattgttctgatctggattgaacaagaaatacagacagtcttatccgaaatcgaaaagaggttagaaattcttgcaatatcaacatattgatgatgatgatgatgatgttgttgttaggccttgggaaactagttttgagtatttgcatcaatctaatactaatttcgtactgatttggtatattattggtgctgttttggctactgttttattgttttggtgagcttggattacttggttcttatcagatgtatgtgctgaaagttctcttgttattatgtagagaatgacatatggctaagctatggtatcatggatgagatggttgttgaggtaaaacatgtgcatttgatttagtgaaggtggaatcgatgtcatttcgtgttcaactgaatgagaagcatgtttttctatgcagggtttgatgaaaccagagacaaactagagtctgatgttgatgcatattgcaattcatcctgaactgaattccttgtgctttgtttgtacaaattcagaacttgtgatttgtcctttccttattatatgttcaatgatgtgatgtgaatcagagtattttatgatatcatttcacataggtgtcacatttaatctatatgcttcttaaacatgtaataataagtatacatataatattgtcaaaatgtaaagagattagagactagtaataaataaatagattatggactatgatttttcacaataaaaaacaaaaataaatttaaaagaagcaacttttgccggaaccaaagcaaaaccatgtggatagagcttttttcaaaaacattaagatttgaaaatagctaaaacgaaaaatataatatataattactccactaaaagattcttagcataattaaaaatatctcttcttgttgaaatctgtatctgaaaaaggaaaaggagagtgaacttcattcactgcaatcaaacaacttccttccttaaccatatatccctgcatattcatctcttgtatttttcttgagaaagaggaatcatggctggcttaatggttggaggagctcttctttctggtttcatcaatgtcctctttgataggcttgcttccaaagacgtccttcacttctttcaaggagacaagctcaatcaaaagctgctcaaaaagttgaagactatgttgctttcggctaatgcgctgctgaatgatg

SEQ ID NO: 24729 - DNA, 3593 bp, Cannabis sativa
tttgtaaacaaagaattaatcacatgatcaggtgactcaaatctccttccgaactgagcagccttttgaaccaataaacagaatgttttggaatcctggttagattgttcttgtaatccacataatagagcccgaatcggactgtgtatcccaagttccactcccagttgtcaagtagtgaccaaacaaagtatcctcgaatatcacaatcatcttgcctgttataaattcagtttaagcataagaaatgttaaatagtaagctatggactgagagtagttggatttgtcatgatcaccttatagcagcagataagtttgaaagataatctctgtgaaatgtgatcctcttttcatctttcaatgccttgtctattgaaatgaaatgtttatttggatcatccatacctgttatgaattttaacattatggggttcttataaagagatttatagaataagagttggacatgctaaaagaacttataaatcaaggacattgtaaagggttcatattagttgtggtttcaaaactttacttgtgaaagaattagtggagaaaaacttaatgaagattataacttataaacctagtttaaatgttgtgttgaacttcctgaaactaaaactacttaccattctctgtgattatcactggagggtttccatacttgtctttcacatatcttgtcagcttccgaatcccccatggcactatgcgtaaccatcgtgaagcggcctaaaggaggaacaactcagcccactgagattaaaatctcttaagtgatgatcgatatctaatacttactcagtggttttgatcacatactttttctccaatagcaattccttttcggtatgctgaagcagaaaattttagtaacaatcagtactggtcatatagattatttctaaggtgtagggaatatgtaattggaacatgaacaacttacgcgttgttatgacagcaacatctgataaagcatcctgcaatatgaacttccggattctagccctatcatttcgagcatacaatgtggtgtagtgatttatgccaacaaaatctaatgatccaacaaggagttttgaggttgcttgtgaaatttttggtagcctctcccccacaaatttcttcattgaaggaggataatcaccaaggaggagtggatcaagaaacctgattcccacaattttgtaaagcttgataagtttttattacaccataatgtcgttaaatctttcaactttcaagaaaaaacttgaaaattaatggagttaagttataccatccaagtgcaaaatccattgcacgatttgctgcatcaatgtcctcttcagtgtctgataagggttcgtgccacttggcatccaagactattcctatttgacctccttgttccttctgtttgacagagttagatcaaagatagttaagataaagtttatatatttcttacttatgtcttcttcaaatgttagaaaaatcataccttgaaagttctttgataggtatgataagcagcagcatgagagagaaggatattgtgagccacaatgtaaggttcagtagatgaatttcccttcttacagaacaaatgaccaacaatagaacacctgccaggggcttgtatgcctaagtcatagctttgaattgaaaaaccatgtggctcattgaaggtaatccaatgctttaccctatctccaaaagcgtcgaaacaagtcacagcataatgctcaaagtcctttctgtaatggtagatcaaattaatcttaatgaccaatattatgaaaaatgacttcaaagggtttcctcatactcacacaatctgattgttcaaccacccttcatatctgtcctcaagcatctgtggtagatcccagtgataaagagtcacaaagggcttgattcctgattgaaatgaacacttaacctttcaatatatataaatatatattttgtaatatttttaagggaaaactgcatctaatactcaaaatattctcaattacttaacctttctcaagcaaagcatctataagactgttgtagtaacttattccctccgggttggattttccagttccatctgttgatttgatcttcaatagcatttgaaaaaagaaaaatagaaaagaaaaagaaaatgtaccatggaataatgttgtaagattaagtcttgcttacttggaaaaattcttgaccatgatattgaaaatctataagcatccattcctaaatctttcatcaatcctatgtcactctgtacatttcaaattttgatatctatgcagtcagtaagatagttaaaattaatatatatatatattgatctttatttcaataataattagaatgtcgggtaagtaagacatcatcatcatcacctaacagtacaataatgccattaaattttcatatccgtgagattctgggcccttaaaatattttgggcaaatggaaattagctccaattattctcgaacagaaaaagaaataatcaaatttcatgttattttattgctgaaacttcttttccacgcaacatttgacttttatgtaattataaaatatagaagtagagaaaatggaataatcagcttatgcttgtgacattaaaactcttatcatcctttttgaaaaatttactatacctcaaatctatgatattgatcaacagctgtgtttgcattactgaagtccaaaatttttcctgtaacaaacaattaacaaatcatcaaacactatatcttcatttaatgcttaaaaagacaattatgcattacttaaagctagctaacaattattattatttttattttttttaaagttctcacctggttgttttgtaaatgtatcccatatactaactcctttatttccctcattagcagctccctcaaactaccatattgaaacagacatcaaattcttgaactacaatactcttatataatcttattccagttccaatatgcttcctgaataaaaaaatagaaaaaaataagaaaagggtactacctggtaagctgaagaagcagttccaaaaatgaactcatctgggaaattagctctgctgagagattctatacttgtgaacaagaaacatgctatgatcagaaacagggtcaagcacaataggttcatggtgaattctacataaccatacaagatggtgagttgttaaggcaaaacaaatacagcaaatgtttcagttatcttagttgtaaagttaacgaattttgtagaagaagaaatggagcttgtattatattgaaaggtgttgaagttgagagggtgagttagtgaagaaaaggcaaaagggtctttgtttgcacgttatgaagactcaatttataggtgtttgctaagaaacatgacacaaagggaggaataaaaatagattgacacgtttaagaactaaaggcgtacaattccttttctttcaatctgactttgattatttttctaagtttcaacgcttgcggaagtatatttggcaagctaacatagagtaattaagttcagattttgatggtgacaaaataaaatcaaaattaaaatacatacaatgaattgataaaaaaaattattaaa

SEQ ID NO: 24730 - DNA, 946 bp, Cannabis sativa
atgttattttgacggtgaaggcgagcatcataattaagcaatagagagtgaatctcttcaatgaaatggaaggtttgataccacgagcttgaagaggagagataaaggcattgtactccagacccaatccatttgaacagataattaatcaaatggtcttgaagaaaaactggatcttcaatagaagcaagaacattacacattgatttgagtttttacaaatactgcatagctgacattccttcctttatgagattgttgagagaggttctatactttgatatttttgcaaaagatgtagttgtatatatttgttctaaaaaaacaaatctctaaagatgtgataacgatatatatgcaatgaaataaaaaatggatcaacttgaggtttgaggtggagaagatgatgaatagtgaggaagggaaaactatggttccatcaataaaccttcaagaccgttggctattatgaatattttgcatattcattccctgcaccaagtagttagaatcatctagcttcactcctatagtctggttcacgtaaggaaatcctgaagcaagaggtccgacaattgagaaagatatcggttgaagagaagaaacagctagctagggtcggttgtgtgtggtttgggtcatttgatttaggttgttttgattttgagggtttttgtgttgagtagggtcatcactggggttaggtgtttgaatccccccgattgtagtgtggacctactgttgattatgggagccataaagagtcttttggctctgataccatgaacctaaaagagaaaaagggacaaaaaaaataccaaaactaacattaataaatcactatttaacacttatacatattttaaatggttattcttattagggttgttcatccgattcaatccgtacttttttggtcaaacaacatccaatccgcactaagtgc

SEQ ID NO: 24731 - DNA, 2092 bp, Cannabis sativa
atggaaaatgacactcatcaaatagaacatctcgggagatatgcattcttccatctttagagaggcatttatagcctttgtgagacaagctatatcccaaaaaagtgcaaggtacagacctgtattgtagctttacacggttgtaaggtcataaatttgggtagcaaagacacccaaaaaccttcaaagacttgtaatctggtattactttgaacaagatcttaataggtgtgacgtgattgagtactggagttggcttccaattcataagaaacccagcatttcggtaagcttcatcccaaaaattcaagggtaaagaagcttgtgccatcaaggttagtcaactttctacaatatggcgatatttacgttcaaaaactccattctactcatgcgtatgaggacaagaaactctatgaacaatgccagaggacttagaaaagttgtgaaagcttgatactcacctccctaatccgattgtatagctttgatcttaaacccaagttgaagttccacttgagttttaaaattagtaaaagtgggaagagcttcacactttgttcttagtaagtaaatccaagtgtgtctggaataagcatcaacaaagctaatataatacttatatccatttgaagaggtgataggagcaggaccttgtaaatctgaatgtagcaactataaaggctcagtgaattcaattgaagaatgagaaaaaggtaacttttggtgtttgccaagacaacatgtagaacacaaatctgaaatatttttattactgaattcaacattacaagaagaaagaaccgacttgactattttattagcattaggatgtccaagtcgattatgccacaaattgaaaatagcattcggtacaatcatctctgagctcaaacatttcctctcaaatgaagtagtaccctgacttgagatttcagattgagagttaaagtgaagatcctcaatgtcaaacttatacaatccttgttcaagcttcccaacaagtaaagtcttcttggtatcctagtccttgacacaatagaaagaagggtgaaactcaaaaaagacaccattatcatttgcaaattgagagacacttaataagattttagttttgtcaggaacacgtagaagcttagataaaacaagagactgagaattaaatggtgaaatgaaagaagtttgaccaatatttaaaataggtaaacctgtttcattacccatgagtatcttctcttgtccattgcagattgactccatcaactgtgatgtggtgtgtggctcctgaatctaggtaccaagaggtatcattcacaacctttggtgaaacataaaaggcttgcatttgttacacaatttatgagcaattacgcaagtgtacgtaattatttgtagttttaaactcacacaggtgaggtcgattcacagggaattgttatcaagtaccacaaaaattagatttgcgtttctatttggcaaatcgattaaaaaaattgaagaattaaatgattagaaattaaaaagcaaggaaataataatgaagagtgtaattaattatggatgagtatttaggaatacgaatcctgttagtttagtttctcaattgctaatgttaattattaattctctccctcttagtgatgacagattatcaatttaaccctaactcttctcagatcattaaggtcctaaatcatatatcatctactcacatcgctgcagtaaattaatatataacttgcatcaaaatcagaatctacacatcacataagctatgtgaatactctcgttttacatcaacttatgcttgtcctattagagcaattttattattcacttctcagattttatattaggatcataagtcacatttaagatggtcagtctaaaatatgtaattaaaacaaataacaacaaatcacacgatcagggaagaaaactaataatcacattaactgaattacataaatatcatctaataatcatcatatccctaaattggcaatttagttcatattcatatccataataacactaaagcagaatttaacataaaagaaataaaaggagaagaaagaaactgatggtggaa

SEQ ID NO: 24732 - DNA, 3326 bp, Cannabis sativa
tgtcttcctcataaatagaatgccttctcctaccttacaccttctatcacccattgagattctattcaatgttaaacctggctataactccctaaaagtgtttggatgcttgtgctatcccaatttgagaccatacaacaaagtgaaaatgcagtatagagctcagccctgcacctttattggctatagcctctcccacaaaggctataaatgcctctccaaagaaggtcgtgtctacatctctgaagatgttctttttgatgaactaatttttccctatgccaatgaggctatgcagtcatccaccaccacttctctgtctactccaagtactactgcagttcctactgctatctcaccgcagagacaccctctcccatttcctccccctggcttcactcactttcccagatctcacaccactactgcctgtccaacaaatcatgtgcctatagctactgaaaccaatactatagcacctggtgtcgttgacactgccagtggtgctcataatattgccataactactaataatattgcccataatacttctgttgatcatttagctgctgagcatacaggtactaacaatatacaggtggaatccacttcaagtgcctctcaaatggctctcccaactgtcccaactgggccttcgaatactgctggtgtgactaaacatatccataacactgttaggcaccaactacagtcaacaagcatccaatgaaaataagagggaaatctggcattcgaaaaccaaaggttcttatggcatctctcactcctgcctctcttaaaagtgctctcaaagatgccaaatggtttgatgctatgtcagaagaaaacaatgctctcaagaagaacaaaacctactctcttgtcaatttacctcctaacagagagccgattggatgtaaatgagtgtttggagttaaagagaacaaagatgggtctgttgaaaggctaaaagctcgtcttgttgtgaaaggatttcatcaacaagttggttttgattttaatgaaaccttcagtccgatggttaagccagtcacaattcgggttgtcctcactattgccttatctaagggttgggatgtaagacaattggatgtcaataacgcttttctcaatggtgatcttcaagaagaaatttatatggtgcaacctccagggtttgttgaccatgaacatcccaacaaagtgtgcaagcttcacaaggccatttatggactcaaacaagctcctcgagcttggtttgaaaagttatcatctgtcctgctgaaccttgggttctcttctgctaaaacagatcattcccttttcactttatactgtcccaatagtgtcatttacattatcatctatgtagatgatatcctaatcactgggagtgattctaaccaagtcagcaatctcattcacgctctcagttcgaagtttgctctaaaagacttgggtataatggattttttttccttggcattcaaattgttcacacctcagatggcatcatcctatcccaacaaaaatatattcaagatctaatctgcaaggctgagttacaaggggtcaaaactcaaagttcacctatgaacagtgggctaagattgtctaattatggtagtgaaccggttcaatatgctacaacctacaggtctctggttggtgccttacaatatgctacgattacacggcctgatatagcttttagtgtgaacaaggtgtgcctgtttatgcagcagccattgcagtctcaccttgtggctgttaaacagatcctgaggtatctagcaggcactttagactacggtcttcaacttaaatgtccctcatccatgcactttgaagctttttgtgacgcggattgggctgctgatcctgacgatcgcagatcaaccacatgttactgcattttcctgggtggaaatttgatctactggccatcaaagaaacaagctacaatttctcgatcgtccacagaggctgagtatcgaagcttggctgctgtcgttgctgaactcaactggattcagtcgttactgactgaactacgtctgcctcaatctactccaccactgatttggtgtgataatctcagcaccgtgcatctctctgccaatcccgttctgcacgctcgcagtaagcacatcgagatcgacctgcactatgtaagggacaaggttctcaacaagcaaatctatgttcaacatgtccctgttgagcatcaacttgcagattctttaactaagccaatttccagctctcggttttctttgctaagggacaaacttggtgtggtttgctcaaccacactaagttagaagggggttgttaagggtcctaatgctaacggtagttagttaagtctgttaattcagttgctggggtttagttttggttgcaacaacttttctgttgctttctttaattggcacgtggtgcttttccctgtatataagaagttcatcttcttctttttcattcaatggaaaatgctctgttttcatttcactctttctctctcgttcaatttctttctgccttagacattaacatggtatcagagttgtaatctttcatggagaattcttctgcaatcaacaatggtggatcgtctgtaccatcacgttcgtttcaacagatcactttgcctaaaactaatcttgtttctttttctcattctctctctgttcgattggatttgttcaactatctcccttgccgccattaaaggaagtcgcttatagaagtatcttgaaccaaatcaagcaccaccgcagtatctcacagctgaagatcgagctacgaacaaaatcaatcctgaattcgaagattgggaacaacaagacaatatccttgtttcttggctcctttcatctatgtctgagaaagtgctcactaggatggttggatctgataccgctgctcagatttggatcaacctacgtgaacactatacatcccacaatcgagccaagatcaggcaatacaagaccttgcttcgcaacactaaaatgcagtcctcgttaaatgactatctgctcaaaatcaagaacataatttataccttggcgtcgataggtcatcctacttctgttcaggatcacattgaagctatcttcaatggtcttccatcggagtccaatgtgttcatcacctcagtgaactccagaactgaagcgtacaatgtagctgagatagaagccttactaatggctcaagaagttcaactcgataaagcagctaaagatcttgatgtttccaaaactgaagctaatctttcccacactaagtcccaaactggccaaggctctttcccttac

SEQ ID NO: 24733 - DNA, 5045 bp, Cannabis sativa
  modified_base (26)..(36): a, c, t, g, unknown or other
ggcccctgggctgggtgggccctagnnnnnnnnnnngcccgcctatgcccagggtcgggcctgttgataattacatactaaaatagtagaaaagtccccacaaaattaaataaatttagtaagaatgattataatagtataaatattttttttaatgataaataagccccaacaaaaatacatcgcaatactcaagaacagtccaaatatctttaacaatatttacacaatcatagtacaatccaattacagttaaatttcataagcacaaaatctcaaaatattacagcagaacaatacaattcaatacccaatccataatatattttatatctcaaatattatatatctaaaataaacaatattattgaataaataaaatatactaattttgttgggtagttcaaaccaatccaagagaggttttaatagctcgaaacaagcttgaaacctcgacaatagctactgcccaagctcgtcagagcttcactacgcactgtggttgtcagccattaatgaccatgcatgtagaaattgacgataggttttcaaagatctctcaaagtagatctcatttctaaaaatcgtttagctaaataaggattgaagtaaacaaattggagccatgttgttatggtcttccacacaataatcaattcactgattattgtgtcaagcgcaaaattgtcaaaagttttttagttgtgttttgaccacaagaaaatagataagtggaagctataaataagattctgaaaataacactatagaaaatgcttcaggcatgcaaagcacactaactaaaagaacttccaagggttctttgggcatacatacaacagaaagaatctcaacaggacacactccatatttaatggcctatggatgtgaagcagtgatcctagtcaaaaccatagtacctaatcacagaagagagacttacgatcctactcgaaatcatacattacttcaagaatctctagatctaattgaagatcttcgagagcagtcacaagtccaactcaatatgtatcatatctaaattgccaagcatttcaattccaaagtaaaaagtcgaaagtttgaacttggtgattttgttttgggaagagtatttccagcctctcaggagccaggagtggggttcattggaccaaactgggaaagggccacatcaaatacaagagaaagtatgtgatgaaacatatcaatggaaaagaaatttcaagagcatggaacgcggaccacttgagtcgatactatcagtaaacttggggtgtccaaatccttttattcttttgcattttcttttttctctttattttcatgtacacctcagggaatgaattaattaaataaaaacataagtagttttcattttaatttttagtttatcacaagtttttagtcttgtaacatgtgaccaagagtctagacttttaatcacttgaggggtaccatatcttatatacctctctaaaaattattgtaaaccacattaatattgagtatggaagtaaaaattatttcctcgaaccggagcttcagtgaattagaagtaagcaactctcttacaatattttttaaagttaataagtttgttaaatcaattcaggttgactaaaaaacaacaaaagaagtttaggcttcaaaaatgatagactcaggttaatcaaaacaaaagaagctcatgcttcaaatgttattaattcagattaattaaactcaaaatccaaagttacaggtctttggaattagaacttcaaggatttagaagtaagtaacacttactaaaacttttttaaaataaattatttaaattctaacgtccaagtcgttacaaccatgttcccagaaatttagaaaaacaaacaatttgttaaagaaaggttaaagtctaagtagaaaagtagaagtcctaaggttcaagccataggaaccagaacctctgggaatcaacttctcaatctttctaaaaaaacataagaatatcgatacattgcaccctctactccaaccactacttcagatcttcaaggcaactagtactcagataacaatgaatgaacatgtgataaactatctcatcagcagtttcatggatgcaacaatctttgtcttgactaatgttatacctaaatagcttctcttttgtatgtaatctattgaatacatccagtcaagcaattaaactatgtttgaaaatattcaacctactccaaataatctcatggaagcttaatctttcatgagaagagagtgaatctttgtatcactaagctatttgatataagtacctatcattagatgattgaagtgacattaactttggattttgttttacacatccataatttgttgccaataccagctgctataaattgaaacttcataactccaccaatctttatcacctaagtatacactatgatttcacttcactcacaaattattgcttggttaatggactagtcatttctcaatagcaacaatattccagtgaattattcttctaaattccaactatccttcacttttcgaattgcgaatcttatcccaagagacaagacctgcgccatcataatcagccacccctttctataagaaagcacaacacaccgcattcattttgtgaagtactttcttaaacataactatattatttgtgcctaatatgcatgaatggtgattagaatcgagttgattaacgttagtctcctagcataggagagatgtcaagtactccaaaccccaattctttgccctatcttctctgttctaatctcactttcagcaactggtaaccgcttggaactaatgggaattcctaagtactcaaatggtaaggcactttgtatgaaacctaattaaagaatctatcaatctttgaacttcttcatccttcatgccacaacaataagtggtcgatttagctgcacttggaaataaacctgaggtttgagaaaagggtttgagctgcccttgtagcataagaaacactgatttataatcaccaaaactaataataacacctcgtctggaaatcaaagatgatttagtttaatatcaacgtacattttatgaaacttaaactttttttttacacaatgcgggttcctaattatgaaagaaatatataatatcacttcatttcctaacaatatataggctaattatgtaattcctctattagttttgagggattgaaaacctcaagtaattttgagcagttagattagttgagaaactctaattttagtatccaaccgttggaatcaattactttttaagtaggggtaaatagtaaatagaaaatggaaaccagatgtgatttaagtcttttttgtactttctagaatataatactctaatttggtaaaagatagttttcttgaagaagctacattaaactgtttgaagctgaaggggaagggagaatcacatatatagagaaaatgttagaaaaaactgttaagagcagaagaaaaatgattaagttgagaggagagtaggtttgtagctgtaggatttttaccaatttaacatacaccaacaaaaacttactatcagtatccaaggtcaatttcgacatttccttcgtctaagtaaagtttagacaaaaggacaacaattttaaaccacacgacaccaaacccattgtcgtttaacccttagcttaaagacttctcaagaaaagtctagaagccttaactcacacacttagcctctctgatttgaaactagaaaccctagcagagcaagttcttcataagaacttgcttgatcctaagtagaaaccctaggatcttcacccacacgcacagatttgtttaatcaaatggaaaacaagagaaagggagagagaacaccagaattatttcagagttcacccaaaagttagggctacgtctctgtcaagctcatctcagagatctagcttgatatccactatcaaaaaaatggcaatttataatgttttggagcttcttgtcactgaaaacgatcaggtaagactcgattctttctttgtagaacttttcattttgttcttctctattttgttctcggcctaactcaattttctgcttttgtgcatgtactttcttcattctacctcctcaccacgagaacttgctttctcttctctggatcttggagcagaagtctcaaattagggtttattctttaactcttctcactttttctgttctctgtgtatttttgcctttgatttactgtttatatattatgttgaagtctattgatcaaagatctgggagatagttgcgaagaacaattctaactaactcctgattcttagtctagtagaggcaaagccacctaggattgagtctttttgtttttctattgtaaatgtgttgatatatgctgatgttgatattgtaactaagagactggttataagtggaatttacttaacagtagttatgtcgttatggacctcactgggagaagattgcctctttttatttcttgtagaaagagaagatcggccctttataaagcttgaatcttactagcttttagcctttttgctaaccttgcagaaaagcacaacattgattaacactgattaccttattcagatatgagggttcttagataccacttctattctttaggtggtgtgcgtgagcattgctattaggtatcaatggtgtctagcatcttctaaacatgtcattttgcgatgggctaacaatactccctaaaaattattacacataagaaggtactagtcactactggtgtcttgcatatttctcggtgtgtgttggacaatatatttataattggtttattatttatagttggttaggtaatttttgcaataaagctaagaacgtttaagtgtgcctgtctaaatgtaaatgtaaataattaaaataattattttattgccattgttttatttaaaggataattttacaaatacacaaaaacaacaaaaaaattacaagaatatgggttcatagaattttaaatatttttacaaatttattgattttatttacagaaaatac

SEQ ID NO: 24734 - DNA, 2295 bp, Cannabis sativa
tggtcatttgtgtgtgcgaatagggccattagagatggcggagggatggaggatcggaggcacttgggaatggaatcacattcacaactattttttttttgtaggaaagaagagagggcggctagggttttctcatgtatgtatgacatcaatattagggaggggagacaatagtgtttatttaggccttagggtttgaacttattttctttttctaaaaaccttattgggccggcccgggttaggttggttgggttacaatgtatgcagccccactacgaacccaatcaacacagcctaagaaagttttgacccatttaatttcggcccaagaaaaacaaggctgtttcggccaaaattcgggttgggtcggctggtttggtcggcccaacaggttaaatgctcacccctaataccaaatagaattatttaaagagaaaccataattataaaattacaaacattaaactaaataaaattacagcatctagtaaactaaaaccttaaataaataaataaaattccttcaatcctacacaagatgataaataatttcaacaaaattcttttttattcaggtttatatgatgaattttaaaaaacatattattttaccaataacaaagatatatgctaaatgaactatacaagtaaggtatccaacaaccttgttacagcaaataaaaattgatttaaaatttgaagacaaactcactgattactacaaaaatcaaccaacttgatttatcatatttatcatataaaataataataataaaaaaaataatagagaataataattatataatgcaatttacacttaccacctatggagttgacaataatacacatataaaataacattttatattaaaatacatgtaacatagtaacatatgtttccaaatatctaattgtagcttatatattttttttcagtattactaagataatatggatcacattattaaataaatatgagaaaaaatacaacctcatatcaattactagatttaacaaaaaaaaaaacttcatttaatccaaacacttctattaatttttcttcatggttacaaccaccactgaagaaagagtggactatatttataaaccaaccataaaagtgcttaattgtgccaccatcaatcagcttttgaagagagtgttttgaggaactagtttaaataggaatgaaatgctttgaactcgtatgtgaaacattgaaactcacaagtattaggccataaattgtcaaaattggatgataaattaaagaaaataatttataacttagttgccaataataatcgagtgcttaacttctaaccttcaatatcaagaagctcgtgattgtcattaacttaatcaaatattcattctaacattattaattcattttatcacaattcaaagtttcaatactcaacaagacgcaccaaaatgttcggaattaaatcaaacacaaaaagaaaaataaacaattttggagaactataaaaaaatttgggatatctttatacataatacattgtatagtacttattaagactgaaattacaaggcataaaatctaatgtaataaaaaatcacaaaacttcatcactattatcactcctattttttagttttttttttttctcttctgttgtacagttatttgcggatcaaaattgtaacctgatgcatgaaatggagtttgagttatagaaatatttgtgtttagtatatacatatatatatatatgttcatcgtattcgtttaacttgataaattaatgcttatgtcatcatggcattttagtatatgttcagcttgtattgatttcttctttagaaaccatttacgcttttaatcaatattcttgtagatattttttatttaggattttatatacattggaggcttattttgattgaagaatttttattttgtgaattttacaccttaaaacaaaatagagaaatttttataataggtcagtaaaagtttcaatcaaatttgagaaaagcaaagtgtataatattaacaatccctaataagtaacagcacaagttttgaaaatccactacttgagttttctatgattattacaagttctgaaaatccactatttgggtttgctatgattgttacaagtttcgaaagggaaatttgattttctatgcaccttttacacctaaatttgttccctaaactaaaacttataactattgaaaaaatgggtatactaatattttaaaactcaaaatgccccttatacacatctatccctcttctctcttcactctctttct

SEQ ID NO: 24735 - DNA, 2789 bp, Cannabis sativa
cgatattacacatagtaggagggggtgttagatagacaccactagtgccctttagcatttctccaaaatttaaaaagggcttttgatttgaacttttgagaggacaaaaatagatagaggaagtgacgtttgaggctacaatcattgataatcaaagagttttttttctacctttgattttatgttttcaattagttttatgcaattgtttagaaagattattatgaggagccaaactcttaattagggtttttattggatattatttgatatatttctatagtttaatgcaattataattttttttttcaatttcttatgtataattatttcattcgtgtttaatgtttatagttacttgatcaccaattatatgttttatatgatttcaatgtaaaatatgaaaattgagtattgattttgttacagtcaaatagacatagatctagatattagacgaaagtacctatatgttatgtgtagcaattaagatttctttgtttaatgcaaattatatgtgtaatttatcccataagcgtataggactttgccatatgatttagattctatatgtcctaataaggatatagattgaattaataatctcctactcataaaattagagagtaattagattgtagttttccatagaaagttgatgcaattgaaattatttatcctatatttctaattattgttaattgcatttttgtttatttattttctttttataaatcaattacaatcatcattcatattatttatttgccaattaaaaataaaaattcaattatttgctacttagttaccgttcttgtgggatcgatctcactcacgtgagtttattatagagattatttcttaaatatacaaaaacaacaataaatttataaaaatacggttgtacggaattttaaattacaatttttatgattttatttacagaaaatacaatctttttatgttgtactcttgttaatttatagtttatattttgttatctatatgtgttatttttgttactgtttttgtttttggatattatttttatgtagtttttttttgttatttttgtattttttctataaaaaacggtaaaattgtaaaaaaaaaattaaatgtaaaaatgtatttttttttttaaaaaaaaaataatgtttttatgcaattatctatttattatatattttatttgaagaatgaaattatatattttctaaacttattagattttatatactaaacatatatagttataccgatcataactatgctctatagatttctcttttcttctttttggtaaatataatagaaattagctcttgtcaataacattaatatctcaagttttttataatagttctttttgaaattcttgatctaaattaattagttcagttgcgtgcactactgtttgcatgtgagatgtgtggtagaaatcctaatttctggttatatcgctctaatttactcactactcactacttcaaggtcatgccgccttcctcaatatatattctgtgccattcgcttttaggcaaatattgccgtctctctattgatttgtatggtatgattcttgttgaatcataaaagtcaatactactactactactactatattactatttaaatacagaagctgctttttattacgcgttgacatttttctacttatataactctacccttttgaatacttacaagattaggtgaatattacatcaccaaaatatatatatatatatataaaaaagacccagttcaagaaaatcatgaaagggggcctaattacttagttcctagctagttatatatatatttagtatttcaattaataatgaaataatctcttcaggaaacacattaaatatatataatatctgttgctaaagaatgcatgcatgtcacatataataaaaagggaaaaattaattgaccgaatctcgtattatattagcagttcaacaaaacttgtctacattagagatgatacggtagatatatataaatgctacgaaacaggtagaagaaaacaaatcaatccagcttgcatgtacatacaaatactgatctctctctctctctctctctcttatttttttttctttcttttttaaagatgttttattgtgcaattgttttctttgtttatttaagatgaacttctatctctatgtaatattatttttcattcactaaatccatataagagcagtttaagaactttcctttgttcaggggtatttaggaactcagtttctcggacgtaagcaatacacccacccatataaagataagatttaattattacatatatgtggatatatatctcacttaatttggttttgacttcaattttttagcatatacgacaacgttatctcatcgtgtttcccatatatgcttctgtatatatagtcttttaagcccactcaataaaacaaaaagcagcccaaaaaatatgattcactttcataaacatgatttgttttatatatgtttaatttggtttggatattattgaaccaacaaacttcttcacagcatgttataataatagcatttcttatgtatatatatatatgcttaacgttttaaaaagagcaacctctaattaattgccatatcccacacgaccattaattagctgataaattatagtatgaaatatattttatttgagcgcattttctatgttattggtgtaatataattaaatagcgggttgtgtatataatttaaatttaaatatttatttgtgcatgagatttaatatgaattta

SEQ ID NO: 24736 - DNA, 2239 bp, Cannabis sativa
ataaacgtcgttgattagcaacgatctgtactgtacgtttaaaaatcacttaacacgcctagtctagttagggtgttacagtagggggtcaagcatgcaacaacatcctagcaaagttcctttcaaggagatgaggcttaggtttgtgctagcactttgatcatccttcctcgatcaaagtagcaaagctagctagctcaacattagacaggctttttttcctaaatttgtgataagagagctgctaggaatacagagggctcctagacgtgcttcttttttctcactccttgaaggaaacttgtctgtgtggtcaacaaaccaaggtgactgcaatagtatttcaaacaatgtcctcattcgaaggatcatgttgaaagcatattatttgtgccttttgtgagaaacaagttagacatgtaacaaacttcaagcagttcctccttccaggaaggggggttagaaatgtactagaatccaaatagtggcttctctccaaagaataaaggtgaaaactaaactggacatgcaatattcttcaagcaattcctccttccaggaaagagagttcaagatatatcgacgcccaagaaatgtttccaatgaacaatttgaaattttttaaagtaaagtacatgtgcaaaattaaatgcaaaaaagtacaaaattacagaatttatttcattaaactaagtgtaggtttttaaattaattttaaaataatctaatgaaaaataaatttcatttatttaaaaactagaaaacaaaccgcaattcgcgtgcggttgtatcttgtttagtttccaattaagttataaaagtatatcaaattttaaattttgatattttttttatatatttttttaataagagaaatgctaaagggtaccaatggtgcctagcaccgtcttatgtgtcaatatcgctattggttcaactaagtatcgagtcccacataatttaatataatagcttttagagagtatcgctagccaatcgcaacgcgacatgttgagaaggtgctaggcaccactggtgcctaatagcaatgctttaatagtaaatataaaagcatagcatgcaacataaattttgtatcatgctatattgtgatccaaatttaaaccacttttgattatgtgagatatttgtataataatttaggacactattgaagttaaattttgacaaagtaaattatattttatatttgcatcactgttccaattaaaattaccacctaaacaactaacatgtcctataatatttgtctatttgacacccttatttatctgtgttgtattattttatttatttccttaattgttttttttaattaaggaaactctttgtttccttgtattctctctcaaatgggaaacaacatttttttttttttttttctgataaactttgtgcaaaaatatacagaacacaccaattattatttttagtggaagaaagttagacttttcatttttcctaaagtaattaaataaatttaagggttttttttcttttctatttttacactttaaaatagttttttttttattattatttttacgaaattctacatagaaatccatattgtaactaacagagtaacccaaatcgcaattaaaaatcatatagcaacccataaaaatccaaaatataaatttggaaaaaaaatttaaaaatagtatataaggtaattttcctaaatttaatacatgaagaactcgtaaataatttaaatttgttatttcataaactttggtctgtaattatattcaaatcattttgcatttaagatatttctattagaatttgcaacatatcatctttgttctgcttaattcagtaatcatgctatgcttccgtttcgtatttattttttcttttagagtaatttacgatataaatatttaaatttaattttcagttataaatacacataattttaattttttgcggtaataatacctaaattataattttagagcttttgtaggtacatgactgttaagtgttaagtaaattgccacgtgacaatccctgattggtccaaattattaaattttttatttttttaaaaaatagtttaaatataccaataaaaaaatgacatgtagataatgactaaatatttaacggtcggatacctatagagtttcaaaaaatataacttaagtattactaccgccaaaaattaaacttagatatttatttataaccaaaaattaaacttaagtat

SEQ ID NO: 24737 - DNA, 2434 bp, Cannabis sativa
  modified_base (1539)..(1552): a, c, t, g, unknown or other
aaaaaaaaaaaaatatatattgatatattagaggctagaagtggataattttaaggtaacattttataagtagttaatttttttaataaagctaataattttctatagtagttaatattaaattaaaatatgcggaacatgaatttaaaattacattaatagttatatgaaatatcttgatggttttaggcattggtggtaccgttaaatatttttcttaaacacgaaaaataccctatatatgccaaacacaattacaggtgtcctacttaatgtagttaaatattgtgtttcccataatttaatataataattattataaaagtactactaaccatatccctattaataaatatgttttttcttttttctttttaatatgaatagagatgaaaatcatcatttttgagtatatatatagtaccttaactatatttgaggacaattaataatgggcattgttttaagaacatgaatgtatagttattaggttagtaaaatgaaaatgaataggtttgactaaagagggttaagtctcgatgccgaccacaaccaaataacaacacggtgaataatcccatgactcgatcggtgaagatgggtccacaaaatatatgaaaattgatcaaaatggctctaatgagtctcaccctaatattatggtcattgaacatgatgtgttaggtcagagagtggctccacttgatcatgaccacacaccacctctcttttcaatttgtggatgctaatatagaaatgggtccctttgcatttttattttttatttttttaggactttgaaaataacttcttcaacatatatatatatatatatatatatattataatcatctcttttgctaatttggtatatttattttgattgttatatttttgtttgggtgatatgacaagatccaatgcacaaataatagtcacttttgcaccccaccaaaaaaacacacacacacacacaattatttgcttttttttttgtaggatatttggtgctagtcatatccaacagttcaccaaatgcacataatatatattctttcttgttttggtcttttagaatatgtaatttaatatatttctttttctcacttcttgaaacgtaaatggactttattgacaacaattattggaagaaaattaaattaatccttacccaaattaggaaatgaggaaatattgttatatagtgagctggaattacaaggagggtaaacgaaaaggactgaaaaaggtggagacattttaataaagaaaggctaatatattaatctatacatattgtattgtatatatattcattaataataatacatttaaagattttgacgtagatatatttttctaacaagaaaaaaaatatatattacacgttaatatgtcgataaattataaatcatcattcttcggttaaaagtattaattataaaaattacaatttattgtgactaaatgtgtttttatagttacaatactgattgtaattaaaaataaattagtaacaacttgtatctaaatactatnnnnnnnnnnnnnntaattttttattgtgactaaaagttacatttaatcaagccactaaggttagtttagtggtgagggagggatgggaaaagggagaggtcatgggttcgaacccaagacttttaagctataagttattagttgattgtaagaataccattacgctacactcaaaaaaaaaaaagttacatttaatcacaaaaaaattataactaaaaatagctgtttttttgtagtgcaatatcaattatgtttagttgttatttttctaaaaaatattatcattgtaaatcgtttttttaagcatgtttaggtgcagaagttgatatttatttacaatgctactaatataaggtgtaatcaatatatatcaattagttgttctttctctggctaggtctgtcggttctctaagtttaagtatggtttggtcggtattgaagaatattgtctcatatgtattaaatgtaaaaatatttatggtttactgttgatttttgtgtcttttgaatagtggagtagattgaatataagtgtgatgctgcaatcagtttattttagtttgttttgtaaaatgatttgagaattagatgaacaattaattagtttatttttttttaattttaaatctagttatatttttttaaaaaaaatatcacaattaaattacaaattactattaataaaattgcataataattttgatataatgttgctcattatatatattataacatagagccatagactgtatgctaataatttctaatttatgtattttcaaatcttcacccgacattacaacccactaagtactactaaaaaataatatctataatttttcttcttgattcttgtagacttttctccctatttttcttttattgccaaattt

SEQ ID NO: 24738 - DNA, 3542 bp, Cannabis sativa
  modified_base (33)..(49): a, c, t, g, unknown or other
  modified_base (3487)..(3488): a, c, t, g, unknown or other
ataaaatacccatacatgggtaatacccattannnnnnnnnnnnnnnnnatatatatataaaaaaaaacatattaattaacatacttcttaatagtattattacattaacataaaaaaatttatttgaatgttaaaaaacagtccaaaatattatttatttatttattttttctttttaaaaaaaacttatctttaatatatgtggagaggattggatatcacttctagctcacatcgttcttagaataaattcaaaacaaaccactatataagactaactaccatatatgttactccacactcctatgtactatctcaagtctttattcacttcattaatattccattagtctatataaaaatatctttgatatggggtttgttctctaatttaagtactccaatttcattgtgaggaggtttaaaattttaaaatatgtatttataaatatttgaaagtttgactccaaaatgagatgccatgattatgggtgacactagtggtgggatgagaaggaagaggagggcctttgaacccactcattcaacttttgtttcccttctcaggtgaaatattatcaaggaatctgagactctaatggtgatgtcttcatattggtagacacttttcttttttgccattccattaactattaaaattaaccacaaaattttcatatatagcacttggcatagctaagtttatacatggtggggctaaaaatcatagctacctagtaatgcttgttcattctttcttatcaaatgaaccccacgatcccaagaaaaaaaaaattgtagatgtaaatgtataaataataagatttcaataggaaaattattatctttttttatgtgtcaaataaaaatttattttttaaaaaaataaaaaataaaaaaacctacaaagtgtgaaacatgtaaggtctttgttgtctgtctaactcaaaatataattgtgatatggtagaagacttttttttacaatcgagttggtttgaattgaacataatcataatcaaagcaaatctgtttatgtttattattatttgataaaataaaccactaatagtatgcacaaagctctcaatgattttgttattggccatttcgaatataatttttattgaatatagaattactctactagaataacagtgttgagaattgagaattgagaattaaagaatactacatgactcacctccactttactacaaagaatacaataccctgtcagtattgattcttgaaggatcaaaatattctctttctgttgcatatttttctgtgtaatgatgcattactttttgcacttaattttgttattctattgcctattgtatgttgccacgtgtctctatcacagtaactaagatattgtatccctaactatacaatgaattcaatgctctcaacctcaattgagtcaagatttacaatttccatctttatcgtttttaaagttggtatcagagcaacacttggctaacgccaatgtcagccgacttccttcaaattcctacaacagccaacaatgttgctcaaaacagccttgcactgaggtcaagctaagctgtcgtgacatgcaacactgcacaagctaagtccagctatgctacaaactacacacaacccttcaacatcctaaaccaaccctttcccctgaaacttgaccgaaataactactatatttggaaaactatggtttcaaccataatcatcaactcgatggttttgttcaggacacttgatagacactctcatttgtttgattcttaagattgataatcccctgcgtctatctgatttcagacctattagttaatgtaatgtgatttacaagataattaccaaagtcatgactaataggatgagagaagttttggaattgatcattgctgaagaataaagttctttccttcctggtcatttgattactgacaatgctctcattgggtttgagtggattaacgctttgaagaagaaaaagaaggaaaaagttaatttttgtgctcttaaacttgacatgtctaaaacttatgaccgagttgaatggaaatttttatctagaatcatgatcaagctagggctacatttgaattgggtttgcaaaattatcaagtgtatctctactgttgaatactcaattctcttaaatggtgaagcctgtgggtactcctgagagaggtcttaggcagggagatccactatttttctatcttttcctcatatgtgttgaagttctctcttccttggtcaagtgagattgttccaatgatcttcttagtgggttcccttgtggtcatttcagaccaaccatctcgcatcttttgtttgcagaccacagtctctattttctcaatgcctcttacgctcaatgctaccatttcaagacattgctcacatggtatggggaagcttctatccagctagttaattttacaaaatttgcagtgtatttcagtcctaatgttgaaataagtgatcggcttcctatggtgggggctcttggtgtggtggaagaggcttaacaattggaaattcaaacttctttctatggctagagagaagttttgatcgaagtggtaatccaatctgtaatgccctaattaaaagaatatcacgtgttgtgattacattgtgctaatctcattaatcgaggtctaataagccaagtaattaaaaattatttaacttaaacaacaaaacaacttgtaataatagtaataatcttttattcaaaaaaaatatagttatatatctgggatcctgtaaaattctttttaaaatattataagttgcgcttacatacaagccgacctaaacaacaaaattgagatttctatacaatcttcctgttggacccaaccctcgtggtctagcttgaacgtaacatgtacaattcactattaaaacccttcaactcatggctggcctgacactgctttactcttgcctgtacaatagagcactcatgagctaaggcccaacaagaaagcataattaaaccaaatataagatatagcatacatatcacacataatacacctttgggtagataaccgtaccatcgcactaatataacacgccactacacttataacgatgccaccacatcctaagtccatattatataaacactatgtgttatgctcacgcgtttatttattgcattaagcctaataaggctttatctcagttttaattaccgaatctaacctagttatgccttgactacacaactcttaatatatgttaaactagttatgccttactctcataaccatctacatatactcaattaattcatgtattgcatgcatagatatagaaactttaggataataatcctaattcacaattatatctaaggattaacaaaatatacaagtgtgccaccgctctatactctatgtacaaggttcactttcttacctaaaatccaaagtatgaggagaatttctgtaacgccctaaataattnngcacgctacccaaaatacttatgaaatcctaatcccttaatcgggattactaat

SEQ ID NO: 24739 - DNA, 2698 bp, Cannabis sativa
agaactatcaacctaatgtatatttagcatgaaaaattattttttcaaaacacttatgtgtttgaccttttcttaaaataattttcaaaacacaaaattacaaaaaaaaaaaaaatttaagagcaacaaaattgttttcttgtaaagaataattcaattttgttcaatatttttttctcccttttatctcatattattatactcattatttttttatattattttttctctcatcactttttctcacattattttctctctcattatttttctcgcattattttctcacactttctctcacattattttctctctcatcattttctatctcattattttctctttcgtcattttctatctcattattttctctctcaatactttcggttcaggtttggttggggtctggggtctgaggtctagagctgggttggggtccgagatcagggctgggtctaggatcgaggccagggtttgggtccgggctagggtccgggtccatgttcgggctagcatctggggtcgggccgggattcgcgtccaggtccaggctggggtccgggctgggattcagggtcgggggcggggtggggtccgggtgagggttcgggattaggtcgagtataagaccaagttggggtcggggcccgaggcgggtacggggttgggtgcgggccaaggtcgggtctgggtttgggctgggtctaggttcagccaggtccaggtccgagtccgagtccaagtctgggtttaggatgggatcttggttggggctgggtacaggaccaggccggagtcgagtttgaggtccggggtaggtacgggttcgagtctgagccagggtcaggtccggttgcgggccagggctgggtctaggtttaggctggattcgagtacgggcagtggtcgggtctgagctgggaccaggttcgggtccgggccgaggttgaggctgtgtgcgggtcgaggccgaattcaggctgagaccggatccaggccgggtcggggtctggggtcgtggtcagggtccatgtccgggtctaggtcaaggttcgggtccaagttcggaacccaagtccgggtcttggtcggatcttgttcataataaggtctcaaagtattaaattgtttttcaaaaaaaaaaaattttaaaaaaaaataaaaattattttttaaaaaatattagccaaacgcgacttgtctttcaaaaacttcagaaaactattttttattctcatatctaaaaatacttttctaaaaataaaaaatagaaaataatatcatacatgctctaaaattttaagtatgtaattatttcttctttagcaaatatctaaccaacatatagaaacaaaagaaatactaaggggtattaattgtgtctagtactacaagatattaattagtataaaaaaattattaatcatttgcgagacatcatctcgtgatggtgttgagcttttaatttagtaattattataaaaaaccgttaaccatttgcaaaacgtcatctcgtgatagtcagggccgaccctgagctaagacgaaggaggccgctgccttaggccccccaccgcttagggtcctatttcgaaaaaaaaaaattaaaataattaataatacttttaatgttaaatatgtgttgtagcctagtggtacgtaatttgattagtttaataactaagaggttgagagttcaaatcctaacctaagaaagacataccgatagacggtaggcctgatcatataaaagatttacataaatagagcaaactttgctagagcatgagctttagtgtcattggtaagattaagaacactttagtgatttgtgtgcttctattttgtgacctcaaaccttgattttcttttcattcttttcttcccctttttctacggatgagatgagagagaggtaatttcagtccccgtgactttcaaaatttgtgttcacactcatattggtattgccatgctacttgagtcttgactatttttgttttttgtttacggaatttccaaggcaattgctttggaaatgttatgccttttcacattaatatcattatgcctctaaattgatgtagtaaggaatcagttatattcagctttcagtatagccacacaaatataaaaatataacctttgtatgacgaagaccaggaaataaaggatcctattgacctcatgctacaaagtataggaaataatgtgatgatattttaaatggtctcaatatatataccaaaagaaataaagaccaaaaactaaacacacaatcgtcttcccaaataatatacacacacaaaggctcgtcaacctgtaaataaaattagagtggggtgattacatatttatatattattattatgttaaaaattttaaaattttaataagaattataaaattagatataataaaatgtatttaattctgttaaagtgacttaatgtcaatgagattttatatttttattttatacatacactattacaaaaattaaaattcgtgatggtcctaaaaacatttttttaggggaccgtcgctaaaagaattaagtaactgtttaaaattgtcggaaaaaaataatattccttacagtttataacagtaattacaggaataggcgacgattttaattggaattcgtaaatttattgggcccttatacccgatggtataggcgacagttttaaac

SEQ ID NO: 24740 - DNA, 1711 bp, Cannabis sativa
tatttcggaacagatagggatacatcaatatatttattttaaggggtgtattatagaattttcctaaattttatattatagcaaaatattgtgttaaatttagcataacatttactgtgtgctaataaaattattagagcacattttctcttaagtgagcaatatatttaacattacatcacttatttccattttcaatgctcatgtaaaatatattcaaattagttttaacaattaccgtacaagaagaaattccaatgaaggtaatagagtaatatttgatcagtgcaaatcatttattttctttggattataatgatcgtatactccttgcttttattttcttttaagaaattaactacaaattaaaaaaatataaggacaaaacgagcataccaaatttttttgatgacttataagttattataattatatagaaaaatatgtcaataattggtacgtaccgtcttgttcgtaggtttgtggttctgagaaatttagaagcatataaacctcaaaggcattgagaatcggttgatgagtagatttaggagtttggtagagggtgtagtcaatttgtttgccactcactggtgcaacattcgataaagtggttgcagtcaagtactcaggactaaatggtttttgattattccacgcctccattatgttttcaatgataaagaattgtctcgactcatttgcttggagtttttccaactccgcaaagtgcatatatacatagtattgagcggtcggatcatcaggactccagtaaaacgaaaacataggacttgtcacattttctggagacatagcagtctccattacacttgttggaggttggtaaatgttagagctcgaatctactgtcaacgatgtgcttaacacttttcgtcttgggaaattgaaaggctgccatatacgatcataaacatcatctttgtacctaaaaatcataaattatattcacttactcacatgttaaatattaaatatttattaatattgatcaatatctatatggaacgtaccttattgatgtattacttctggaccctacatctgaccgtcgaaatagaacagctgctggtgtagatgcgtatgtagaattcatcaaaggtcttagctccaaagctgaaataaaaggtgtgccatgtccagtatttacaagacacacaaatatataatctgaacttggaatatgaatgatctcttttgtggcagttgtggatgcattgtccaatttcacagaaccccatttgttagctccaaggtacagatcgaacccaggtgctaccatttttccatcataatttccgtacaagaaccttgccctaattaaatacttgttccctttcccatctgctggctttagggtgtagcaatttctgtctccttgtgggaaacttcttagatttgaaaattgttgatcaagagtatcggaatggtattcaagttgaattgttttactttcgcctatgttgttttcaatgaaatcagagtctgacatgtatgttaagcttgttgttttgtctatgtaggttgaactttctggtattccacagtctatactgatgaaccctgaaatatacataagtcacaatagttatttatatataaaagtactctataagaaaaaggcctggggtacaatttgaatttattgatgttcactaatatcatgcataggcatatttatatatatata

SEQ ID NO: 24741 - DNA, 3543 bp, Cannabis sativa
gaccaaaaaaagtgaggattggaaggtaaattgtataaaaaaggttttaaaaattacatcaattatgtaacctgtttgaactaggagaatgatataaaagaaaaattctatataataattgagtagaaaaaattcgagaggatcttatataaccaatatagaacaatatatatcaagaagacaagcaacttgattaaccagttgcttaactactttaacagaaaaagataacaactcactaattgatttagaagcctaactacaaattatgccagctcaactgggtctttatccttaacaggtgccctcaaactgagtgtggttgaacaaaccacacatagttgtctctcaaacacggaaacatggaatcggagataggctttgtgagagaatcagctagttgatgatggttggcaaggcatattgcacataaatctccttctgaatcattttatcacgaacaaaatagaaatcaatttccatgtgcttagtgtgagcaagaagcacaggatcagcaggaagcattataatacttagattgtcacaccagataagaggtgaagagacaatcggtagatgcaactcagagaataaggacttaatctaactcatttcagagaccacaaaagcaagacctcaaaacttaactttttttgaggaacgagaaatggtattttgcttctttgattgctaaccaattagattttcacccaaaaaaatataatagtcagtggttgagcatctgtcattagggtcagtagcccaattgacattacaataggattctaaattcagttgtgagccttttttatgtgcaagccataatcaagtgtgccagctagattattaagtctccttttgactacaactaaatgagattgcaggggttgttgtataaactaacaaaccttatttacactgaatgctacatcaggtctagatattatacagtatttatcaaaagacctgtaagcagatgggtccatgacaggatcacttccataattggacaatagaagtccactgttcattggagtgctttgtgattttgctccttgtaacttaactttgcaaatgagatcctgtaaaaaaaatttgttgagacaagataaggccatcattagttggaataacttggatgcccaagaagaatgataatgtgccaagatcttttagtgcaaacgcggagcttagagctgctatgagagaggtgacttgatcactcttggaaccagtgatcaagatatcaaaaacatacatagaataagtaggaagcttgtagaggagacttggatgaacaaagagtggtctgtcttggctgagtgaaatcccaaacggaatatagcagaagagggtttaatccaggcgctaggagcttgattgagtccatacaaagctttattgagtttacaaactttgtgatattgttgaagatcgacaaaacctagtggctgaaccatatatattttctcttatatatctcaatttaagaatgcattatgatatccaattgtctctgtaacacactaactcaggacgccagtgtgtggttttacaaacttatttttaatctaatttaagaaaagtgtagtttaattaaaataaaaacacaacttttataaaagaaaattactgttaagtatggagatcccctgtataaaaacttttacatgttattccaaaagtggtattacaacatcaaattatactttcaaaatacagtcaaaagggtagatcatgtccactggaagtcgggacaccacggtcgatatgtacttctctggaagacctctgactcatggttgatcaactctacccttccctctacctacaccacgaagcacccatgagtcagaggactcaacaagaaaagctattaaatcacaaacaatgtaaaatacaagtaatcacaacatggcataatacacatattcctcattcaacgcataatcaaacaatgcataaacaattatacgtctataagacaagccaatctcagtgccttataaagcactcttaccactcgttatccacgagctacatatgtcactatcattgcctggtaaagcaaacgataagtaagaaacttatgtacgatttcaagcgagtaattactcattccagtaatgactatatctttccctcgatcataatcgagtcacaataataacaattgttatctcgatcaaaatcgagtcacaaataataataatcatttcttaccagcatgctcatcggtgcgtaaagcttttcttaccttaatccaatatcaggtgtgcggactgacttgagtggaacgatactcgacgatctcgggtcctatgtcacgataacaaaatctgataaataacttaatcaaactctaaaacaaaccctaattccatgagttgtcgaaggaagaaggagacaaagggtggttctccttttgattatttgatttctcttaatttcttaagtctttctctatttttttaaatacttagtaactagaaaatgttttcgacctagtagactctaggttcacaataggacaaaaaataaataaaatcttagtaaaagactaatttaccccttcaactaacacttacataagataaagcttaagggcatttggtaattttctaactttcttgatcaaactgacttctcaatattttaacctagtccgttataatttcaatataacacaacttatttgccataacattcctgaccactctatcggatttccaaggtcgccgaatctaaaaatattttactttaaaaatagtatctacaatacccacataatccgataaaatctctgtaattgataaattacgctttatttaattatttattaaatttacactaattttcacaaaattagcttaaaaaagatcataaccttactttaataccagaacaatcacatatttaataaaatatatacaattaaatattattttattttctaggatattacagtctcatggtccacctttttgttactgctaaagtaagaataatcttgatagtgataggctttacaactggactaagtgtctcagtgaagtcaaagccaggttgttgatgaaaccctttacaactataatctggctttgtattgactaacactgccatcagaattttctttaatcctgcacatccattttcaccctattggaactctatttttaagtaagtcaaccaaatccatgtgttagttctcttcaacgctataaattcacaatccatcgcatgaaaccacttccgatcattaagagtagcaataatggatttaggagttattgaagccatcataacttttggcttcctaatacctaacttagctcttgttctcattggatgcatattgacacttggttaagcttattgtgtagcaacttgatcaacaagagcagcatctgatgcaacatgagatggatcagaattatttgagtaagtagcatgaacaaatgcaggtggtgacatgctatcgtcgattttagatgcatttgaaatattagcagtaataggtggatatattttaccaggatctag

SEQ ID NO: 24742 - DNA, 1554 bp, Cannabis sativa
ttttaaaaattattcttaattttttttttatcaaattattttgtgttaatatcaatacttattttagttttacttttcatatatttttttttaaaatcataaataatcttttatatatataataaaatttcacataaattttaattttaattttttttataataatatttaaaatataattttttatttagtatatatatttttgaaaatatgaattagaagattttttttttttaaaaaaaaaaacataactcaatacatatattaaatgtaaaataaaaattattaaaataatacacatttataaaatttatgtaaataaacattttttttttattttgtaaaaggattactaattatgttgccataatatattctataatctattgctaaagcaactagactcaatgctgattgtagatgtgccatcttaattagcctataattttatagatatttgatttaataagatatgatgattttttcaaaaaagaaaattaagaaagattaattatataataaaaaaaatgtaataattaatttttttttttaaaaaaaaaaaaaaaagaaagaagagagagtgtgttgcccggcaaagaagtcgtgcccacgagatggaaagggctttttgggcccataaaattaggcctttttactttaattaatcacatcacatataccccattaattattattattattattaattattataattattattctacttgttaaggggatttttttgtctcttaatgaagacaatagtgacaaaatcacaagccaaaaatcccacttaataattatttaatattttagtattgggatgacgtggccattgtctactggtcgccacatggatgcctacgtggatttactctccactttcattacttaataattattatgttaaaagagggatggattgccaatcatttcttcatcattaatcaattatagtggtacaaatttttagctctaatgcccctagagtattttttaaatttgcaatttggtttttgagaagtgtttttcttggaatcaagaccaattgagtttttttagggattattttacaaatatacaaaaatacgtatagaattttaaatatttttattttttttatgattttatttaaaaaatacaattttttgaaatatttttatgttgtacatttatttaattcttgttgatttttgttatttatatgttattttttgttgttattttgatgttatttttctgttactacttttatgtagtcatcttgttgttttcgtattgtttttataaataaagtaaaaatgtaaaaagaaaaaatctttaaacgtaaatgtaaaatttttacaaaaaattaatattttatataattattttttttaagtctttatgatgttttaagtaattttgatatttttctatgatattcacctaaaataataaagatttatttgctaatgtctataaaagttaaggaattatttgtcaattttttttattaaggacaaaattgctaaactaaaactcttttaaggacatttttgctaaaatctc

SEQ ID NO: 24743 - DNA, 2546 bp, Cannabis sativa
agagagttggacgaactagaagatttcgatgagctagccaaaaaatacatactcttagaggatgaacatagaaacctcagtatggataagaatgaataatgtggaaggacctcgctcgagaaactacacagggagagagagtttcatcaccaggaagacgatcagagcaaaaagatcaagagaaggatggaaccacattgttaccaatacacatgctacacacaacatacctttcaagaaaccatcccccataaagaaagatagatccaaaagggacccgaataaatattataagttcccactaggacattggacattttccagaggaatgcaaagatctcaagattgaaatcaatgagttaatacaatgagggtacttctgcaggtactacagagagaaccaaaggtctaaggacgagcgaaaaaaagaagactaaagaaaaacttgaaggaatgaggtattgttgcgaagaaaaaccacggagatatcctttaggtctcacattttagtttatgtgaatcaaggtggaaacccatcgggtgaccccaatagtcatgtttacctttcagttcattgtaaataagtgaaaggccacaaggaccttcagaccccctttttgtaaaagcgagatgaaagaaaaatgatgtcttggatttatgttagtgtgttcaaatgattgctttaaagtggatttttagtccttccctttttctctaagaggaagaaaaatatttagactaaaatttaagtgtttagtgtcgtaaaaaatgctacatctttggtcggccgagaagaaagtcttgaaagaaactcatggcctcgctaaaaaaaagaaagagaatttggtatgactatgagatggacgcctctctaaaaggaatacctattttcttgcattcaaaatacactttaagtgccacgaatgcaatgtaagaagtcgagagtcgcctaagggctacaagctccctcaatggaatcataaaacttaaaaaaggctaagtgcgacccaagaggataaacatctcccttaacatccaacaacttaaaaaaggcttaagcgcaacccaagaggctaaaagcctcccttaacatccaataagtaatcagtaaaagcttgagactgctcaaagagtctatactcctttcataataaggttacatcagaaaagaggttgagaaggccaaagtggcagaagattccctcaaaccaaaaatctcaaggcacaaacacctaaagaaagaaagacattaccaagaaaaagggatggcagttgccgaacttagtctacaagaacacttaaaagaattcttatagtctatggggagattgttaacactaaaaattaacaaggctaattctcaagattagtcaacaattagtcttaagaagttaaagaaattgactttaagagttggccaaggaatgactaagtcaatgcatgtatcccgggaccattcgaccaaaccctcgtgttgatcccaaaaattagcaattattcaagcaccacaaagagaaacaccatgatgacctgcaaacagaggatgggcaggaagaatgtcaccagtgagagaggagttaggcaagtggtgtgtgtgcgagtggtgcacgtgtatgtgagtggacaggtgtgtgcgagtggtgtgtgtgagtggagtggagtggtatgtgcgagtggagtagtgtgtgtgagtggtgtgtgtgtgtgtgtgtgtgtgtgtgtgtgtgtgtgtgcaagtggtgtgtgtgtgtgtttgtgcaagtgagtgagtgggtgagagagagaaattcgagaaggagaaggtgcgaaagcagaatcaaggaaaaattttcctaagtgtttgagagaagatcattgcaagaagaagaaaatgacaaggcatgcacacagaaggctacaaaatagagtatgaccacaattttagcgtgacttggtgatgagagggtacaagtagtggaggcacttcatctgcagccccgaacgccccaggaatgggtaatctacaatcaccactcctgcaactcaagacccacctaccgacaatgatacaaggtgcaaggccacctctagcacctacaacccgcagccacaaacaacgaacttgtcccttgaggaccacaagtgtatcccaggtcattagagcctataaatgccccattctccgatgtgagaggggattgaaaaatcattgtaacacttcacctagagaaatatacacttctatctttctccatattatttggcacttttcttttacgttttcatatttctagatcttcatcttaatcctaggtcttgcatctaagttttgattttctagctataatttggttggggggttttcgtcgtcaataatagctcaattacatatcggtccatatcatatataatctctattatatacaacactttcacttagatgtcatactttattagcaatctgaattaagatggtttgtatcgataatggggcatcagtgaaccgtactagaaacatttgattaaagtttccataactttaatatattactgactattttattcat

SEQ ID NO: 24744 - DNA, 2468 bp, Cannabis sativa
atatcattttacttggaacattctttgaacggcagatcatgtagtgtgcttttcaccaaatgaaatatataaagacgaatagtgtatgaagcaactcttctattaattattaataattcattgtaatatataagaaatcgtctattattttagatttcgtaaagggatgaaatgatatttaattcgacctatttataagaagacagataaagccaattttttttttttttttcatttattcatgattatatatgaacttttcagaagaattagaatatagcggtctcaattaataacttttgcaaagaattaagaaagtatgaaagaaactaggaggggagtgggagtccaaattacatgtacctctctttggaatttcaattaggcagaattaaaaataataaatcaacactaattaacaaccacaccacatgtgaatgtacaaaaggtttcaatccatattaatcttttagggttcttttagaccatataataatttataatattgtattaaattgtattgtttattattattttttaaataatattaggttgaggttacgtgtataatatgtacaatttatatatatattttttttgagagaaaataataagctattacaaattaaaaatgtaagtcatttacaatagcagagtaaattagtggagggaaattctctaactaagagcaagctttatttaactttagagcatgtcgagccaaataataggcacatattagttgaacgtgtgacatgagtaacattgaatataaggaaaaaattaaaataaaaaaaaatatatctacaattaaatcatttaaagaagaaattacagaaaagtatgcatttaaagcattcaagattaacatcagtgcatctatttcaacatgagtgatcgtttgtcgcaactggagaacccaattcaaactgtgaaaaatagtcttgagctccatctcatgtgaagcaaagttaccaataattggttttgagagtgcagcgacaacttcaccatgagcatctcgaatgatggtaccaacaccaacaatgcctctagttttatctacagtcgcatccacattcagttttaattcacctggagcaggtggatgccaaggaacagaagcttgaaccagcggaggagaccttgaaacagagctaccattcatgatatgatattttgtttgagttttttggtagtttcgtaggtaatattcacagcaaaagagacaagagttgtttctagttttacagtacccccatagacaatcttgtttctctcaaaccaaatcaaccacatggtgcaaattataaattccatatcaaactttgagtggagacttgaaaggtgcatcaagtagtcacctctatgcatagagttggcaaggttcaaatcaaacaccaaatttaaatgtcgccaatctgaatgtcgacttgcacgtatgcttaggtttttttacttttaattaggtaatgaattttaatttttaatttttatattaaataaagatgtaatttaattaaataaataatattattatattagaaaattaaaaatttgatataaagttttaaattaagaaaatatatgatagcaacaaagtgtttccattccacttgtttatttattgattaaaattagatgaactccataatcaataactctattatcactttttgtctattaaaaacattattctaaaaacatagcaggttttaatttttgtgtaatgtaaacttagattccttcataatcagttaataaaataaaccttacttagaaatatggactttgttatttattcattctatatagaaactattactgcattactattgaattcagtctatagaaactaacttagagtattattgaatagttcacgaacaaattctcgtattgtgtggttaaaaatatatatatatagtattttatgcatttaaattagattaagtattattaaaataactagatcaaaatattaatcttatataaaaatgtctacataatttttatttttaaatatatataatcatactataaaatcaattaagaatattatgttaaataatgatgtatttagttaaagttaacaaagaaaactaaaaatactattaaactaagaatttcgttacaatttgggttggtccagtagttgctctctctagtgatttttatgtggattgcttgtggactttggttgcgatttaggttgctcagttagttgctatgtggatttttatgaaaatgtaaaaaaaaattgctttgaaatgtaaaataataataataaaaaaaacaacctctatgtattaacatgtatattttttacacaaatatatttatatcaaatataatactatatcactactacaatgttagcctttagaggcagttttttcaaccccatttataaaaagggaagctaaagggtgtgaaaatacccgctatgttcgaaattgacatttaga

SEQ ID NO: 24745 - DNA, 2202 bp, Cannabis sativa
ttatgtactgatatttgtatttatatatgtatatatatttatatatgtttgtcattgtgggtgatggaaagtggtatagtagtacattgttttgttgggcacatgcaaatgtaggaattcctcgattttacctaacatgcaacactatatatcgttaataatattaataattaaccacacttgtttaatatatgagtactgcctagactactactacataaataaatctctctttctaattttgcgattttaaaacgtgtgagctatgaatattaatggagaacgaaataattgataataatcattattgttttattataatatagtataaacgacattgatttggagaccaattaaattggaaacttagaaaactgacaattataaaattcggtcaaacaaggaagagagcaactatagcattagctaccaattgagtaaagcacttttcatattatcagttgtggtcctatacatatttatcgacttctcccattacataaagtgttagtaattaatagacatttttaagtgtttaatatatgattaagtaatacttgcttgatcacttaagagtagttaatatagtttttcacattagttattaaatttaaatatatgagacataattaataagagttgttttataaatacataaaaataataaaaatgtaatatttttatagatttattttttatatttatatttatgaattttaatagtttttttttcacaaaaatatggagtattattttcggtatgtactatgtaattatttttacgttattattacagaaaataatgttgtttttacattaaatactggaaaaataatattttttttcttttgaaaaatcagtaaaaacacactaaatccgtaaacatattgttagaatttggaatgaaagaagttaaaatgaatgaagttctatcttaaaattaattgacaatgaaagaagtgaataattcattcattttatatatgacaatttgtttctatacattagtaacgtgagattaactttaatatgaaaaaaatctataaaaatataaaaaagtaaaaaaatccaattttaagtaacttgtgtaaattttggttaaaagtgaataggtaaaatgtaggccaagttggttatattcattggtcccgccacttaatataaatggacaaaagagaaagacagtacacaacatctccccatccccatgtgaagggcatttacaatttttaaacacatatatgcataaattattatacataaagtgagagtcgaacacttaatctcatacatcatattacttattagtttattaattaatacatattattatacgaagtaatcattaaaatgacataacaaattagaaaacaattaattaataggccgcaaaagcgctgcttaattagtgggatcttagtaataattatgattagatggaggggtcattttttctatatatatatatatatattgtatatgtaatcataaattaatcaaataattaagatcccttttgctaaaaaatagagtcacttgttgtaaaatttgacataacactataatataagtgatgttttaacttttaagaatattcttattatgggcatcttgaggtttcttttaaaatagatataaatagatgatattaattacatatccaaattataatatatatttataagcacagtgcatgagaaagtactctcgatcgatcttcatcaaagaatattttcatttgcatggtatatattatatagttaacgaagccaaatataggacaaaattaatctatcaaaacacttatatatatgcatcatgatgttgtgttaatcgtatatatacatatatattattttatattattaaaataaaatatcgtatacatttttatatatttatttattacgtgaaggtataatttagtactttaataaattttattacattttttttttcataatttaaatattaactatattaaaaaaatataatttttctatttattaactaatttgccaacaactcatgatccatatctaattacaagtttacaacttcatatatacaaacacttttcatattttaaaaatataatgtaatattactagcataattactacactctaattacacattgactttcaaataagttcttaataaatttgattatataccttgacggtacactgaataaaaata

SEQ ID NO: 24746 - DNA, 4882 bp, Cannabis sativa
agatcctagtaaaatattttcaacactaatttggttcaagaaatgtgccaagcttgttattccaatatgtgtaccagatgaggaagtaggtgagattttattggatggtcatcaatcccccatgggcattttagaggagtaggactgatgcaaaggtacctgagagtggtttcttttggcctattttacatttagattgtcatgaatatgtgaataattgtgatcggtgtcaaagaatagaaaatattttagaaagacatgaactgcctcttgctaatgttatggaagttgaaatttttaatgtgtgggggatagattttatgggaccattcccacctttatttggaaatctttgtattttattgggagtagactatgttagtaaatgggtggagactactgcaacaacaatgaatgatgcttgggtagttgtcaaatttattcaaaagaacatttttctcgctttaaaacacctagagctatccttggtgatgaaaggacccattttaataaataagattttgatgctctcatggctaagtatggatttagaaacaagatgtcactttcttatcatcctcaatgtaatggtcaagcagaagttttgaattgagaaataaagcttattttagagaagctagttcactgaaaggattggtcaaacaagttcgatgatgcgttatgggcttataagatggctttcaaaacagtaattggtatgtttccatatcgtttggtttatgaaaagtcttgtcattgtctgtttgagcttgaacaccttgcacaataggcaataaagaagctgaattttgatcttctagcatcaagtaagataagactttttaaacttaatgaatttgaggaaatacatcataacacttatgataatgcgaggatagacaaagaaaaactaagaagtggctgaaaactatattctttgtagagattttaattcggccaagaaggtacttttgttaattcttctctcaaactctttcttggaaaattaaaatcgcgatagtccgattcagtaatagttacacaaatatttccttttgggccattgaagtgatcatagaggagaagaaccagctttaaaggcacaaggtcagcatctcaagaattattatggaggtaaagttgagaaattagggagcattcatgtaatgatcgcttaagggttattttgagaactagccaataattaaagtttattgtaagaagtagacttttgattattatttaaatgattggtgatatatctaggtgtattaattatgatatttgtgaaattttataatttttatattatatgctcggtgacagtgaaatgcggtgtatgacttgcagagtcacatagatatgattcagtaccttagaaatagcgaggcaatttaattagacatttggaatgtcaggaatttttagagttatagattaagaccattttatgcctatgtatgttgattacttcatgtttaagtaatggtagatttgtcattttaccctagtcttatctttagttaggttattggcgattttaagtatattcttgtgtaataatccttcaattaattaagttttataagctaaacaaaaaaaaaaaaaaatagaaaatcctcacttctctctctctctcctatggtgagctaccaagaaaccaaaaggggtttcaatattttcttagtacttaagagcaatttagggactctttgagcaagattccttagttcatacaagttaagttcttctttttcttccttgtatttttaagaagttaaagtttagtttccatacttgaattatgaggtttagtttctgtaggttctgtgaatgcgtagttttgttttttgatgttagtattgagttttatgaattgcttttagctggattttgttgcttgttgttggccttagacaaggtttgagcttttgagctcaaaccttgctctttaatggtgaattttatcttaggggcttatttatatttttatttcttcaattatatttgttgtagcttaattaggtggtcttgagagtttggcacaatttggggtaaattttagttcatagtgaagtttttagggtttcctgcagtgaacgggttaaccatttccccaggaagaaccctggaagctagtttttcatttggggaatttgatttatcgattttagtaattttggaaccctagttttttatgttttagcaatatttagggtattgtaatgctatccatcgatagggaaacttctagttctaactttgagtctagaacgttcgtacgatagtaccattaaccataatataaacctatactcgatactctagttgtaccgatgtgatagcatcaatcagtacttaagccaaacatacactcatcagtatccaatataactctatgtatactgataacgctattttaatgtaatctaacaggcaataataagtatgcacactaaacatgtaatcacatatgcatatcattatactattcttacgtcgatttcaaattcatgtgtgctggtcaacctgagtagaactgctgctcaacggattacatgcccctaagtcacaacatatgcaaaactagtatgcgatacgctaaacaactttttggggacttaaacttgaaattataagtttctctatggataatagcgtgattaaaacctaaatatcgagaaaacgttgaaagatggggtttcgagaaaaagtacccaaaaaacggtagctccccattataaaaacagtagactttttttctaggttattctgcctgggaaaacggtgggccattttccgagaattggcctgctgtttctacagcagaaataggccaaaaccccaaatctcaaccatttcgattctaggcaactccaaactttctagaacacctattcacatcataatataccaaaaccaagcaatagaatctcaacagccacatttattcaaaagtcaccattgttgaaccaagtttgagttcttaaactaaaacttgctaaacaccccactcaataatcaaattccaacaaaacaagcttagacaaccttaaaatgacctcaaaagactgcaacaaaactcatctaacctaaattgtaactagatcaacaaattgcatgtttaagcctaaccaaaacttactaaaatcaaagaagaaatagagttagagcttaccttaggatcaaacctctaaaaacttgttaaaaccctttgaattgaagaaaagaaaattaatttcccctggtttcctagctgaaccgaatcaagagaaggagagagagcgaaattccattttttctatttttgtcatttcttgattattcttattttttcctcttttttcccaactaaaggtgatcctagattatctatttctttagtggtcagctgcaaacaaaaggaggagccacctaaccaagcaataaaaatgaccaaaatgccctcactaaagttttaaatggcaaaactgtttatgagtaaaatattccaaaaccataaccccatctaatcctgacattcaaaatatttaatgagatttccccgctattctaaaaatactaaaccataataaagtgactctataggctatacattgcgttccactattaccgagcatcaaaaaaatataaaaaatgtaaaattcatatataatataaatagcacacctaaaattcaaatatatctccatacttataaaaataataactaaaagtctactattgaaattagaccctaattatctactaattctcttaataaaaataagcggtcattacaggcttattcttgttgagttttcaacgcatgagcaagaacaattgagaaaaaaaaatatttctttctttttctctccatgtttcaaaaatagcaacataaaagagagtaaatctgatttctcaaattacgctcatatttgtagtagttaagttcttttaattaaattatatttaattgtttaaataaataaatatctataactgaattcaattattgatatttatgagagaatcaactacttgagagaatatctcaacatccttgaaatatctataaccacttttcaaattagatatttatctaattaagttaattaaataattaattgacccaaaaatacaaactctacatggatagaataatgttatgggcacccaccattatttaattaatttgaaaaaaatatttatttattacaaaaataaataatatctatttctccaatctaaaatagatttttttttcgaaaaaatatatactatttcttcttcctacccttgatagttttttaaggtgacaattcgaggaccatggacttacatgtaatatcttggaaaataatatggtattcaattggaaatattttattaaatatgtaattgtcttgataatgaaataagattatgatcttggttaagctaattagtgtgaatttaataaatgattataaaaagcgtaatttattaattacagagattttattagattatttgggtatcgtagatatcatttttaaaataaaatattttcgagcctggcgaccgtgggaactcggcggagtggtcagaaatgtcatgacaaaaaagtatggatcgaattggaattataccagattagtttagaattttaagttgtcagtttggtggattagttagaattaccaaattacccctaagttttatacaacttgaatttgtaggtaaaggtagagtagtaatttcttatgtttgattttcttctctttgtcttctagtgctttagttaatctaagtctttagttaataaaatatatagtatatgctgaaaatgagtttagttaaggaatataattaagaaaaaaatccaagtgatcttctctccctctttctttcaaacaaccta

SEQ ID NO: 24747 - DNA, 4472 bp, Cannabis sativa
tcttgaagcggtaacatggctcctaacataagatgggtttaactccatgctccaaaattattgtaattgtgattaggcatttcttcatccaagggtagatgatggtacaccccgaaatcggttgcctgaatcccaatctatgctacgatcttctccaattaatcatcgcatgttagggacaagtgtaagtcattggcttctgagtcattggagcgacaagaatacttcttgtagggcactaggccttgcataacagcatctaaaaggatgaccctaaggactgttgtagctggggcaaaagtaccgacaggggtatcgttggatggaactttagaattcgacatcgcgccttttgagtggagctcaaaaatttcttggtcaaatttgtagaaactgtacttgtgaagatcctatagaacttcactcatttaaaagaccagaaacccaacaattagccccgtcattaaaccctaagccaaaaaggggaatgggggtcctctaattgctgagaagaggccccatctgaatgtaggtggagcaattatcaatgattcatgttgccatacatcggtgaaatacatcctagccacaacaatggaacaaggaaaaggaaagaaatgggaaacgctgcaatttttacgaaccataagcttataaattccaaccatagtcttaaaacgaaagcttccagaaaagcagcccaaaaaatggcagttcagaggaaattgccagtgatagtaaaaaaccagaacaaaaagaaaatgagaaccatattgtgtagtgatgcatgcatgatagttcaaaagttgaaactggacgaagttgaaacttacatgctgaagggaaagcagaggttgtcgagaccgtcgtacgccagtagaactttgcttgacagagacgaagaaaaagaaagatgcaattgggagagtggatggcaaaagattaggaaaactttggaagtgaaaaaagatgagcgggtaaaaatctcagaaggaaaaggcacgagcatttatagaccttccaaggcaaatactaattgacgaccatccaacggtcagggctcaaactatccgaatctttttaatccaatggtcgggacagcctagtaagaaaatatagtgaaaagggcaattgcaatactcgagtattttcctaacaaagatattaatgaaaggctctatcgaacaggtgggaatcgaattgttttcaccaaaaatgtaaaaaatgattataggtaataaatgactcacgtgcgtgctgaatgatggctggtggcatcactccctgaggcaagtagcaagtttcattttacaaaggtgcaaaacgagacttgggggtagatgttgtccctgattttttctaacacacgtgataatcttgaagtcggtcaggtggtaggaaagcctaaatatctagagtaagtaaagtaaacctcttaagactgttgaaaataattaaaccaaataattaaactatcacaaatacaataaagcttgagcaacgcttgtcaaaaataccataagtgttgaaaataaatatgaaaaaaagttttaagtttcaacaataaaataattagtgggcttaggttgggtcttcacatattggacctaaataaatataaaattttataatatgtggtgcggtgcgatttgaaccgcatattaacaattcaaaactgcaaattgtaccaaactacgtgggttagggaaaattcaaaccgtgaccgtactgcaaagaatttcaaaccgtatttttttgtggtacggtgtggtgtgggtggtttgagtagtttgagtggtttgatgaatacctctaataaatactccaattattttgtgaggaaggggtggaaaaaaataatgtaatgtttcattgataattaattaagagaagtaaaaaaaaaaaaaaagctaatgtatgatacatgtaatagttgtaaatcatatatattttatttctattgatttcttcactaatatattaggatcgcatatccaatggtttttgtgtaacttcaaaattatgtaaaattagtttagtacgtagtgatgaaggatcactgtctagtgagtggtctatctattttaaaaacgcatagacttctagaatctccaataatgcatatttttaaaacaattaaaaccacttctcccctttaattaattgtgtattcattatcaaaaataaaatgttctgtggtagatcatgacgggatcttctagggttccccaccattttacccacaaatcagatttggtttttattacattaggaaataagtcacttacaatttcagctttccttttcttttttttcttaagggaaagacagagagagagatatgcacagtaatgtcagcttcatatatagccatattgaccagaggatcattgttcaaaacaaacaaatatagtacagacactctgacctagcaaccacgtgattccatctagatttataatttctagggcaacagtattttacttattttaacttgtattctacctcctcctcgacggttggatctcatagcaaaatacttaaaattaattattctttcatttttttttttttttttgaaaataatgtgttagacataaataaaataaaattagatattatagtcattacattacatatgatagagtctcgtataattgagatcttaactatcccgatacatattttctaaaagcccacttagcaacattacgagccacaaaattataaagtcttgaaataaaagagaaattacatcataacaaattagaagagagttgcttataatattgaatataatcgatttcccagcaggataaattttcttttagagcattgataaccttttcagagatcactctcaatgagaacaaaaatgttcttcatcataacagtgtctaaggctaacctgcaagccacaacttctccaataagcgaaccgaaaaattgagcattttggtagctacccacaagacagttcctaagggatccctagctacagctaccgggcacatggagcagctaccaactttgacatcacagttaattttaatccaatcatctggaggaggggaccagcttggggacattatagccaaaggcagaacaagtaaacaagatgcataatctgcataacaaatagagatagagtcaattaattaattgcttaatgttacacgtagagttattatgaacgttatcgtggcgagccttccaaatagtatcaccacaattgaagcatagaggaacatcttatcagtatccatcccttttgacttcaagttctaaagaaaagtaaccgaatcccaaacacgagctcctgagcctgagacaagcataatcccccacggggaagcccaccagagatggtcagcaaaggtgcaaaagaggaacaaatgtacatcgattcctctccctctccacaaagagggaaagataccccttctatactaattctcttggagagaagggcctggataggcagaacatcggaaagaatgcaccaccagaggatcttatgacgctctaggattttggagtttcaaagtttgttccacaacttgggggccacagtgcaattaggggctctttctaatgcttagacaatataggcagacttattagtaaataaaccattaggctcatttgtcttaacccacttatctctaccttggccactaggtttaccactcttaataatgtcactagcagtttctaggccaaacaaagttctaagtttagacatatcccaatcccctttatctaaaagtaactcctttgtcaccccgataggcctagaagcactgggcttagggtagaaatctcgtcaatgagtaacccacagatcagtccagatattagtttctttcccatctaaaattatcttgcaagcacttttcttcaggatctcctttgctttcactacattcttctagaaccaagagttcgacttcttaaaggatccttccaagaacgatttatctcttagatatttatctcttaacaccttacaacacaacaattgatcatctaccttattatcaatgttagctaaaccaataattatttcattaaatttatcaatattatcatctaagaaaagagaagagttcattctaaacctgtataatctttcagaaagattaatcttgctcaatattgatggtgccatgtacagctgctctagtttgttccacaatccttttgtagtcttttcttggattagctttcttctaactccattggacaggttaatgatgatggtgtagtattccatctcctccaattctgcaatttcctttggcttcttcgcaaccagcaacttttcatctccgagtatctttgccaccttttggtgcaaaagcatacctttaaactctcttgccatagtgcgaaatgagttgatccatcgaacttctctagtttaaacctagccatcgacatcctccttcaatctgtgttcttgtagaatt

SEQ ID NO: 24748 - DNA, 2910 bp, Cannabis sativa
cattactggtcactttcaaaataatgagtggggagtaataatgtatattagagatatttgtagcgaaattctcttaacatttataattgttatatatgatcctaattaaaaaaattggcagcaaaagtatcttatcttacgattttgttataatcgtactattttttaattattaagtgtcaattaagtttattaagtgcaagctcagaaatacgtgacgatatatttctttagtttatttaatacgtagtctaataatacgtcgccatgtgtttctgttgacacttaatagccaaaaagtaaaaagaccgcaacaaaatcgtaagataaaggtatttttgctgtcacttttttttttattagagtcatatatataggcagctgattttgtaccctgaaatgtaaaacacggaatacattccgttgtacggcaggtgggtcccaggatatgtaataatgtgtgtgaatttatttatgggtcccagggtatgtaataataggtctcaaggtacgtttctattttttaaccctaattatccctagatcaaccccaacccttagatcaaataattaccccatctaacggctgccgtacatcacagaatacattccgtgaaagtacactaatagtataaaatggtatccctatatatatgtaacaattataaatattaaaagaatttcatcacaaatatcccatgtagattattctattctcaaatgtaaaaattaaaaatgagatgaagatcatgaccccaaatctcaatgcgatgttgctaaagtcttttacctaatcccagtggtataaaagatgcttctaggaaatagagataaacttagtgaaaaatgttgttaccttgttaggaagctaaaacacattgagaaaaataatgggtatttgtctgacagaatcagaagacattaatgctgatactaaggaagaagatagaatctccatatactaacagaagatcggagtgtgtggttatggtatcctctaattccttttaaagaaacatctttttatcatatttggtcttgtcttgattatcctttatgtttccttcagttgaacatctttttcaattcttgtactattacaatacagtcctctttattaatatattaattaattagccctttccttttgtttttgcaaacaagtccctaatttttattaacatgtgccagcattctcttcttcactccttgtaactgtataatgcttttcttaaggttctaactttagcttttaatgtatatttttctatatatgtatatatacaactgcatttgacaagctcaaagaaaagaagaaaaaaagtttgattccttggtcttgattctcattcccttttatgatattttcttttgaaaaaatggcaagtggttacttattgctccttaactcattcttgcttgatgatttagctttcccattattgaaatcaaattgttgttatttgcatatatagtacatatctcaagagattttgcattatcttcaatcaaaacaaatcagatctcatcatatcaagtgcaagaaagagtgtgggctaccatatttctatgaccaccttacattactttgaaatttcttcaatttttatggtatgagcaaatacaaaagagcaaaattaatctcacccactatcctattattactaccaacctttattttgtcctatatatacatggtgaaatatttaatttaatttaagatatatataacacatacaaacatacaaacacacacaaatattgtggtcttgagtctcttgactcttgttccaatccctccatgtcttactacttaaaaaaacaatattaatttctaatagaataagtgttaaatcggtgatgtaatactatatttatgtattttctgtaaagttagaaagaaataaaaaacttgtactaacttggttttttattggattattttgtaaaatatataaagttgacaaatttttatattttaatcatttaatattatttttatatttttacgagttttttttacaaaaatgcagaatattatattttctttgttttcgaaactatattgctgttacttgaaagcaataggatttctttttatagcaatacatggtgtaattgtttgtagaataatgttgtttttagttgttgctatgagaaaacaatgtaaaacatatatttttattttgtaaaaaaaaataagtaaaaacatgtaaaataaaattcgtaaaaatataaaaaaattgtaaatatttaaaataaagtttatttttaagtgtattgtgtaaatttttaattattttttttgaaagaaaatatgtattaatatatatactgcaagactacatttttttttattgaataacattgttatcagtcattatttttttatgaagaaaaattgttattaatgaaaggtatatatattttttttaaaacataatattatcattgatgatagttttttatcattatttatataattaaataattgatttttatgctaaagtttacattatatatgcataaatgtgtatatttttttttaaaggatgattatattaatttgaacactgcaaatgtgattatgcattgttattagggatatttattgaatcacatttaatgtttttaagcttaatttgatgattttaccatccgatccaatctaatcaatttcagtcatctaatcgatccaacatccaatgaatgttaaattggatcgcttctatctattagatgtatttcatgtatatctattggtttaattaatattttagacctagtatttattggattgaatcgaatcgatctatctaatattttagatcagtatttattggattgaattagatctatccaatccaaaaaaaaagtaaaattttgatattaattttcatatatatatat

SEQ ID NO: 24749 - DNA, 1467 bp, Cannabis sativa
ggcctcaataaaggtcagtttcaaggcttctaataattaggctgaatatgaagctccgattggtggcctcaagctagaacacaaagcacgggttgaatacatagacatacaccgcgactctcaactaatcctaggtcatatcctatgtgaatacgtagctcaaggcaaagagatgatggcttatttaagctaatttaatgacttattaagtcagctcaaaggctgtactaaaaggcaagtccccaaagatgacacaatagccgatgcacttgcttgatagccagcagcaccttgatagccaaggaaaacttgatacctattcagtacttaaaggaactgagcatctgaagttcaaaagacatagacatgctagacaaccgtccaacatggaggacacctatagcagcataacttcaaataaaaaccttcctaaaaatcaaggataagggggatagttgatgtgaccaatcccagacggcgtattgtgcagacgttgtgacgttgtatcccaataccacctctaatatgtgttaccgagaaagaagctaaatagctattaacaagagtgcataaaggctctacggcaatcatgccaaggggcaaagccaactgagtgtaggcgggatcgaactgtcccagactgcagcactgacctagcctctaaaaggatggccgaccatggccttattgggctagtcagccatagaatcaacaacctggcccaccactacctccacaggatggtcatccatagcctcatcaaactagcaagacgatgctccttcaacgtggccagccacctagtctgtaacttggtcggcctgacctgccaatagtctactctcatactttttgtctattataacaccacatattgctagcaaaatccattgataaaagggaagaaagaagagactaagctaacttaaagtggcatgtcttccagcaaaaagttgcaaggtacttgaacaaacaagtcaaggagatgaaattcttcgtaagatacgtagtgctctgaagaatattatgtagggcaatcagaatactactaccccaaaatctatcagaaattgtcgtcccagaatggcgttgtaagaagtagggcaatcaactattacgtatgtattgtacttgaaagaagacattgtattacttttggaaacttccccgtttattatcatcagaagttatatttttcccatggggatcagcgtgtctccattgaagccttgaatttgaattggacacgatagcagattggcttccaccagaccaatggctttgaaggctcctttgaaaatgatattcacagagcttccattatctacaagaattttggaaactcttttgtttgctatctgagcctctatcactagagggtcattgtgaggaaaatgtacatgcctggcatatcttctgtgaatgtcattggcaaattcatcaatcttgaacgttgagcaggcaatt

SEQ ID NO: 24750 - DNA, 1434 bp, Cannabis sativa
ccctccactacatgaattccttccagaaggtgatcttgaacagattgtcagtgaactaactgcagagactggcatgactgaggatgaagtttttgcaagagtggagaacctatcagaagtgaatcccatgcttggtttccgaggctgcaggtttgtgtccctctatgataattttagctggctacattgattgctgcaagaaaaaaaaaattgtgctttattgttcacaaatgggttctggtctccaacaggcttgggatttcatacgcagaactcactgaaatgcaagcacgtgcaatctttcaggctgctgtgtcaatgagtagccaaggatttaaagtctttcctgagataatggttccccttgttggaacacctcaggcatgattccatgcttctttcttggcaaaacttggcatgagaaatttccatcaaacttgaaagagaaaacatttttttttttattttatgcaggaactgggtcatcaagcaagtgtaataaggaatgtagcagagaaagttttctctgagatgggctcttccttaagctataaggttggaacaatgattgaaatacctagagctgctcttgttgcagatgaggtattgaaaattttccaagccagaagaagaaacattcataatttcccttcctgctaatagtgtccaagctaatatttttggaccaatgatgtaattagattgcaaaagaagcagagttcttctcctttggtaccaacgatctcacacaaatgacatttggctatagtagagatgatgttgggaagtttctacctatttacctctccaaaggaattttgcaaaatgacccatttgaggttagtcattcttcattgatcatcctgaatactccccctaaatcagaactttaacaccaaataaccatttcatttaattgtaggtacttgaccaaagaggtgtgggacaactcattaaaatggccacagaaaagggtcgagcagctaggcctaatttgaaggtaattatggcaacacatctttagtttttactcttttcattttagtagatttcggattgtgataatgataaataatatactcaggttggaatatgtggtgaacatggaggagagccttcttctgtagctttctttgctgaggctggacttgactatgtttcttgttcaccattcaggtcatacacacgtaaaaaaatcttttataattgactgaaaatgcttattgatattttgcatttggatactaagcaaaaaaatattttgcatttggacagggttcctattgctcggctggctgcagcccaagttgccgtctgataaagaagattgtaaactatttataggtgatttttcattgttgtaaatacaattacatatatgatatatatatgtggcgccatatatgtgtatatatgtgaagaaaattaagaaag

SEQ ID NO: 24751 - DNA, 1916 bp, Cannabis sativa
tatagttattattatacgcactgtctaatttcaactttgttcaccttgttcaagtaaactagacataaaaaatggagagatttggatgatgcagactttcgtgaatgtaaacaattgattgaatatgtacattactccatattattacctgaatctccctgaaaatggagattacagagaagcattttcaactggaccagccacaatttttccatattaattgtgtctgacccaaacaaataatagaagcattaagtaataaaagtaaaaaaaaaaaagtaataaaagtaaattatgatatctctgtcacatccaaaatcggacatccctgatattttagttatcataatttctttaagccaaatttccagaccattctactcccgctgtctccactaagaatttctgggcataaaaatcattggatagtcgttctacaagtcttctggatcctttgagttgttgatataactaatgaaaaaccagtgtgttaagttgttgctccacttcgtcccagttatgaactttggtcacaagagggtgttcatcaatagaattgattttgcaccaaggataggagttctcataatcaaaaagtagtacccttattccaacattagcacactcgatggcgtacctaggattatcatcaattaaaactttggctcctaaagatctgacagataaaggtaaacaaacgagatcaaacacgtcagtaggcaagcgtaatccactaattagctcatttgatacagtacatgcacaagaggatttcaaattatgaggaaaaacacaaacacacaagagtagatcataagcaatagacatacctgcatatatcagacttaggccttgaagctccattaagagcaaaatggttaccaaagtggatctcctgaaacagacctggaaagtgttcctcaatccactggatcgtgtggtccttaatggcattctgcctagacctatagacacataaaacaatcaagttaatatagattcacgtccaaatatgaaaatatttgtagtcatacgtacgtcacaacagaaaggctacagaatcttgatagcttgtgaatcgctttctgagcacctggaagagggtggatcccagtcttgaaatacggtgtcttaaagaattcatgtacacgaatatcagctgtcatggcacaatagtagttctaaaatcaattgaccaatcaaagtacgctaaaaataattgcttacaaaaccatctgaatgaacagcttttcactgtagatgatagtaattttctttgacaatagtaacacatttggaaaactcgactaactgttccatcgcccattagcaaaatcagtgcattgttcaaaattcaaataagtcaattagtgaaaaatataataccttcatcccgggagcagttccatatctgcagcacaaaaagtagatttcacaataagagtacatccacaactgtaagttctcctccacagtaaaatcctcatatagggacaaggaaaatatgtgataaagttattaagaagttgacaccaacctgatactacattatctcaagtcaaactgcagaaaacatatgttgttctagtctcttcaggaaggatcttaaagaattaaaattttaaaagaccacacaagacagaaagactaaaaatgtgtcaaataatataatggaccatggaatactaatgaggtggtaacgagatataccttgaagaactcatacacatggtattccgaaactgaatggtttgaagaataacggtccgcaataaacctgttcaaagccgacacaaagtttcccagaactaaaaacgaaagagcacaaaccatgtgtcagaccctaataaaccccactcacagatagaaaaacctacataagttagaaccccatgccttaatacacagctactata

SEQ ID NO: 24752 - DNA, 1231 bp, Cannabis sativa
tatttagtcatggaattccacagtctttatttaaaaacgcagataataatatatatttggtagaaaatttagtgttaaatattagagttgttgcagtaaaaagtaaaatgttttacactaaattattgtagatttcacattaaattaatatattggaagaaatggtgttagttgttacacattcacaatataaattatgaagatgccaattttgcatgaaattaatcgatatttcaatttcacacgattagttctgaacctccttttatccggggtcatcattttcttaggtcctagtatatttcttcttttttctacatcgaataatgatgagcactaaaaaaatcaatttcactcgatattttgctctctacctcttttgaaaaaaattccaatacactaatctcttttatttcaatttggaaatgatctactttcatcattatctcttagaccaacaaagtctatctgtatttgcttagacaagtaatttaagttttgcaggtttgcaaactatacatgagtagaaagagctattgttattgatatgatcaattttcttcaatttatagtattaaccaatttgttgtacttctctatctcattttggaattttcttacttcaaatgatcaaatcaacaattattagtatccacagttatatccataactatacacgtggctaatggcagagagcccaaaatttaataagggcaaaacacatgatataaaaaattatttattatttattgtttcacaaataaattttaaaaaattgagagccatgaaccttggacctcctatctcggtcaatgagcatggcttaatggtaaaatagtagtgagtaatacacatataaattacacataaatttgagaaacatttatgatataacaaaaaaaaaaaaaaattcaattaatcatattcatatatttaaatatttataataaaatatttttttttataatttatgaaaaatgctaaaggtcatctttaaggaaccactactacaaaatagtgttattgtgtcggttcatgccgatggcccaagccaacagagagatatcgataaccacctaaatttaaattaaagatttgtattaaaaaattatttaattttgttaatacttttcgattaaatttaaatatttaaaataatattttcttaaaaaataataataaatttattgatttaacagtgttagtttaactattaactttaatagaaaaa

SEQ ID NO: 24753 - DNA, 3900 bp, Cannabis sativa
ttgtaaatagacgtgtgagtgtaagacgtgggctatgccacatagacataaataggcgtgtcagcgagacacgcgggtctatgtcaaatagacaataaatttattggcatgtttatatatgtgatatgtgttattgtgtatattgatatttatgctgttttactgggcttagctcgcgagtgctctacgatgcaagaaagggtaaatatgtctgtaattagccatgagttcgagagcttgacgatggattgtacatgttcgggccttactagacaaagcgggttgggatctaccaatgaatttattttgaaatctcggatttttgccgcttcggttggcatgtaaattaacttgtaatattttgtgaaaagtttttgtgggatcccgaaacatgttgtctttttgtattgttgtaaagtttaaattattacaagctatattttcattcgattacaattaaagtttttaaattttcctgctcttatctatctagtaatccaagtttagagggattaggttatattactagttgtcatagcgtgcctaattattaaggcgttacagtttggtattagagcaccaaggtttttaaacttcctgtagaccggctaaacatgtacaatcatcgtcagagacaagctcgactcgtggtgtagtaagtgttgagagtaaatgcttaactgtttatgtgattgtttatttatcgctttccattttaggtagtatgtgagcatctagtatatgcgttatgaaagccacgattaatgtagtaattgataaatttttatttaataagaaataaaatattcgagttggggtttaaggcaacaagtgcgtgagtgtggtattagtgcctgacttgccggggttgttgattacagggttatttatgaagatggaccctccgcaatcatctggaccacagggcgagcatgtagagcttggtgttgaccaaaccaatccactagcaccgcctgcgcctccacagaatctgggggataatgcgacggttgataatgctaatccgcctactgattggaagtagatgtttcaagaaatgcgaagtatcatacttcgtcaagaagatgaattgcgccagttgaggcaaccgggatcaacagctcttataaagcaagtgttaccaccagctcgtgtgccagtggtgggtaacccgggatttatactgtcgcatagagatcctgtatttgagtgctttgtgaatctacaacctccaacgtttctgggaggtactgatataattaaggctgaatagtggatgagcactattacccgcatcctaaataatatgggagtgacgagaacagaaagagtaaattatgctgcttttatgttacaagatcatgcccacgtttggtgggacattgtggggcagacttgagacattagtactatgacttggaatgagtttaagagtctatttgaggaaaaaaattataacatcactgtaaggacttcacatatatggaagactttgtgaagctgactcaagggaaaatgatcgtggtcgagtacaccttggaattcgatcgactatctaagtttggtggtaatctggtaccaactgacttcacccggaaataaaagtatgtgaggggactgaatgccaaaataagtcgagacttgaagattaccaccgctgacgaccctttatacaagaaagtggttgaattagccttgatagcttaagaggcggagcaacatgtaatgaaagagtagaccgcaaaggataccgccacaacatcgaatccttctgtgggtggtaatgtcagtaaggggaatgatagtggtaaccctgatcataaatggaaggttgaagcttctaaaacatcagggggtaatagaaagttttagggaaacagaggtagccgtcaaggccgcgggtcctcattcagatcatatccagagtgtctaaaatgcaagaaatacaatcagggtgagtgtcgggccaagacttactttcagtgtggcatggtgggccactctatcagagattgtccacggactaagaaagaggagccaaagaagaattccaacctgaactcgggacgtctatttactattaaccaggctgacgctgatgctagcccgtcagtggtgacaagcaagttatccattaacagttgttcttattctgtgttatttgattcgggagctagtcactcttatgtgtcgagtagagtaattgaaagttttcataaaccatgtgatgtctatgctttggggttaggtaccctgttaccctcgggagacctaattgtatcagtggattcggtccttgtctttttgcattgacagttatgagttaaccaccaatctaattgagttataactgtctgattttgacattatcgtgggaatgaatttcttgtctaagtatggggcgacgattgattgtaagtggaagatggtggtgtttgagcctgatagtgccaacccagtggtgtttgtgggtaaagtttagggaatgcgcataccaagaataacacttttaaaaactaaagatctgttgtgtaaaggttgtctaggattcctagtcaccgcagtggataccagccaacctgtgtgatatggacctgagaatacgagattggtgtgcgaatttcttaatgtttttcctgaagacctaccaggattaccaccttcccgagaaattgaatttgtgatagagttagttttgggggcaaaaacagtattaaaggcaccgtattgaatggctccagcagaattgaaagaattatagatccaactccaggagttacttaacttgggattcataagatcgagttattctccttcgggtactctagtgttgctcgtgaaaattaaagacgggtcactgtcgatgtgtatcgactattgggaattgaacaaactcactatcaagaataagtatctttaccccaaattgatgacttatttgatcatctgaagggtaagatggtctttaaagatcgaccttcgctcaggttaccatcaactgagaattcgagaagaagatatcccgaagactgcgttctgtacttggtatggatattatgagattttggtgatatcttttggactcaccagtgacccagcgacatttatggaccttatgaatcgggtattcaaggattacctggacaaatgtgcgatcgtatttattgatgatattttggtgtattcaaagttagaagaggagcatgaactacatctcagatcagtattacaacggttacaagatcacaagctgtatgctaacttcaagaagtgtgaattctggttaccacgtatctctttcctagggcacatagtggataaagatgggatcatggttgatctgaccaagatcaaagttgttcgagattggccaacaccaaaattggctactgaagttagaatctttttgggtttagctggttattatcgtcagttcgttgagggtttctcgaagattacagtacccctaatagaactgacctagaacaatttgaagtttgtttggactgatcggtgtgaaaaaagttttcaagagttaaagcagcgcttgattaccgctccagtgttaactcttccttcagttaaggataagtttgttgtttattgtgatgtctcgagacagggtcgggctgtgttcttatgcaaactggaaaggtgatagcttatgcttctcgacagtaaaaggaatacgagcaaaggtaccctactcatgacttagaactcgcaatagtagtatttgcgctgaagatttagcagaattacttatatggcgagaaatgtgagatttacactgatcataatagtctgaaatacttcttcaaccaaaaagtcttgaacatgagacgaagacattggcttgagttggtgaaggattatgactgtgagattctttatcaccct

SEQ ID NO: 24754 - DNA, 3340 bp, Cannabis sativa
tcttttattaattagtaaatttgattatattgaaataagttttatttagggcacaaaacccaacactggctacctgccctcaaggtaacttgcctaacacaatagaggtgaacccaaaagaaaactataaagcaattaccttgagaagtgggaagaagtatgaggggcctaatgagaaacaacaagtggaagaagtgattcaagatcaacaagcccaaccatcagaagagaataagactactgagggtcttgcatgaaaagaagcttcacaacctgttagcattgagcgccatgtgaagatctcttatccatagaggtgccgaaagacctatctagacaaggagtttttgaagtttttagaaatattcaagaagctgcacattaacatcccctttacaaaagccttgaaacaaaggccaagctttgtaaagctcaaaaaagaactcccgtccaagaagagaaaatggaggattatgagacacgaggagtgtagtgcaatattgcaaaagaaactccctcccaaacttagagatcctgggagttttaccataccttgtaccatcgagagaatagagggaatgaattctctttatgatttgggagcaagcatcaatttaatgcctttgtcagtttttagaagattgcaattgggagaagcaaagcctaccaccgtaaccatgcaattgggtgatcattcgttggctcatccaaggggggtcatcgaagatgttctagtcaaagtagataaattcattttcccaacagactttattgttttggacatggaagaagatagtaatgtacccatcattcttgggagaccattcttggcaacaggccaagcatcgatagatgttcagaagggaaactgtaagataagggtggaagggggttgaagtggtttttaatgttcttaaggaaacaacttttccaaaggctagtgatgattgtttctctattgatctcatggacattatagtggaaaagaataagttgactgagattcgcgagaaagatggaagttaggtgatggaatatgaaaagtagcttgactcctatgagccattaaatagaaaatactttgaagagttgggggtcgttgccatctatacagaagccatcagagcttgagttgaaggttcttcctgatcatttgagatatgaaatcttaggtaaaaacaagatgctgccagtcatagtgtcagcttcactttcagatgtggagactgataagtagttgagagtacttagagcacatacgaagcccattgggtggacattgggtgatatcaagggaatcagtccctcaaccgttatgcaccaaatgttaatggaagatggagctaagccaagcatcaatgcacaacgaagactcaacccaccaatgaaagaggtagcgagaaaggaagtggtcaagtggttagatgctggggtggcctacccaatttcagatagtacataggtcaacctagtacaagtagtgctgaagaaatgagggatgacagtgattaagaatgaaaagaatgaattgatccctacaagaatttttactagttggcaaatttgcattgactaccgaaggcttaataaggcaaccaggaaataccattttcctttgccatccattgaccgtacgctaaatcgattggctggacaagagtacaattatttttaagatgggtattttggatgtcatcaaatagccatagcaccggaggaccatcaaaagacattatttacgtgtccatatggctctttcacttttaggagaatgccatttggactatgtaacgctccagcaacatttcagcggtgcatgatggctatcttttcagatttgattaagggttgtataaatatttttatggatgacttctcgattttggttcatcttttgataattgtttgagaaaattggagaaggtactaatcaagtgtgaggagtcgaattcagtacttaattggatccccgattcatcggatccattaaagctgtgggagcattggttagtccaaaagacctaaccaggaattcataatgctcatatctagtgcaaaaagcaatctttggaatgtccttatctcggattctcaactgatgatagcctgatcaaagatcaatcttagagaagactatcttcctctgaagttgactcaaaaggtcatcgatcctaggtaactagtatttgttcttggcaatcagtttatttagttcctggtagtcaatatacatgcgtagggatcagtctttcttcttaacaaacagtacgggagctcccaagggtgacacactaggtcgtgaaaaccctaggtcaagcaacccctgaagctgaattttcaattcttcagctggagccattctgtacggtgccttagaaactggtctgctccaggtgctaaattaataatgaaatctatttccctctgcggtggtaaacctggaagttcatcaggaaaaacatctaaaattcttgaaccaccctgatatcctctggccgaactgtctcaagccgtgtagtatccaataccactgccagaaatcccaagcacccttcttgtaacaaatctctagctgttaatactgggatcactggaatctgggatccctgaactgatcccacaaaaacaaacagttcttctccctcaagttggaagatcaccatctttcatttacaatcaatactagttgagtacttggataagaaatccattccaagtataatatcgaaatccactaaacccaattctaccaaatcaacactcaactccctatcctcaattctgattggtatagatctaaccaaccttgtggagataactaattctccgataggtagtagggttccaaaacctttatcataactatcatgtgggctacccaatttatcaaaaaatttggctgccgcataagaatgagtagtccaaaagtcaaacaatacaaagaagtaagagttgttgaccgagagctgatctataatagctgaggggctagcttccccatcagcttgagttagagcaaacacccttgctggagcgagttttgctactaccttttgatcatctttcttgagctgtgggcagtctctcttatagtatcctgacaacccacactggacacatcctcgccctctacactcacctagatgatgcttcttacaactgggacattttgggtaagtgtatcgggttttagaaccaccatgattgttgcctcgacgctggttccctcggaacatcttgatctgacttaagcgaccgggtgcaaatggttcctttcatttttggttggtggttgagtaactaccacccctaccataaccagaggtaggaggagtagtgg

SEQ ID NO: 24755 - DNA, 2039 bp, Cannabis sativa
aaatttaattatgtattatatattaaaataaaattatattttactacaaaaaaaaataaaattatatttctttatatataactaatattctattcttatactatttttttttaaaaaaaaaaaataataatattagttgttgcgttaaatattttgaggtattttaatctttattttatagtattttattaggtacactaagattttaattgtattaaaatttttaagttaatgattttatgaaatatttaacttaaatgattggtaaattttatgttattacctatgtatgtttaagttaatattaaaaattaatttatcaaataaaatctaaataagaaaactgaactaattcattatattgaattttgaagcttaattggattggattatacctttccctaatgagtagtgtccattattactacaaaatattatatgtgtaatactgtatatattttgatttaataattatagtaaaaaaaattgttattagtcactacttagaggtagcttctagcgattagttaacaatattctataaaaattattatattaaattatatgaaatttactatttaattacattaataccgttagcatacgttagaacatgttaaacactattgatatcttttagtgtttgtctattaaaaatggctaaccattatcaaaatgtgagcaacttcaagtataggtatttatttcttttatttttatgaagaggagcatttaatgttggtttgtaatatggatgagttgaaaaaaacttgagatttgggttttatttatttcttttgatttatttttatgaagaggagcatttaatgttggtttggatatttggctttttaaatttacttattaatttttgggcaaagttttagtaaattttgtgatttcaatttcataaaaatacattaaagtgatgaggaatgcactaataatctaacttaacaacaacgtgggtctcaccattttttgtgtttatttttctcttaaaataattgtactaaattccattttaaaaaaaaaaaaaaaatgtactaaattgtcattttgcaattttgtcttgtagtaatgaggaatgcactaataatcttatgattaatttttttaaaatgattcattttaacattttttttttgttctattgtgttagttttattttattttttttaaaaaaaataataatcttgttttcataatgtattaaaaaacccttttctggtctaaataataaaatatatttatttaaaaaatgtgtatttttattttagatatgaaaaaaaaaatatgtaagtataggttagaaaatatattttttataaaataaatttcatttataaaattgtggagggttaataatataccctagtttaaagccaatttagacaatttcctgatttttctctaaagagacaactttggttaaaaaaagaaaaaaagacaaatttgttaacttatttgtatttttaatattgttttctttagtgaatttttaatatagttttatttagttttctttatttgtatttttaatatagtttcctttagtgaatttttaaatcaaaacattccaaatgcaaattttttatgattataaattaatgagaaattgccaaatatactttaaaataattgtctatattcgatccaatttaagtattttatttattaatttattttaaatattttaaagtcttcactaataaatttataaaggtgatgtgtcattctaatcctgacttttttcattacacacaattatatatgtaaagaatcaatgaacaaatcatattgacaatgacactttaattgtatcattatatattttttatatatgtgtgtgaaatttcttcaatatgtcacccaaaaatacaatatatatcaaaaagtgaatattctataattaccattttttaattaattatatatacagtagaacctctatttaagaatagacttggaattaagcaaattatattctaattgagaagttataactaaatagagttatactagaaaaaaaattaaaa

SEQ ID NO: 24756 - DNA, 988 bp, Cannabis sativa
  modified_base (26)..(30): a, c, t, g, unknown or other
gtatttttgtaattttttttcctttnnnnnatttttctgtttttttcccttttattaatatatattgatatagaatatcaaattttaaattttatatacttttatgatttaattatatcacggaacaaaatataatataaatttaccaaaaattcttaaataaagaaaaactaagtaaactttgggctaaaatttagatacaatcacatataagttttaatataaaattcttttaaaaaaaataaaaaattggatctaataatttggatatgatccgatccaattaagtcaggtcaaatcaaatttgatccgaaaaaaatagtccaaaaccgggtgggatgggatggataatcaacagatacatatcaagttgaattatagtcggatcaaatccgacttaatctatttacactcctaattaaatgtgttttgaactaaatagtgcaaattgaactagatatacatttttagaatataagcttgggaatgagagttgtcatggaaaaattttattccccttttgctagtaagtgaaggagctctaacgaaagtaatatattgttttggtttgagctatattataaatcttgtattcttatatataatttaatttcgatgattggttttttcattttttttttgtctttgacttaattattctaaacttggggttggtaagagattattacgaaataaattaattaattatcataaaacatatatagtatataaacattgtataatgatgtgcgtaattaaataatactttcatcataaaaacgtagaaatgtgatacatggttatcatgatcttatatatccaataatatatacatcaattattgaatttattagtatgattattatgacggtggtaattgatagcattattaagtcctctaattatatgtcaatataagtagccaacatattaattagtcaaatatgtttcgtacgtagatgttgatcgatccgtcaaggcctcaagc

SEQ ID NO: 24757 - DNA, 3238 bp, Cannabis sativa
tctaaacttgtttaagtcaattgtctttgtaattgttgatactttattaattgatttcaatctctgggtgtggccccgtgcaaatatctgttctgcaattatttttatattctgtctgttctgttttgtcgctgcaaaacttgtctctacagtaacagaattacattctgcttctgcagacgtatacaattttatatttttgtatatattattgacatttgcaaaaactcagtttttcacaagagaaagtcaagagagtaatttttacaatgcaagtgggtttagttggtttccttgaaacaaaggtacagtcttacaatttggggttgtatatgtaaatatgttttcgggatggtatttctggacgaataatgcttggcataaagggggaagaataatagtgagttggaatctagggatgtttgcagtgaatattttacaatacactagtcaattaatgcatctgaatgtcatagcaatagcgggaagagaagagtttatggtaactttcgtatatgctctaaatgatgaaataggaagaaggcaattatgggaggatttgattagtatttccaagaatacaagttttccatggattattttgggagatttcaatgaaatattgagtgtggaagaaaggatcgggggaaacaaaaaacaacatccctctactttgtttcgagaatgtgtggtgaaatgtttcacggaggatatcaaattcttgggtagtttttttacttggagcaacaaacaagaatttattctaagatagatagaattctagctaataaaaaatggctagacaagtatcctaatacagaagtacactgtatggaggaatgaatatttgaccattgtctgcgaatccttacgttaaatccagaattaagcaaaggcaagaaaccattcaagtatttcataatatagctggggggacctgagttccagaactggttaaaagaaatatggtagaagagaataggcgacactcctatgttttagatagtccagaaaatgaagctcttgaaggcttaactaagaaaaatcaatagaagcaagtatggggatattcaagccgaagatgcccgggtgtacaataatctggtgcaatttcagcaggaattgcagtagaatcctagaagtaaagagttagtggagaatgaaaaagttgcccaaaagaactatgctgagactcatgctaattacatctcgtttctacaacaaaaagccaagttaaattggcttaaggaaggagatgataactaaagttttttgcatgcaagtataagagctaaaaacaaattgaatttattcgaataaagaccaacacaagcccgatcaggtaatcgaagctttcttagacttttatcaatctttacttggccagaaaatgaatgatatgaagaaggtaaagagaaagatagtgcaacttggtcctcttatttcaaaagatcaagctagttttttgtaggctgatttcactaaagaagaagtaaaagcagttgtgtttgagatacctggtaacaagtctccgggaccggatggttatggaagctttttcttccaagacaactgggatattgtgggagatagtgtttgtgaagcagtgctgtcttttttgcacataggaaacttactcaaagaaattaactcaacaacattgactctcattcccaatagcaagtgccagattcagtggtggactttagaccgatagcgtgttgtaaaactatctataaagttgcaaccaaacttatttgcactaagctgaggaagattcttccgcacatcagatcttagaatcaaagtgggttttttcaaggaaggtacattgcctataatataatggtgtgccaagacttggttcgccattatggaatgaataacttgaagccaaaatgtatgatcaagttggacttgatgaaagcatatgatacaatagaatgggattttattggggaaatgctcgttgaactaaagttcctgccaaaatttataaacttggtaatgaactgtgtgagaactccaaagtatagcttgatgtttaatgggacaatgcatggattatttgaagagaaaagagggttgcgacaaggagacccaatgtcgcctttgatttttgtgttgggaatgaaatatttgtcaaagctattgatgaaagtgggtacaaaagaagacttcaagtttcatgaaagatgtgggaagccaagggtaaaccacttatgttttgctgatgatgttattcttttttgtcatggtgattatgtgtcgatttatagaatgctgcaaggcctaaaactgttctctaatacttcaggtttacaaccgagtgataccaagtcatcaatttattgttgccaaatgaatgaacatgaagttaatagagtggctgcagtttctggtttcagcaagagtagtttgcctttcaagtatttggggattccagtatgtgcaaggcaaattccagcttcagaatgtgagattattattgaaaagatggtgcagagcataagagtttggagctctcaaaatctatcatatacaggccgagcagtgctagttacctcagtgcttatgtccatccattcgtactaggcccaattgatgattattcctaagaaagtccttcagagaatcaatacaatttgtaggagcttcctttgaaaaggtttagccgaggcaaatggtctaggactagtggcatgggatggaatctgcagaccaaaaaaagcagggggtttgggtttcaggagagttcaagagtggaatgaagctgcaatagggaaatatgtctgggcagttgaaacaaaacaagattccttatggatcaaatgggtacatgtagtgtacttggaacaaaagaagtggaaggaatacggagcacctacaacaagtagctggtattggaaataggttgtgaaagtgaaagagaaactcaaggcaatccccactcttgattactctaagtagagcaattggattaaaagaagtttgcaaggttttatgcccatctacttagatacaactatggcaaggaggagtttggaacaagctttcaattctgaaacacaggtatattttgtggcttactgtcattgatagattgaggctaaaagaaagactatttaggttaaggatggttgataactctaagatttagagttatttttatatctttaagcttgaattttaaagtgaattgtggagcaattaatgtctatattgtgtaattgtgttt

SEQ ID NO: 24758 - DNA, 1748 bp, Cannabis sativa
accacaacactctttcttgtttaatcaattactccctccattcatcactcatgatcattaattcttctctgaaaaaagtcaaagatgcccttcgtttttattacgagtccatagtgtgtaacatttatagatcttggcttggccccatttgcatttagttagaagtaatttttgatatggaattgtacattactccatattctcccatatgggttgatgtatttgtttgcttgtttttcttttcttggtcatcagtatggtaggtgtatgtatgttaattatagttttgctggcattggttgtgaattgaatgtgtatatttttttgattttgattatacatacaatgtttataaaaggacaggttaagttgttggtaacattagcaaaacattaattgattaatttattttatttttgtttataaatatttctttctttacaatgcagaagttagatactttggccttgcttgccggatttctccttttagcttattaggaagttactaaaacgattttagttaaaaagaattttttaaagttaaaaaggtgaaaatttactatttacccaactagagtaaaaatgcatttggaatttcacaagttcaaaaggaactagctttaaaaactgagcgagcacttttaaatggtgagaaatgctaagagcatttctaatgggagttatctattaaagtgatcttatcacatatatgtaatgtggtcaattttcaagattaattttgtgtgaagtgttgtttatatcacatgatattttttttaatttttaattaaaaaattacttttcacttaaaaaattattaaaaatattatcaattatcaattatagtgaacaatttttacgattatcaattatttaagtattttattttaaaaatatgataaatcttttgtgaatgaaaaaaaagtaaaaaaatttatttaaaataatgtgtatattttgataagtgtatatattatccgtgtgccaagtgtgcattttaatatcgagtttagtatattctaactttttttttttttttttttatgatagtatattctaacttaataaataacaggacaccaatagtatgaaatatagcattaatgctctgacatgtcaaggaaataggactataagaaaacaattcaaataagaagacttaaaaatcattaatttgttaaagtggtagaggtagggttatttatgtctatatataaaatatataataactacggttttgaagtggcagtactttacgtccacgtgaacagattcccatgactcttcccagctagcgaccattcctaactatataaatgaaagccttccgcttatagtaataatgtctagatcgatttctccttctaagtgtgagagaaggaaatcagaagaaaagagggatttcaaagcttaataattttctgtctcaaatattagagatcaaaatgtacagagacatatttatgtatatataataaagacattcctacccgggttcacttccacttttctggtttagagcttcaactattctgaatttgtttacactctctatatataaatgttggtgcttttatctctatgcttcagtaactcattcatcttctttggctgggaatatgtctccaggattttccctgaatttgaggtatgcactattcttaatttcctttcatattaattatgatttcagatgttcatatataaaataaaacgtatttagtcttggagagtttaaattgggaa

SEQ ID NO: 24759 - DNA, 5586 bp, Cannabis sativa
gacctcatgcaaatgtattccatagtaagttacatttactttttgcattaaaattaagaagaggcccttaaataactaaatttaaatcgggtaactttactaaattttaactattcttttacaagcaaatttaactatcgtttctgcccaacaaatttattgtacctttcatcctttcaagaaagactaggactacccatatgactacacacagccacacaattttccgtataatattccagtttttaaattagtaaaaaaaggaaaatattagtaaagaacaattcttttcttgaacccaataaaggctttaagtaatatatattgtagccttgaactatgatatgcagactaataaatgaatacggagaagaagaccaagtttcttcagggagtgaacatttcctttatatgagacaaaaaagtactcaaaactttgggccaggttagcaataataatcttctgcagctgaagctcttggtttgcccaaatgtaaccgtttaacagcaataattatggaagtgaaaaacttaagatgtcatagcagttttgttagcactttccctaaccattgttttgacaaagagctctcccgccctgtatgatgatcgaacctgaaaaattatacacgttgactacttaattgaggttttcttttagtaattgacataaaccaaaacaaggttaatccaagacaaatgctttcaattaattttatcacattttctatcggtcaaaacattatttttttatgctgtgtttggggaaacaatgacaaatagtccaattcatgcctttgtatgtgttatcaaatgcttaccaataatgcatcacgaaaaataattgttgtcataaataaaccaacagtaaaagatcttaccaatggcccactggccacataacggaatcctatagactcgccatattccttccagaaagcaaacttctcaggggtgacatattctttgacagtcaagtgtaatggagtcggctgcaagtgtttataaaatctagtttaaaatgaataacattgcaatcgctcagtttagcatgtagattgacttgacttacttgtaaatattgcccaagggtcaatatatcgacatctatagccctcaaatcggccatggcttccttcaactcatcatctgattctccaagacccagcattatggaagattttgtaatcatgccctccttactgacctttgcatgtttcaaaacagataagctctgctcatacctgcaccaatgaagtacatattaaatctcaagggaacaatcctcctaaagagtgtatatactctagctacatacactaaccataaactgaatttctctttatctattctttaaaatcagaagaaatgagtggctggattaataatacataaaccataagtataccagtacagagataaaatacaaggttcacttcaaggttttaacatctaaggttccggaaagaaataaaaaataaaagacttaagggcaggcacaaaacagctaatgggaatgtaaaatgtggacattctttttctactttcatgtggggtgacttattggagagtcttggtattttcaggcatataacaattatcattcaaagttatcaattgatgagggaaaagctgaaggcattattaagatttagcttcactctaatcatctaaaataatgaagaaggccttcatctctgacattgacatttagagcccagagaatcgaactttgctgccatcaattcttatgaagcagaataacatcaatagtaaaggtgaaaaaaaaaatcatcaaaccatatttggatcagcataagaactgcaacacaagtcaaccaatatacaaaatggagatcatgggaaacaaatcaaaaaaaatttgatgtattacgaaaagtagcgtacaatagagatatagtgctatgatccaactactaaaatgaaatttcacatcaaacactaaaagataaagaaagtatacaacgaaggtttaagacaacaatagcttacccagctcgaggatctcgaacaattcgttggagacgtttaacagtctcaacgttgtgtgcaaatacatctaatcctgagtgaaccaaagtgtccacagcagtcaagtcacccctaaaatcagaggttaaacactcaaccatgatttcaggctttaggttctgcataaagggaattgtgtaagcttaactaagtctcctcattccaatctcgtaattcaatatcaccaagttctaacaaaatacaatcaaggaaactgaaaagtaaaatagagcagttagataatacaatgaactacatagaaataaagaccttcatggcttttacagtctcagcaaaatgcccacttcctccatcaggtatatcatcacgatcaacacttgtgagaacaatataatccacactgcaaacaaaaacgaaaacgcaatccaattacttctatgcattatggacaaaaagtaattgtgagacataaactaaaactatgcaacagaaacaaaaaaccatacccccaagaagcaatggctatggcggtattctggggctcattgggatcaggcggaggagggtttctgctagttttgacggcgcagaatctacaaccgcgagtacacgtgtcgcccaagagcatgatggtggcggtagcgaccccatcgccgccgccattccaacattctccaatgttagggcactgagcttcttcgcatacggtgttcaatttcaatcgggagattgattccttgacttcctgaaacttctctccctgcggagctctctgcttcagccatgggggcttctggacgttgggatccctcccggtgtaggggccaacggcgggcaatggcttagagtcgacggccttgcattgaatttggaggagtgaatggaagggtttggtgagatgggaattcggaaatggaacggagattgaaaaggaggaagcagaagaagtagaagcagaggaattagaagaagaaatgggaatggggatgggaatccggtggcggaattgctgaagcattttggaatcgagggaatgaagcaatcaagtactgatcttctactttggaatgggtacgattagtttttatttatttatttatttaattttaacttcttcgagatctccgtctgtttttttggtttggttagttgccaactcccaacctcttcttcatttttatatattgacaagagattacacattttgcaagtgatatatatatataccactagtaaatatagtgatttataattttaaagtccaaattagctataaataaaaccacgtcctgttattgtattgattgaaatgatacggccattgctttcaattttcatattcagcttttgaagcttttttttcaggctttaaagtttttttgtacaacttttcttcgatatttttaaatgacaataagttttattagaagaatctctctcctttgtaatgttgcccttttatttttaatccaataaagtggttcttaaataaatataatatatattggttttgaaatttgaatttttcttctttcactttcatgtatgtaggccaaatggactctacccacaaaaatatgattcaaaaacttgtgttattctttttcttgaaaagttacttgagttatcaagctcactttaactcttctaattatgtttctatcaaaagagaaaaaaactattctaatcatgtcagtacaatttatgataacacgtactttcagtagtcttctcttagttttttaagatggggcacagtaatttatacagtgtgtagaactttttgtgtaatttgagggtgtttctagtactattactcttaaaaaatagtctccaatgcacacatatcatattactcttttaatagcaaattaacaatctggtctactcctaaaaatctttacctttggttgcccttcagcacaagcttggttttagaggagtgaatcacctaggcctactctactattcactgacttcatatgaagccaaataacagcaaggatgccaaggacatagaatcaggccagagtatatatatttctcacaataagaaactaatatataaattttccggttacattttcaacaaactacttattcatgctctcccccaaaattttctacatacatgactgatattgtagaaaaaaacactaactcatgaactgttctataccggttttcttgtcgataaaggcataaagtgaatcctcacaatattggttaaaacttatcctgaatgaatatgaatcaacgatcctcagatgggtcctcaatagtttcttctgaatccgaactgtcatcaaccattttctggagtgattcaacgtcccctgcttcagaaagtgtgtgcattcggagttggtcggcatcctcactgaggatcaaagaaaacaataaaaattaattgggcctgtggggcaaacaaaattccttcaataaaggcttgagtatgcttttaagttttaaataggaagaaacatttatagatataacaaatgcaatggatagggactagggaggcctactctgcaacaccaaatatttccttgatgaccaaggagctatcctttgtacagaactctggcaactgacaaaaaatcaaagagcatagatttaacatgtcaatggaaaaagataatgctaatcagctagaagttagaagttagtgtaacaaaaaaccgtaccaaaattcagcaactataatatttgaaatgagatataacagatgacatgtagatgaatttctgttcttttagaaaataaatgtgaggttcatgtaaacatgtgaaactatagtatgaagtaattgattgccataattactattgtgtgtgaaaaggaatgttgcatgatgaatatttgaacaaaaaaaatactagatggtaacgaaactatttaatcaacccatacttgaacttcaaactgaaagttaaccaaaaaaatgtttgtagcagacttatatggctaaattgctcatgggcttattcagacaagactaactgaagaaaacttgtttagaaatgtaaccgctatttaagagacgtggaaaaaaaacgatcaaaaaccaaacagaataaaatatgctctagaaaaacacaagttgggtgtatattgtttcacacaaataattgaaaaaatggggaaacagcagttggttggggtcgtctctagactgttcagtgtcttacctcagatagatagaaaacctttccaaaaagagcttgaacagctagttttctcttgaaacccttttcagtgtagcctgacaaatccatcacaacaggacctggagttcataaacaagctatcagcacattgaattacagagcccaaactatatccagttttgtctagaggcctggggacaataaaaggaataaaaaatcagacagcactgctttaccaagaatcataaatttagagcagcaatcaaaccgataaagaatgaaagattgaaggtacaacaagacatgatggaaagtaaaacaggaaactaagcattaatactcataaataaccttcctactttggttagcttccaagtcctgagttctttgaaacgtactc

SEQ ID NO: 24760 - DNA, 2664 bp, Cannabis sativa
  modified_base (1429)..(1442): a, c, t, g, unknown or other
aaagttaagcaaacaaacacattttcactactcttctcacaatacttttagtttaaaagcataaaaaataactctataccatagagttatcagataccctaatgtgtcttgataaatagtacgcaaactaaaatgtgaatagaaaattaactttttactcaagcaattaaggaatatgtaaagcaattctaaatactattcaaaatatttgaagtttgctcttaaaaattgtttatggcagaatactatctactcgcgcataactaaggtagcagaatattaactgctcatacataggcgatcaaaatgtgttcaaaaacgttcaatcgtgtaaggacatttaagttggtaatatacccaaaaggcaataaccgtttgatcacaaaaagagtagatcgaataaatggaaactaatgggaaaagaacagtatgaacattaaatgttaaaatgatttaccttaaagtttttaaccgccaaaatgaaagcatgcaatttttaaatggagaaaatacaataataccattaaggcatttaaaaaatcctttttattttaaaaagcactttttaagaggcaattgttatacccatattttgagaagtaataaaaagctaacacgtgtaacaaaactggaatatgaacaagctcaaattatgcatcaataacttaaataactcgcctcaagaaatataattagtagaaatacttgaactcgtcgtcatatagacaataatgagacatgagtaataactaccgattaatgagaccagcaaggtaaacaagtctatctcaggataaacagagtacataatggtactatttggaacgggtagataatgagtttgtagctcattgacccacatactcgtgaaaatattggaagaataaagacaacaacttcaacattcttcatctcgctcttaacgtgttgaagtaagcatctcacctatacttcactcaacatttaaggaagaatacgagatgtattacaactatacacttagacatttttccacggatatatttaaaaaaagtgttaattgaatgacgagaatcacaaagcacagtcagcataactatttatagataaatacaaagagcagttaggcagttatttataatcatcccatgtgcataaaaataaaacgtggggaatgtccacgttttacgagcaattacgaatgatcatatcttaagagaataactgtcattccaaactcctataaaaagggacagagcccaagaacaaaagggcggtcaaccttaaaaaaataaacaatattgtatttattgttcattcttgaaaaataatttattgtattttgtatacaatcttccaattctgaataagatggattggtggattgcaaagatttaattttaaaaccacgtaaaaaaatttcttgtcattcattattattattattatnnnnnnnnnnnnnnttattattattattattagatagttaattctaaatttttatttatttaagaaaagatttttagttaacgaaaatttgcgttaataattcttatcttgtattttatgtttagatttaatgtatatacatttaaagatttattgggttatggtacaatgataaccaaataatatgaactgttacgttgcatacttgatttaataccaataaaatcaacaaatatacatgtcaagttctaacctcatatattgacgactcaaaatatatgaaatcacaataacgctttcacattcttatcccaccaaagtttgtcaggtcctttgtttaggatgatgcttattgctcttaactcataaatatatttaaaatgtttttaatattgaattgcattatatctatttgatacataagttatatagttttatttttcattaatttatgaagttaaatgttcaattaataattaattttgtggaatattttttctagcaaccattatttattctcattttgtttgaagcataaataatgtgtttattgtacgaagtataagtaggaggagatgcataatatattattggcaaataaatacaagaactcattcaaaacaataaaaggtaaagtattcaataattctctcttttatattttgttttgtattgatttaactgattaatcaatacaaatatttgaacaatggatgaaaagtaacaattgtgttggaaaaataatattcttaataagtattgatttcaaatattctaaaccacaaattgatacagtacacacaacataaataataattacaattaagatttggtaatgacattaactgtaaatgtagtgatgactacaaataaaatacggtgataacagtttttttaaattatatgatgagttttttatatatttattgtatttttttaaatctctattttgtgtgatgattgtttggtttttaactttttttactatagcgtacgtttgaaaatatagtatgctttcttttgatataagaagttgttggatgattttttttttttagaattctttagagttatcgatttatcatattttaataatattttctaaagaattatacttaaaaaattgaatttaaaattatttaatataattttctttattcagtcaatgttcatatatatatatatatatatatgtaactagtaaaaagttacgtgcaaggcacgtatactaaattt

SEQ ID NO: 24761 - DNA, 3071 bp, Cannabis sativa
aacaatctcaatagttcgagaagaatttttaacggccaaaaaagttcaaggccacgatttactacatgtcaaagttcaggtaaaaaaattactaattacatattaaaacatgaaaaattaaaattacatattaatttatttataggatgtaatataaaaaattaagtatttataagtaaatattcaaattctgttaataattttttatatgattattagtaaatactattcaaaatttatataaatataattaaaatttaaaaatatacatataatttagtaattataaaaaaatatataagaaaaagtaaaaacacaaacttaaacccaaatataaaaataagctagccaatttaagaaatacgaaccgacacgaacaaaacacaacacaaatccgagcaaggcacaaatataccgaaccgagccgtgtcgtacctactctttaaaaatgttagcacgacacagtacgtcccatatcttttttgtagcacgacacgacaaacttgtttctgaaaaataagaataaatacgagctgagccacacacgaacttacaacatatccataattaaaactaaagtgaaaaaagtactttcggcatttgaagaaaaacattaaaaatggttaccctttaaaccaacaacttttttcccctacatggaatatcctcgaacaacattggaatcttgcacaaagaatagcgaaatcaactccagcaatctcacaaaagtaagttttgtttattttaccttttcgttattaaagacaaggtaaacacagattgcagcttttgtccaactaatttgtatcctacactcgccacttcatgctagaagaataaagctatcaaagattgatccaaatgttctcaaggaatttacacaagttcaaatcaaaggatcaagccttgagcaggttcaggctttgattgcttcggctcactcggtgcagatgctttaggagactcggagagatgaacttgggcgtagtcatccactatttttcttttctgctcctcttcaactattcccactttctcttttgtcttctgactaacttctcctgctgctttggcaaccttactgaaagcacctgtaacccaggatgccccagtgaaaacataccgattcttcattatggcggatccagcctcactaactttctgctcagcagccgcaaaagctgttttggttttttctgaaacctgaaacttctgatccacttcacgaactttgtcactcaccaaagaagtaccagcatttattttgtcagttaacccaatctttttgtccaaagaaacaactttggctgaggctgttgatgtcagctgatgtttctcatcaaaagttttagccttgttcactgcatctttccccaatacaaatcccttagcaagcattccactaacaacatcctctgccttacgaattgccgattcacctcctggaggagccttattttctgttacctgcacatattgaagcaaataaacagacaagtgacttacattgttaaaagtatatgcttttgaaattaaattaggagacacatacagggggtgctgaagcagctggtggcagctcataatctggagcaagagtaatcgtcacagacatatcaacaatagtagctccctgacatgacaggaaacttaaggtaaagaagctatttcgataagagatcaaaggtgaagcttggaagtgcaaaaatgtaaaatcaccaatttagatttcgtcctaaaagattcagatgtaatatcttattgtcagcaccactaactctagataatatataatatcatctccatttagttaccgtgttgagggggaccatctaagacaaaatatgctttctaaaataatgcccttctccatatcattggattgaatgtaggagtgtacaaagcaatagatacatagataaataaaacgcagaggaactatcctttgatgagctttttgtaaatcccttcttcagttcaaaggaaataggcagggaaagaggaaagagactagtagggggaactaaatatgaaaaactaggttgacttgtttagattagatgactataatagtttttttcgtctttctttttcttttcaactttttcctaatcacgccccctcctataagaacccagtaattgatcattatcaaagaaacaaaaaaaaaaaaaaaaggattgtaaaataatcagatacaataaactcctctttttccatttatcttttcttcctaggatcaaccctggatataacattaccgagaggaggactgcagtctcggctccttgcccatccttgaaggtaacatatgcaatttgagatcgttcattatcactacaagagcatatataataaactcaattcttatgacaaaatacttaatttggaatgccatcaaaacaaataaatgagaaagctacctcatcatctcgacattttcaatatcaccagagaaagaaaagaactccttgatgtctctctcatttgctcccaaagaaacgttactgaccttgacagtttttatctgcagtatgctggatatgtgagtactataatacggaaaaatgatagtgcaaagcaagataattagtagagatatccaaataaaaattattaaatacaacagaggaattcacaatgaaaatgaaaccagaatagccattgcaaatcaaataattagaggtagaggattcattctacagtatgtaacagcagctttaaggacgggaaatagtaaaaaaaaaaaaaaaaatcagatatccactaacaaagatatatacccagaaatgagtcatttcaaatttaaataaaattcctacatatctttcaatataatatacccaccaagacacaaacctttacatcctcacttatacaataacataagcttcccaaaattgaatattgacaagagtcaatctttcaaactttttttttgtgcactctttcaatagcacaaataaggtttgaaaacacttttaagtaatacgaaaatcagaaaatgtaatgcagcctctctccgcaactggccatacaataaccatccaatttttgaacattaagcccct

SEQ ID NO: 24762 - DNA, 2162 bp, Cannabis sativa
ttttttgaacccattacagctttgttaatctctccatcttcatccaattcattcggcccatcagacaagcccgatttggtctttcttctcttcgtgtccaccaccaacaaacaatcattatctttagcaatattctcactaaattcttaatcagtagccgcctccataaaatcagtctctacattaatagggatatcacattgacccatgttatcttccacaatcatagggaatttcaaaaaaccaactgtacccgcaccagcgccgactaactgtgaccgtcgaacctcactgatattttaatttttagtgaattattcaagttttatttttggtaaatctatttgtatgccatttgatttgaatagttgggtggtttgtgaaatgttaaagttgagatataaaataaaggttggggtcatagttgagactagaaaaaaaatgagggacaaaaggtaaaccaataaattggagagagcataaaagtaaaatgaaatgagcccttttatttctcctccccaatttcccgccgtcccagagaaatagtgactccaaaatccaaatttcccaatccaaaagctaccgttttcccgccaatacgcagaaacccacacacatccaaggtccagagagagagagagagagagagagggagagatgagtacggcgattcggaagagagtgcagaagagatgcaagatcagagggtataacctcaaagtggatgcactcgacgagatcctttccttcgtttcccgctttcccgatgctgatgccaatgacgccatcgatctccttctcgaccagctccataaccaaacttgtaatcttaagctcatccatctcttgctcttagctatctactcatttcatcccaattcctctctcactctaattccatttcttttttgtcgcagtgaaatcccccatcatagaaaaggaagcggttcaagctgtcgttgcccttctctccgaggccgaagctgctggtgaagaagatggagatacctcacatgctgcctctaccacttccgccattcgggtagtcgatgccttcttgctccccaaactacgttacgactccatcaagaagctcttctatgagtatgtctcaatctctaagccttctttttgattcattacgagctcaacttgtgggcttttcttgtacattgctttctaattttgcgaaattgggcttttggaatgaaaaatgcttgtactctagggtttttgtagcacccaaacgatggtatgaatataattctagaattttggagcaattatattggaaatctgacgttgctttgtcatttttctaggcatacggggaatctacccattcacggtgatgcttctgccaaagcaaacctttaccgggataggtatcaattattgctccagaggctcacccgcgatcaacatttctctaaacctgcatttgattctgaaatttcaaattttggaaattgtgaggtagtctctccctagaacaccagagaaaatggacagtgctaagatttgttagtgtcgcgaatttttgtgattctaatttgtattattaaacaattaaacagtcacttagttatcatgaattttcgtgcagatatctccaatccagtctctagttgggcaaacggggagaaaatgggtaatgggtttgatatctcaattggaggatggacacttttatttagaagaccttacagcatcagtggagatcaatttgtccaatgcaatatcctttgaaaatgttactcgtcaattgtgtttccttgtttttgccttacaactatacttgtaattttctagaagctgtcccatctggtaatcatggtatatcaaacaaacaatttatttaactattgatcaaatcttgaaatacatgaatctggaactttatgttcccataaaattggaaatgtgaaatcatcattttctttgacaaccaatacaagataacgacaggatttttttccgagaacactatagttgtagcagaaggggaaatgcgtgtagaaggaatttttcaggttagcattgttcttatcctgaagattgcttcatcttgatttgacattgcatttccttttctcttctaaaagttttatttcagttgtagtttaaaattagtaagaatcaaaccagcttagttgtttctg

SEQ ID NO: 24763 - DNA, 5238 bp, Cannabis sativa
taataaatgttattaaatcgaagtatttctcttatgagcattgttattgagcactagtgttatctaatattttttataagtagtgtatcataattggttagcgatattacctaaaagttataagttatatagaatctgatacttaattatactaatagcagtacgacaccaaagaaaatattagacaccaataatatcttttagcaactctcttctcttattactaacacatatatcttgacatttccaacccacaagtcactaccaacctcataataaatgttattaaatcgaagttttttttttaataataatttactacaaaaacgatatgtatatgattaatggcatttaaagattttgttgtacatatgcagtagtagttgcgttctaattaatacagctctatcaacccagttgtcattggttttgttatgccgagtagctagtcatcaatatcatcatattcatgatttaatatcggagaaaattgagctgttaatgtatggagaatgcagtttttggtcccatctcagctaactatttatgctctcccatcttcgtctcatttttgtctagtaatcagtatcgtggtaggagaatatctatcggttataagaaactcaacatattaagataaaatgaaaaaaaaaaaaatttaaataattgattttttaaaattaaattattacaatattctcacaaatatattttatgtcttcataattcatagaagataaaagatatatctacctcaaagttaaataaaataaacagcaaaactcaatagaagataaaaaataaatctgtctcaaagtttgaaaaacaaaaacaaaaataatatcataacctaagtatagtatcatagtctcatacctctcaaatctctacacaaattaaaaagtaaacaaagatgaaactaagaattgaaaagaaaatatgtttacacttgtaatcaataatgatcaccagtttactatcgtcattagatcttcataatttaaacatataatatataattttgattatggatgataatcaaaattaattttaattatcaatgatatgtatataaatattatatatatgttaagaataaaaagaaaattatatatatctatatcgagattggatatggtgtggatagtattatccccgctcttgtcctattcccgcttcgagtagtgatattgcctcctatcaccgccacattaaccactaagacaaaaaatctctactccattaggagctggtctctgtaattacgcagtcccgcgatataaatttctatcaaggtacatatgttttccatatggggagtgtttttgtggtagtttctcttaaaatgagatttttaactcttaattctttttgaattttcaacacttaaaaatttaaaatagttataattttattaaattttatgatatagttaatttttcttaaaaaaaattaattcaaatagttattataatattgaaaataaataatttatttatatatatgtgatgtagaatgattgataaactctaatctttccctaaattattcaaaatatcatattacatgaaaaatagtgagatacttagtactataatgttagcatacaatgtcaagtattaaaattatactcaaatttttggccaaaaacacgatgagatattaaaattttgagtggtcataacaagacataatgcctttccataataccaaaaaaatattataaaaaccaccttaggataatattttttgaaacattaagaaaaagtcatggcactgaagtattattgattattttaatacaatatataatgtacatttaaatgagcattatctttattagttatattttttcatttatatttatagtattattgattagtaatatttaatagcaataaataataatatttggagatatatcaacaacaaccacgatatatattcttgacatttacaccacaaacgtcacaaaaataatgtataatagtgacattttgttttttatgtacaactatagcttatcatttagccagttattgttatatatcataattatgtgatccccagttcgttcatgacatgcatggctagaaaaactagacatatctaaattaatatatatcataaatatttatttatttatatatctaagaacctcacttaattaaatgctcacaatcgaattttgggttttgattgttgactatagctaactatagaaagaaaaaatgagtactaaaaaagagagagtaattgttataccatttccagctcaaggccatgtgaaacccttggtgctcttttctcacaagcttgcccaacatggttttaaagtcactttcgtttacactgagtttgactataaccgaatcatgagtgccatgaagagccatcgtgattatgatgatggtaatattgagttggtgtcaatcccagatggtctgaggccagagcacgatagagttgatcttggggatttaagtggagcaatcacgaaaagtttccctatagagattgaaaaactgataagagcatcgaaggagaagattaggtgtgtggtttccgatgtttatgttggttgtgcgttggaagtggcaactaagatgggtgttaaaacagctgcattttgtccttcttcggctgctcttcttctctacattttgcatataccaaagatggcacaccatgggatcttggatgtttccgatggtatgtatgcattattattatttaaaaatgaggtcataattaatatattttaggggaattattctatatattgttttttttaatttttttttttaaaaaaatttacggtttggatttctaaagtggttgtagcgctagtcgcaatagatttttatacgattttttgttacaaattaaattgcaataagagtttctatatagaatttcgtaaaaatatataaaaaaaactgttttcaaatataaaaatagaaaactcctacattctatttcatcatacagtaccttatgtaaataatagtggattattgtaattgctttcctttattttgttttatttgttaatcacgattttgagatattattcatatttttctgttacactgatttgtattagtatttggttattataattggatttcttatgctttttttttaaaaaaaaaatatatgtatatattatatgctacttatatatatttatatgttttgtttgtttttcaccatgctttcatctctcatattgtatttgaagtattttataataaactaattacgaatgtcacaaaaatttaatagattaattaaaaatatttgatattttattattaagggaatataaattattattcttttatttatttgaaaaataaatatttgttaattatatttacttactttacaggaagttcaacccagaaacaaataattcaactatctggaaacatgcccagcataagtacagaaaagtttccatggaacattggtgattcaactacacaaaagataacatttcatctttgtttcaaagcatgtcaagcttcacaaataccagattggattttgtgcaatacaactcatgatattgaatcttctgcactttccttaaatcaaaagtttcttccaataggcccattaataatggtaaacaaaactaataataatagtttatcagatattacaggatcacaattttgggctgaagactcatcttgtttaaattggcttgatcaacaacaaccttgctcagtcatatacattgcatttggtagcatggcaatccatgacaatgcccaagttcttgaactagctcgagccttagagctcattggtaagccctttctttgggttgttcgtccaggtttcatttcacgggaattgaatcaggatttatttgacccaaacaaatttataggcaacaatagttttggaaaaatagttagttggacacctcaacaaaaggttttgggtcacccttctattgcttgctttgtcagtcattgtggttggaactcgactatagaaggtttaagcaatggagtgcctttcttgtgttggccttattttggtgatcaatttttggataagagctatatatgtgatgtttggaaagttgggatggagtttgaacccaacgaaaatggaatcatagtgagtgaagagataaaaaggaaagtagataaacttttaggtgatgatgatataaggaaaaggtcattggaattgaaggaattgatcctcaaaaatatagctacagatggtcaatcttcaaaaaatatgaataaatttactgaatggttaaaggtgttataataaggatttttttattctaggtacttgtattcttatttgatttagtattcatcactaaatgaacaagatccaataatattatgtcctaaggttttaatgtggggatattgttaattacattttctttatattaatgataataaacattttatgtatagcaaatcctcctattgtctcatgaatttagttatatttaactgtacaatcaaaaaaattggtgtggcaataataccagctgccaaactttattattcctttcgcaaatttacggtgcccattaatttttgttgtttaaatgtcagcgaggaccattcacatgtacacatgtggcacattttagtctagataatataagaaaattatttttttaatagcataaatgacttgcaattaaaaacatgataaataaatagtaaatatcattttggattccggattatatagaagttattcattaaattctttgttttgttatgacaattcaaaccatgttttttcaaaatggtaaaaaaaatagatctattataaaatataaaatattaataaaatgataactaatatgcaaacacaatgatgtttggttagaactaggagtaatgaaatagaattgagtggaaaggaaataatctccattctattcttttgtgtgattgcatattaaaatgttgaaatgtcgacattttcactatttggtagaataacaattccattttgaaattgaaggaaatatttcaatgcatatcaattttttttatacattttaaattttattctattccattcatattctcatttctatgttttcattcctccaaaccaaacaccacttaagtaatataaatgtatatttatttaacattttaatttaatttttatttatgcttattatatataatctatacttaatttaaatatatcaataataaaataatatat

SEQ ID NO: 24764 - DNA, 2121 bp, Cannabis sativa
catccggcccataaagctgaaaaaacatcttttgggcttccaaatcatcattgggccatttaatatgagtgggctcagggaagtcatggggagtttgggatctacacaaccaagagtgagggatatctaaactttgagcaatcgtaggcccaatatcagggatcagctcactaccttcaggcccaaaggaaaaatcaggggttggcaaatctaagaaatttggcccaacttcattcaaatccagctggacattttccttaatctccacgttttgcacaccagaggcattacctaatacaaatccatctgccacattctcacaaaatccatccgtaccctgcaaattcgaatttgttgtaatgggcgtaccctcttgtacgaattttcttttctgtccaacatcattgtccttttcagtaacggtcactggtcccagcacctgaccctccgacgacgatgtagcagtggtgatcttgaccccctccgatctctggttccgtttccatgtgcgcctccgataaggtttcccaacgtcccattcaggagcttcctccctgaccaccatcgatctgatagtccccttgcccctcatattaaaacaatttgaccgtcccgtatcgcttttaatccatgttccatacattggaacagcaggaccttccgttggaataaccatagtaggctgaacagagcaaactttatcccagtgagccaatttgccacaagtaaagcataaatggggaagcttctcatatttgaattgaacccaagaatcaggcttcccatcagctttaagaaagaaccctgatgggaaggggtgagccaaccaaacctctatccaacatctaagataaccccttctcacaatgtcctctttacgcctctcctccatcttaatcaggtttcctactttctttgcaaggatagggacgttctcatttgataaaaaacgagtagggagtccatggaattggacccagaatagtgccacatcaaattctccaactgagacctctccttcaatcggccaaggcttgagattaagaagaacaccattgataatccatggccttttttccataacaaagtggtagtcctcttcttcctcaaaaaagaaaccaagaactccatcgtcacacttcttcattcgccaataacccagcttcctccaaacgccagcaaggattttcttcactactgatgccggcatatccttacacccaactaccttacccacacaagccttactagccacaacatcctccaaagtaatatcttcaaaaagttctaacatttccatctcaagaccactgtctctagctaacagttcatctttctcagtatcaacaaactccacttgaatctcttttcccttttcccccatactaacccggagaaaactttgcaataactaggtaaaacactgatcagacccccaagaaaacccaaagaggcacacagaaccaccaaagcaagggacacaagacacactagctagaaccgagaacagaacttgctaacaagaacaaaaaaagaaataaggtcaggcctttaaccacaattttgtttggttgatgtgaatcgtgcttttgatttatttgatgttgaatacaaaaaagttacgttctagaattgcataaaaaaaatgaaattttcctttaaaaaacaatacaaggaaataatcaactacttctcaattttaaaatgttgtccaaatgttacaatatattactcgctatctaaaatccccacagatggaatctttttaggggagatatataatcactctctatatagaaaagtacatgaattataattccaggtaattactattaagttttcaataaaaaaaaagaagtagctccccattagctatggaaattctacctgtggtgagtatccgcttttattgggatagaaatttcttgcctaagtagagaatggggaagtatgagaataattttttatccctgaatattaaacggggtaagtatacgttatcatttctcaataattcgacagggttccaaactacttgaggctagttcaagtagccataaaaaatacaactgtgttggaagttctaaattcgaatgtcaaattatacactgtaatatataa

SEQ ID NO: 24765 - DNA, 6775 bp, Cannabis sativa
atattgatgatccgcaacagtactcgttgaattcacaaaaatattacaacgatataatttattatttagaggtactgaaaaaaatttatgaacaattaaaaattatgagtttatatggattattagatatatggctcttttacccttaagtttaaatatatttaagttatgtgaataaggggcattttggtagaatgccataaatgagataaacatgttttagtttattttcaaattaagaatcttgtagaaaaatcaattatacaaacacccttcccacaccaagagaggaacaagaaattttcctctaattctttctcaaattttgcttgaatcaagttgtaaaattaagttcattatgtggagagattaaagataaatttaaatctaattttgtatgattctagttatgaaatgtgttaggtttccatttttttaagtgaattatggatatgatgttgtggttgagttatgctctagttttcttctcttttggggttagagtttatggttagaaaagggagttcgcagctgtgtttgggttgttagggaatatttgaagctttgagttcaaagcttctactctcacatggtgaattttgaattaatgaattttattgtgttttaagtttacgaatatgttttattggtgatatagaattgttatggaagttttaagcttatttgattaggtattgaagaagagaactcaaaaaattttgagttagattttctatagcagagctggtcgacaagttctatgatctggtaaatcgataaacctagaaaactgatggaatagtttgtaggtctggtggactggttggtcagtcctggggtacctcgctttttgtatttttaggttatttatggtattacaaccttatttctcgataaggaaatttcatattatgaatttgagtcttagaaagtgttttagcgaaacatgcacttaccaatttaccatttatgtgacttagggcctccgatcgtcgagtagatttccactcaagttgcctgcatgcatgaattcagaattgaggtaagaatagcatgttcacatatgcacatgtttagtacagatgtatgttatattgccatctagctagcatgttaaagatagtagtatgggtgtacatagagttgcacagagataccaatatctgttgggcaatgttgaatagtatggattagtactaccaacaccagtacgactatagagtactggacttaagttagcattattattaatcaggccataggtacgaacgttcagatctcagtttatacgcattggacgctggtaataaacttatagtaattgagtgtatggatgctaaattacaagtttgatatatgttgtattacatatgttgtgccttgagttccttttaccctgagcgaagtgccttcttttagctctttccttgtcaacctctcctcctcaatcttctttctccgcctagagtcttccttcttggagccttgttccttgcctaatattaaaacaacctccatgttggctctcttcccttccttgtcgaagttgaaaggtggcttggagcgtttttgggacatggcagattgctctgggaagacaaacccctcgccatttttgtcaccatcaataaaagagtggtagaggaggaaaagtagctcctggcagaagtggaacttgttggagtggctccacctagatgacctcgtcagcagaggccctttcagtttgaacagccaaaactgcctcatccgccttagctagaagtggtggatctctagcaataggcttcatggaccctccggacctagccttacctttacgttcggtgtgagccactgcgtgcgcacggacctcctgagacttattctagacgttgccttgcacttgatctaggagacccatctccaacgtccagagttctctacaaaattgaaacaaagtaaggttagggacatgcgtaaaatggttagcgcaaagttaacaaaaatacaaaaggacttgggtctgggaataaccatggaatttactatattttagttctccccaagaaaacaaagttatgtccttccgccttaagaaactaccgtattcatcaaacccctggtaaaacatgaggacaaacagatctaccctataggattggtacagcaaaataaggttttctgagctcctcacaatctcatctactctatcatagtaatacattacagggtacctatgcaaatctacttctaaaaagtaagggtcgaagctcccctgatttatatgagccatcccttggacgcgaaacgcgaatgagacagattggaattatacctcttcctaaagtactggcacccatagtgccttcattcagaataacagtggcaaaacactctacaaactctgtctcctcgatcactgggtccagatgagcatgtttccaattcgctagccactttttgccaagcttggtggctttctagagttcatctaccacgatctcgacaatggcctccttgattgcagtcgaatcttaggtgagatccttaaaggtgtaccagtcaatgctttggtgcggggcaatcaacccaactcttctatgattggctgcggttaccaatcttccacctttagcatcgtcgaaggcattcccatgtacaaggtctccctttccacgaagacaacttgggacttggtggtgcaatattggctaagagcaaaaaaattgcattagtaaacaatttgctaagtgcagaaagaaatggaaagaaggaaaatggcgacgctaatccagaatcaagaagttaagtgatcgtgtcaaaactctcttcaaaggaaagttggatgtaaagaaccagtattcccagaagtctaggacatactttataataatggttgggaaaaccatcttggagcgcctctccagcttgtagaacccaatgctagatttattcttctacatgggttatgatttgacactgtaagaatacagtatttcctccgatttcggaacctccatgttcttatccatgcaaaggacgtaccatccagccagtagcttgtacaactgtagaatgagttggaagggtacaatcccccactatcatgaaaaagtttaaaaagtaacatctgattggaaggtgcactccgcatacgatgtgtgcccagctccaggcaccaaatccatccacccacacggtaggcgactccccctagtgtgaaagcatattccaacaaaggcctagaatatgatggacccatcattccttggagtatcattttagcactttgtagttatggaactcattagagatttggtccatctctcactaagaggagttgtacactactttaggggcatcctcctaggatttctcctcattcgtctccattgcaagagaaacatccacaaagagctcctcaatcaactccactacctcgagctcaaagacgtccaacgtgatggttaattggagagaaatcaaaagaaaaaccaagtagttaaatacccatactaaagaatatagtaagggtataggagagtcctcccctagaacttcttagagaggtccatgctggacctaacattcaaaagaaaaatccccatagaactttgctccgggatgatcagatcgggaacacaagagtaaacagattattctcattgcttcattcaaaaccataagggtttcaatcaaagggtttcaaattaaaacacgctcagctgcaacatttagaattgaatttccataaaaaatggataggcaacagagtttagagatcctaactccaactacaaacaaaatacatgccaaattatacgcacaatctcaagaatattctagacagaccaaaaatcctaaattccatctattatattctataggtcacatgcaaattgctgcctaaatcatcaacagagaatgcatctgtcatacccagaatttgaacaagaatttcgaccacaaaagaaattaaaatttacaaaaggctaagagaacttgcttaatgaaggcaaaagatgtggatgaggcaagaattgtagtcgaaatacttcaatggaaacctccttgagatggtgtatattggcctggagttcacaagcccaagcgatcaattttttgatttttgcttggaaatccaaaggtctcgatggatctagaggaggagtcgtaaggtctggtggcgaccctcttgggttttctctcgcacaaatttgaaaaagaattctaagacaatcgtcaaagagattggacattcacctaaggcaatgttcgatttttctctctcaagaaatttgaactcaaaatatgaaataggcaaaagtcgtgaattgtgttttcaactctatttataagtgggcggtgacgatctgtgtgctcctagaatcaatggcttagattgcattctagaatatacaaagttgatctgatagtccgggaatagaagggtcaacatttaatgcatgcatttgaatacagacattttcaattgaacgtccacgtctgtacgactagtggcatgattcaatcatcaacacgctaccctaagcatgaagaacttttccaacgcacatgaagttcacagatcaaggaactagtgccatgcgtaatccaccagctaaaattcaaagatccatgactgtccaccactaaagaaggaagaagtcaaaaagatctagatagaagacgcaaagcctccgcgactctcaagttttgtaagtttgtggggtaaacgttatccatgcttccagaaggaaggcacgtggcaattttaatacaaagttaattaattaaggcctgctcaaaggcccaacgagataatgggctaggaccatacaatgagatgggcctcacaaccatctgatatacaagtaatctatgtctaaagctggatgtccccggatgtggaagggcacctcactccacttaaaaagaagctatcaagaccctatagatgagcatttgggatacatccaaaagggttctccaagagacgccctgaaagccaatgttgaagctgacgtagcagtcctttgacactgaatcccaccaactgagggggtttcaccctatgtcagaccgtgagagtgcacataccaccaaaaacaacatccctcttgtcctatgaacactgttataacactatagtacgcaaaggcgacacacgcacgacacttgttgacctcaagtggtcccatgtcgtactgagcataactgccccatgaactgggcctcagtctttgggcccaaagtcattgtattttatgtatttacactactacaaaaaggaatttttgcttcagtttttaagtgacatatataaaatttgcgctggttggtgtaacccacgcaaagactattattttttgcttcatttcataagtggcgccaaaagttttttacttcacttaataccaaagcaaatatagaaatgcatattttgcatcagttataaagtgaagcaaatatctttgcgtcgcactataacttacacaatttggtttttgcatcggttatgaaccatagcaagctaaaacaaaaatgaaacaaaaaccagatctagcccaaacaattctgagccaaatctaaaataaaaaactcagattcaatcaatttataccaataccatatacaatcaaattctataaaaataatctacaaaaatatatatcattgatttataaatttatatacatattatacacaatctccacaccacaacaacctatcgagccaccataacctcagaccaccatgaccgaattagaggaaagattggagagaaagagaaatacaaagataaaagagaaagagttcgaagataaagagagggacaaagatcggaggagaaaggacttacttccaacaaccgctgggcttctttgacatggtggaggtgggtgctagctaggcttcttcaacggcgctgggcgcgggcttagtcgacaccactacaccaactgaagatgaaggcagctgagagaaagagaagaggaagatagagagaactttgattttactttgggtctttttagtttaggtagctgaggtggtatgatttagggttagatattcggtgttatttggggtttctttaaatggacccgcaacccataggttttacgttttttaaatgagtgtgttttgagtcagttttgcaccgacgcaactttgcatcgtgcacaaccgatgcaaaccaagtccaccatcgatgctaatgttgcttcatatcacaaccgatgacaaattttacctttaattaattgtgtcagttttatagatttatcgacatcaaaactaacgctaaagccaattaatatttgaagtagtgttatcccattagtggtccatgttacacgcataccctagcaggtcgcgagtatattcatacatagattctagcctataaatactacatgataccttcatgccagaggagagaaactcattaatcaaatactatagctaaaagctagggttcttaagcttgtaaagaacaccattgtaatactttaaggttatctagcctaatataattgccttatggactagggttcattaacacccaaataacgtaaaaattcccatctccttttcatctttttaattttttttcttagttcataatttattattttgactttacaaaatcttagtaaacattattcttaatttttctatctaattaaaaaaatctctgaattttattatatgggatggggttgttaatcggctgaaaaaaaaaaaaagaaaaaaaagagttttccggcaaaaaaaggttacatttgac

SEQ ID NO: 24766 - DNA, 2881 bp, Cannabis sativa
aataatttgaatattatttaaataatttttgttggaaataatttgaatagagagtgaagttgaaataattttgttggaaacaatttaaatagggagtcgggtagaactaattttttaacaaaatcagatcatgccttgaatataggagaattttttttaaaaaaactaacgtattcattttttagaaaggtaaaaaaaagagatcatgcctagattataagagaattaaaaataaataataaaaattctatgtgtgatacctcatgataatcaaataaactacaataaattattaccattagattaaaaatcaaaggtttaaaaaatgccctcataagtgagagcaaaaatgatgctctcacttaagaatatatatcacttttgtatttacttataagtgcatttttgtttttggtacatgaagaaaatacaatatatatttttatgataatgtatatatgatacacaatatatattatagtatagtaaatttttggctatgccatgatttatctgagtatatactataatttagattaaaatttattaagtatagatgactaattatacttattgtcaaacttttaaactaattacaatatatattattatataatactttattatattaaaagatgaattacatacatctatttaaagtattgaaagattatttttaaattatatttgaattgtaaatttttttatacaagtaaggggaattacttttttttctaccagtacactatctcgggcctcgacgggctctttagactgccgatattgaccaataacgggggcccgggcccgtcgagataggtatcgaaaaatgttaaattaggataaaaatatacctatatatcttgacggacatagactgctgagattgcatcataattaacggtgagttttgcccgccgagagtgtctaaaataacgaaggaccgggaccaccgaaataaattcaccaccaatattcttatcattgaaatttatggtgggccaaacccgccgaaattgatcaataacggggacgagcccgccgatataaacctatttttttgtggtgttaatgcgcctgtgtgtttttatatatatatatatatatgtatatgtaaaataattctagtttggtaaattatttagaagtattttaaaattaatggactattaatactttaagtactatgtacaatgttatgtaaaaaattgaattataattttttatatgctataaaaacatagatgaccttataacttattagtatggttgaatatccaattcaattcatatatttttcttctaatctaatttaatctaattggtaattagatttgaaaattcattatccgatccaatctaattaggcctcaaaattcaatctcattcaatccaattattaatttcaattgggctagttttctaattagatatctaatacttacatacctattttttatattaacctaaaatcatgaagaaaaataaaagtaaataaatattattcttcagttaagtttaatactccataaatatatcatttttataagtttaatgcaactaaaaatttaaaataactaaaataacaatactcccaaatagtgaaaaagaataaaaattataaaaataaatatacaaaacaattaagtattacaaattaaacaacaacagtaaaattgtaaaaattaaaataaaatataattggattgatcaatttttaataattagattttaaaattgacacttaataatcgatttaatctaattaaaattcaacttttaatatcaaatctaatccaattataattggattaaatcaatttagtttaattgaattgattggatcctctccattaaaatagagtgacccccgatgataaaatctcctaatatatattcgtgttggttgtaaatgttttgctcttttctaattagtttatatgttttaatgatcatttgtacaaatacaattattcaaataatattttttttaactcaaatcggtatctttattaattaatcaaatcgttaaaaacaaatagaacgtgcttcaaaggaacaatcctccaactgaagcacacaacctggagagaaacaagaatctctagctaaacattgagccagcttatttgcagatcgtttgacaaaacgagattcaacattgtcgaaagataaaagcaaggcacgaacatcatgcactaaaagaccaaaagaaaatgacatagagacttgtccccaattgtaacgatcaatccaacttaatgcttctttgatgccaaccatctcagcaacttcaggttaaaccctccctacatgacctcgattgaaaacctccacgattttaccatggcagtcgtgagccacacaaccccacccaaacctgcctctaaccatctcaaaccagacaaccataaaacatctcaacttagaaaacttagtcactcaaaccagaaaacttagactctcaaactagaaaacaattgcaaaaaccaaaacaatctcaaaccaataaccaagaaccaaactcagaccataaaacaatcacaccatgtcacaaagacaagacttacggtaacggaaccgaacggaagacaaaagatgaaagacaaaaattttactagataaactaataacagtaaattaactaagaatctatccccataaaaacctaattagaattaactactaacagaaattaaaccaaactcaaaacaagattcccctgtcgctgcctacatcgctacagaatcccatcgtcgaaatcatggtgcgtgatcatcgaacaaccaaggacttcaaaacagagaccaatgtgatcacatggaagcggaaacttcaataccagagtgctttaataacagagaccaacgtcgtcgtcgtc

SEQ ID NO: 24767 - DNA, 2109 bp, Cannabis sativa
atatatatatatatgaatatcacatctctttccttgtaattattttctttctctttggaccattttcgtgccgtttacgactccttcgatatatacatatatatatatacacacactagtcacagggtgtatagtgaaagaaagctcacaataatataatattcaatatcgagccgccaagctattcaaaacattcggtttatatatatataagtctcatatatatctctatatagatagctatataggtagatagattttgtattcaattatcaatagatattggtagtaattaaagaatagtgatcagatatatatggaaaactaccaaatgttcttcccatgttcttcttcttcttcttcagcttattataataataatccatccatggatcaacatcatcatcaagcttttaataataacaataatgttattatttcaaaagatgggtttttgggattagggtcagatgatcaaaatgatcataatcatgatcatcatgatggtaataataatagcaatgataataataataagaagaaattattaggagtggtgatgaagaagaataatgatgatgagaagaagaataagaaggtgaagaagccaaagtttgcatttcaaacaagaagccaagttgatattcttgatgatggttatagatggaggaagtatggccagaaggctgtcaagaacaatacatttccaaggtattattatatatatctatacacacacacccttttcttcatgatcatcatcatcatcatcatcaatcagatctgtcttaatttactaattattactaactaatcatcatctttacatgataattaagcacatatatattctttaataaggcacaaattaaggaaataaatcacacaaaaatatattataagcatctattaattagtatatataatatttaagatctctctatatatatctacttatttcaattatgcttcaaatatatagttattgtttattcaaagtataatattagttaattccttataattaattaattaagggactatatatctaatatgatgtacatatattaattaggtttaataatatattgctttacatgatatatgaactatacatactcactacagttaactaattaatttattatatattaatgagactagtacccaaaacacatttagtagtttgtactattgcattgattatagcagtgaactaataatattaagaactatacattattattcagacacccaaagttaatttgatcatatccctttaaaaaagaaggttaatttgatcatatgaaatattgggatatgttgatgttgggataattattaatgatagatttacatatatttgcatcggttgttttgcattcatgaacattaattctaaatctataataaactttataattattcacaatatatatgtgtatatataaaattaaaatgccagaatcaaaacatagagtgctaattttttttttaattgtcccctaattccattttaatgtctgtatttgcaggagctactataggtgtacacaccatggatgtaatgtaaagaagcaagttcaaaggttgacgaaagatgaaggtgttgtggtgaccacttacgaaggaatgcacacccatcctatcgagaagcataccgataattttgaacatatcttgaatcaaatgcacatttacaatcctaataatttctaattatctatataaataaataaataaattattaataataataatagctagctctctctcttaattaattaattaattaattagtacttaaattattatacacaatcttctatgtggaattaatccagtattaattattatacgtacgttgtagctagctagctatatatatatatatagagagagagtaattaattattattaattaagatactatatattaatcactcgtatttattaggtttgtaatattctttgattcaggcaatgttttattctgctccgttggtcacatggtatctctttcatttatatatatctatagtattgtaagattcaatctttgagggagaaagagtgattgtattattaattgagaaaagagagattaca

SEQ ID NO: 24768 - DNA, 3966 bp, Cannabis sativa
aataaaaataaaaagtcacccataaatttctcataaaccaagaattttagttatatagacacactttatatagaatagatctataacaaagaaaggaaggagaaataagtaagaaaataaaattagtaaaaattctcatttataaattttaaaacattaaactcgaataagaatttaaattaacataaagctaaattaaattaaagtatcacatagacttataaaaaatttgttcataaagaaattttgtgtaattctttaattttgttacaaccttattatacaacataagtactagattagatcatttattgttaatttagttaagaaacactaataatagctctacctacaacattaaaagatccttcttctttttcataaaaaaaaaattttcttccaacaattttgccctcaccaaataaagtatttcctttctaacaacatgtatttattttctttgaattgcttgagaatgtgaaaaaataatgttaagaatgataacatacatacataagagttacaaaaaataaatgtgataaaaaaaaactactttgatcacaagctaatattttgacatacattcttaaatataattgtccatgttaaactatataataatgttataatataatataaaaatgaagtatatataaaggatatgtaaaatagaataactacagacatatcaaaatcgtatatacgataaaagaaccgaaatatctctagtcattgatgtttgagcttcaatcccaatgatagcttcgttatgggaattcgagcttcctcgctctctcaactctctttagatagaattttgttatttgcacaatatgagtgaagagctcggtaactgagaccatatatttgtatgtgagatactctattagtatctgtgccacattaattgtcaaaatattttcacaactaatttaaaaaattaaatcgggtaatgaatatcgaaatgttaccacatatcgaatatcaccccaattaatattgtccagattcaatgaatataaatattcatttatcttaatattgattcttttatttattccataatataaaatattctaatattctcttcatacctaaaaatccacctgcagccaataattttttgtccaattagttcaggtacaattatcgaagttttgtttctttagagagcaaccatttcatttcccattgctccaccctagttaagcttatctaatgaattcatggcttccttgtaagattttagtccatcctcaaacatctcagccacatgaagagcataatttacaatgtctgcataaccatatttagttggtgctcttattgctcttctttcctagtccctaactaattggtaatctagaccttcatcatctgattcacttgcattttcttcatcttttctttgcactgttgaggtatcctctttattttctgtcatactctgttttgagtgagtattgctcttgtcaaactccatctccatctgtatgctctcatttgtttcagtgtgactattttcttgttgagtttgctgagttttgaatgtgtctttttaaatcttgtcctcattaaataccacatctctactaataaaattcttttgatgattaccatgttctatactccacattttgtaccctttgacaccttttggataaccaataaagacacactttctagcccttagttctaacttatcttgcctaacataagcataagctatacggccaaaaatgttgagatgatcatacctggcattacaccttattctagcttttattagtgttttgaaactaatagctgatgatggacttctattgattaggtagcaagcaattatgacaggttttgcccaaaaattctttagtaaaccaaagtgaatcagcatacatctcaccctttctataatggtcatattcattctttcagctagaccattttgttggggtgtttttggtattgctttgtgtctaacaataccaactttcttgcaatgttgattgagcatatccacacagaattcaagtcaattatcagttctaagctttgtaatcttcttaccaatttggttctcaattaaagttttccattgtaaaaatattttaaatgtgtcattcttattcttcaagatataagtccaaacatatttggtaaaatcatctataaatgataaaaaaaaatacctagctccacctctagattcagttcttgaaggatcccataagtctgaatggatacaatctaaaattgcatttgacacatgaacacctttaccaaacgtgactcttgtagatttttcaagaacaattgctcacagaactccatctcttggatttgatcttttccaaagattcctttcttgttgagcactttcattcctccattgctaatgtgagtaagttttcagtgccagattaaagttggattccttgatattttaattgctacattcacctcaaattcacagtttgaccctgcaacaagtaaattccattctccttcactctttcactatcattgagcctttgaaaattttcataactcatttttcaattttgatagaacattcttcttgatcgatcatagctactgagataagatttcttttaatctcaggaacatgtctaatttgtatcaactatataactctaccttcatctaattttaacttgatagtgcatatcccagtaacattacatggcttgttatctcctaatctcactgatcctcctctgatctcattgtattcactgaattgagattgatcagggcacatgtgaaaggagcaccctaaatcaattacccaatttgttgaagaacaatctttggagacaacaagtactccatcactgtcatatccatcctcatcagatgcaatattcacactttcagaatgactactattaaatttcgtccacagtggacaatctttcttgaaatgtgatgttgagttacatatgaaacatatttttactctttgaaagagacttgcccttgttcagattgtttccatctccattctctttcttgaaagatttttctcgaaccaacaatccttctccggaactgccttcttgaagtttagattttattttcctttcctttgatatttaagcattttgtacttcttccaatgtaacagaatatttctcatacatcattgtatccacaaaatacttatagttttcactaagaagtgactttaagattatgattgcttgatcctcatccttgatcttgatgtcaatgttcccaagatcaagaataatcttattgaaatcatacaaatgatcttcaatgtttttcctgatgccatcttgaaagaatacagtttctgttttaagaataatcgattttccaaagacttggtcaagtgcaagctttccaatttcaaccaatagaccagttgttgttgttttcttcgaaacatccttcagaaccttatctccaaggctctaaataatcgcattatgagccctttccaagatcttagacttctctttctcagttagacctacaggtaagtcgttctctcctaaaattgcatcttgtaatgcctgcatcttaacacgccataattcaaaatcgttcttccctataaatttctcaagatcaaactttgtgcttctcatttcttctcatccagttcaccaagttcttgataatcgatccaagttcctcgttcgaattttcaagctctgataccaattgttgcacaagcctctgtcgattcatcaccattttacactcaataatagaattatgagataatgcacacacagtaatagaattgagtctatgctctattattggaaatgataatggtgtcaaggttatagtcaatcaaatgaactaagtcataggtcctattataagcaaggaacaaggacaatacaaaagtacctataactaacaataacagttagttatgagttgatcatgactaatcatgtattaaca

SEQ ID NO: 24769 - DNA, 2020 bp, Cannabis sativa
agcagtacaggtatcgtactggttaagagtgatatcatggccaataatactttcgggtactattgatgctatcatagcggtgcgaacatagtgtcggtcctacagtgcgatcatagtgatagtagtgggtgatatcatggtcattagtaccaactgttaagaacgttcttaagtcatctagtaagccttgtggataggtgtatgggcgcctagacacaagtcgacaatatatgatttgttgtatgcttttcttactgagtttgttgactcacaaatgctacttttatgtgtaggtaaaggaaaggcaatggctgaacaagagtgagctctaggcttggatgaagatgattgtacatgtcttgtacatgtcgagacgacacgacctggagtgttcggtcttgggacatctagggttttattttgtagtcgatgtgcgaccaaattttaaatgtattttaatattgtttgtaaaagttttaatacaggatcccgacttatgtaaataaccctataaagtttataaaaataattaaattaaaagttttaatttgacacgattttcaatgaaaatcctttgattagcaaaggtggcacgttaattggaaaattcactatagcgcgcctaagtattaaggcgttacaattttggtatcagagccgccatgtttgtctactaaagatcgtcaagacatttaaaatcatcatcaaagaaaatctcggctcatggttcaataagcatttacttgtttagtaaatttatgtgattataaaagcatgttaggaagcataatagattataattacttattttaatgcattgccttaaatccataagtgcggtagtaaaattaaaataaggaccgttgcctgaccaggtcgacttacgaatcgatgggtttgtcctataaaatggacacctggcgcaatatggagagtcaaagcaacaaggttaaggctagtaacagttggagagaatggaatccaagttatccccgtaaccgaggtgaaattcgttggaggacttctggcgggagtaatgattatccaccacaggctctgtttgatttagagcaaaggtttgtggagatggaagttataaatcaacgacatgaagaggagattcagaggttgaaacaacaaagatctcctgtagtacctttacctcatatgcgaaaagttttcaattcgatattgccagcgcagcagagtatggctagtaacctagtggaaacattgcatggggaaaattggatgccagaatctttagcacttctgggagattcaaagcttaaggacgccctttggactgggagccctaaagagtttgttttaaagcctcgggaggttattatagaaatttgagttactactccccttatttccatttatggaggaggtggtaagggctccgtggttgaacagaagaggaaacatgcattgacagtggtgggtttaagacgaaacaagcagctctaaaggaatcaaggtagaggtagacgccagggctattcttaccctgagtgcccacgttgtaagaaacaccatcccgaagagtgaaaccggaaagcatgcttcgagtgtggcatgattgagcattttaagaaagattgccctcagacggagaaacaagagcagcaggcaaaacccgtacttgctcagatgtttgctatcactcaaattgatgttgcagccagtccttccgtcgtgacaagtaagcttcttgtcaacaactcctattttactgtattatttgactttggggctacacacttatatgtggcatcacgggtaattaaacaattgggtaggccctgtgactttatcgaaagagggtttggaaccctattgcctggtgaggaaatcggttgtctccaaaaggcgaattaagtctatgccagttagaatagaagatagggagttgagtgatgacttagtagagttggaattagcagagtttgatatcatacttgggatggatcttctatctgttgggttttgtgccctaaataaaacccattac

SEQ ID NO: 24770 - DNA, 4314 bp, Cannabis sativa
  modified_base (48)..(48): a, c, t, g, unknown or other
taacaaaacacatggtctaatctgcaacttttacaaaacacagggtcnaaaatggtatttacccatttaaaatttgggtataaaaataaaaaacaaagtattgaaaatacatgttgtaaagtaaatataaataaatgtaaatatatctatttctttcttttattattataattaaataaaaaaaggaaaattgtcctgagttgagagatctaacaaaaatgggtttggactttggagagagttgaattttgggacgatgactaattgggaaataccttccttttgactctctctcctctctcctctcatcttactctcagctatggcggattctgccacaatacacagtaaaccccttttgaggaatcttctccaagtccaatttctgttaaagaagacatttttaattatactactcgtagctcattcagcttctgctttacccaacaatcaccgctacaatgtaggagattctgtacccttcttcgtcaacaagcttggacctttgaacaaccccaggtaaccaatttctttagctgttgaccaatttgttgattttaatttcaattcatgagagtttgtggtgaagttagtgtaggattttgatgagtcccttcgataatctattcttataatactaaattgctcatgaagatttaagctttagctcatatcatattgtaatttagaactttaacaatgttttatttactctctcttttgtctattgtttttgtgttgttcatgttagttaaacaatctttacattgtcaaatatagtggaagaatttaaacaaaagaatagaaatgaagataagagtttacttggtttggcaagtaatgtgctaaaaatactcttaacaaatatcaataagtaaaagagtaaaaatactctcaagctcacaatacaatgtcccaagtacatccaaagtatctctcttacaagagaaacattgctcagacagagagatcgctaaattactttaaggtgggaataggacattccataccatttcattaccctttcttgggaagtgtatagctcatctatttatagatgctttgtatttgggtaccaaagttaatgggcaacttgggcacttatacaagtagctcctaccacaagctagcaagctagcgacttgcaattagcaaacttcttgagggttatgaaataaggagcttgcaataagcaagtttcatgggcaccgcgttttggacaagtagcttatccaagaagcatttcttaccctgcttagcaaggttatccttgtaaagtgaagaacaacattacatttggcagactatctctcccttcttgtcaaaggtgccaccattctttagtacgtgctgatctgcaatgagtttaagcaatgcttgaactttttactgagaattggctcggttcacatgtcaacttcattcttctttgtgtaaatctttaatgagtgaatttctctaaagtgattcattttctaattcttctagtatcttttagatgcatgctatgactttgactgatatatttaatttttcaccaaatgtataacattgtgactagctatctctttgcaattgaacaacaccttgttcaaaattaaggtctttttactgaatctttcaaccgtaacgctttaagattgtgagcttagtagcttcataggttctatgttgttagcgaagcttgttggacaaactccttgttcaaagcgtggtttttcgaagtttgcttattgcaagctgtccatttcttgaagctcaataagttttatactccatttacggattttgggctgtgaggttgagacttgagagtattgtagcccacttatttatatttgttagccgaaatttcgatgactctcttgtggagtttgcaaattgcttgccaaacatgtaaattctcatgtcttttttaattttatttttatcaattttaaaaatctattccattattgttgtcattatcgttgcctttaccatcactataactgttgttttttcagaacacatattttcagtttcatgagactgccacagatttttccctcaggaattaagtatcaacttcaatgatggaaatcttgccttattttcacatttaattttaattgttttattctgttgcagtgaaacctaccaatactatgatttgccattctgccatccaggttagcatatgggatataacatgacatttcttcatgtattatgttttggaagaagaatcagtttagattgatataatagatggtgaatttattgaacctttctagaagttactaacataatgtgactccattcaattgggttgttgttctcattggcttttttttctatgtttttggagttaaaacactgataatttgcctagcaatataaacttgattatttgttttttctctgcagatcctataattcgaaaaaaggaaactattggtgaagttctgaatggtgatcgtttgacaaactcgttatatgaattaaatttccgtgaggaaaaaattcacaaaaccctatgccataaaaagcttaaagttgctgaaatcgccaagttcagggatgctgtgattagagacttttactttcagatgtattacgatgaccttcctttgtgggcatatgttggaaaagtcgaagagaattggaatatcgagcagaatacaaccaagtattatatatttacacatgttcagttcgatgctgtttacaatgacaaccaagttatcgaaattcaagcttttagtgatcctaatcatgttctggacataactgaagatgttgaaatcgatgatgttgagttcacttattctgtcaactggaatgtgacttcggttaagttcgagaacagaatgaacagatactcaaaggcttctttatcgccaattcgtcaaaaaatacattggttttcttttattaattcaattgtcatcatttttctcttgatgggatttcttattatgcttatcatgaggcatctgaataatgatctgagaaagtaattttcctcaacaacacttgtaactattgttaaaaactacttggttatattgcttcaactaacttagattatacatgtttattattataggtgttctaatattgatgaagaagaagacaaggaggttggatggaaacatattcatggtgatgtatttagatgtcctcctaatatgccattgtttagtgctgtcattggcactggaacccagtttctgactgtgtaagctaattttcttgctcaagtttttcctctctctcaatataaaatatagaagaataagtaggatttgtcctctggactttttttgtcgtgaaaatttctcctaaactataaaaattgttgtgaatatccctttgaataatttctggatgtagcaccaacttgacattaatctagtccagctcaagagtcctagacaaaaaataaatgtttaaatagtggtctaccaatgaattatgggactatgtatatgtacgttcttagagctaatgtttgtgtattcaatgctaataaacttgatttttagtagtttaaagttgttaaatagattctcttactgtaactatacatgtgatctatagccacataaacaaattgttttaaaaaatgaccagaatgtaactgaaggagaatatttgcaacaatttttatactttagggaaatttattgcaacagaaaaaagcttggggtaaaactctacaatagtcataatttggagagaaaaaaatccctatttattcaaaatagaatctgtacctttatctttggtttcacacactattgaagttgtgctatgtttttctgtttccatcttgtttgtatattttatccaagggtctgagtctcatgtgtctttgataattatagggagtacacatggccttgtttttcaagaaaaacagaaaacttagctcttgaaagtcgatttgcatgaacttgatcatgttctgaatcttctctttattgttaatgtttttcttcattattataggatttgcatcttattttttctggcattattcggagtcttatatccttacaatcgcggagcgctcttaacttctctagccattgtatacgctctgacattcgtggttgctggctacacttctgccgctttccacagtcaattttccgagactggatgggtaaattgttctacatttcccacttttcttttttcttttcacattttcaccactctgttctctgacataagcattgttgattatcaggaaaggagtgttcttttgactggagttctctacgtgggcccgttgtttgcgacagtctctatcgttaatacggt

SEQ ID NO: 24771 - DNA, 2493 bp, Cannabis sativa
  modified_base (50)..(65): a, c, t, g, unknown or other
aaacattatattgtattaaataatactaatacaatacaacacaatccaannnnnnnnnnnnnnnnacattacaatacggcgtaccaaatgagcccatataatataaaactatatataatcacaattggtcgttatgtcaaaaaaattactgacatctctcaatgtattttttaaaactctataattctaaaatataaggatcttcactcatttaaagccattacaattttgtaaaccaaagcttcatctaccaaggtccccacgtcccaaaaattgaaacaaattaacatataatgattttttatttactcgtgaaaacaataaatattgtattgtggcaatgatttttctgaattaaaacttaccatgtaagagatgagcatggatcaagagagagcaacttgagaatgatgagttatttagttttagggttaggtattaagagttatattatatatatattgggagatatgtatttgagttatattattataaataatatatttataaaatttggagagattttagtattttttagagaatttattaagaaaatataaaaatattgatttattggtttatgttttaacaaaaaaattggaaaattaataaggtataataaaactaatttagtgtaccacgtcacatttatatcactcctttatatatatatatatataaatatatataggtgtgaaaacttaagatgcaaagagaaacagaggaacagaaaatgttcaaagtttaggcaaaaatattacctccaaaggaggcttttctctttatttataggcaattagacttgtaaggtacaagagtttataacagaattagttaaggaaatacaacagaaaactaaccctgaactataacacaaaactaactcttaactaactgcctaaactaattgttggttatcatcccccctcaaacgaaaaggggtggatacaactttgagtttgctgcgaagatacttgaatcgttctttgggaagagccttggtaaatatatctgcaacttggtcaacagtaggaacataactcacatcaagctccttgtttaggatttgatccctaacaaaatgttggtcgatttcaatgtgcttgcatcgagcatggaagattaaataggcagccaaggctgctgcaccttgattatctacccagatcacaggagcagcaggcaaagtgacttgtaattcagtaagcaaggaacgaagccacttgatttcagctgcagtgttggctaaggcacgaaactcggattctgttaatgatcttgctacaacctgctgctttttagcagaccaggagatcaaatttgacccaaggaagatggcataaccactagtggaatgtttgtcatccatgcaacttgcccagtctgcatcggagtaggctgcaatggtcatactgtcgactggtttgagaagaataccatctgaaatagtgccttttaaaaaccggagaagcctcttgcatgcttcccagtgaatctgtgtaggtccatgaatgaattgagacaatttgttgatgatgtaggcccggtcctcaatcatagtgcattattcaatgtgtggagtgcacccaatgtgctgcgataaagagtgacatcctcaaaaggaataccttcagcaagagataacttttgtgcagtagaagtgggattagcacaggttttagctccttccatatttacccgagtgagaagatcggttatatacttagtttgagacaaataaagaccttcactggtttgatgaagctcaacaccaaggaaataatgcacctgaccaagatctttaagagaaaaagtagagttaagatcagtaatgagtctctgaatgagagtagcattaggacctgtgacaagtatatcgtccacatatactaagagaataatcagattagaacccgtgccatagacaaacaatgatgtatctgcttttgaggcaacaaatccccaatcaaacaaagtagacttgagtttgtcattccaagcacgtggggcctgcttcaagccatacaatgctttatgaagcttgcacacatgtgttggtttagttggatcttcaaagccttggggtttagccatgtaaactgtctcctataatgttccatttaaaaaggcatttgcaacattgagttgcctaatttcccactgaaatgaaatggccaatgtgagaaccaatcgaacagtaaccggcttgactacgggaataaaggtatcttcaaaatctataccaggtttttggagataacctttggccactagtcgagattttaatctgtcaagagtcccattagcattaagctttactctgtgaacccacttgtttcctataagatgcatgtgtggttcataaggtacaagtgtccaagtaccttgggatataagagctcaaaattccttgttcatagaggcaaaccatcctgggtgttttagtgcagccttgagagactttggctctgtgggaagcagagattcaagcaa

SEQ ID NO: 24772 - DNA, 1663 bp, Cannabis sativa
aagattactaagtaagttattgtttgtttattgttatacaattcatgagcaagtttgttctagctttatgtttgtttattttaaataatttgagtaattttagtttagattgaacttgatatcataatgtattgggaatgggttagaattttgtattaattatttacaaaatcgatattatcactttaggtaagcaaaaatgtattcaacaaagaagaagatcctcaaggataacaatgccgagcctactgagtttgaagaaacagttgcacaggtataataatatatgtttatatgatatatgtatgtatctattttttgtatcgttttatagtgtttatcatactgaatttatcggtcttggtatgttgcagaacttgtttgatttggagaacactaaccaggaactgaaaagtgatttgaaagatctttacatcaactcagctatgtatgtattttatggggtttttgtttcagagttttgttaggaacttttactaatttgtagtttgcttatttttttatacaagccaagtagatatctctggaaaccgcaaggctgtagttatctatgttccctaccgattgaggaagggtttccgaaaaattcatttgcgtcttgttagggagttggagaagaagttcagtggaaaggtaacatattaaattgtttgaagtttttcaaatgtgatgattttggttgtcattaaataaatgtttttctttgttatcacatgacaggatgttgtcattgttgcaacccgaaggattgtgaggccaccaaagaaaggctctgctgcccagcgtcctcgcacccgtacacttacagctgtccacgatgccattctggaggatgttgttcatcctgctgagattgttggcaagcggattagataccgagttgatggctccaagataatcaaggtatatatgatgagaaagtaaatttgttattaccaatttcacataattgaaagatagatcacagccctgatgaaatgtatgtgtgacaggtttaccttgatccaaaggagcgcaacaacaccgagtacaagctggagacattatcgggtgtttacaggaagcttaccggtaaggatgttgtgttcgaatatccaatcactgaggcttaagtgactagtaactttcattacttgaatgatgggttctgttctgttgctgttacttcaatttagaagtctcatttgcatttttcagataggtactcttgaagttttgacttgtgagattttcatattttgattcagacatagcaatgttttttttattctcttcttctacttgtgcttataaaaatcttgatagtttgttatgaaagataatttatcaatcatgagttgcttgcttttattttgaagctcttctttctcattttaatgaagaattcagggaaatttttattccaagagtgaagtttttgtttatataaagaaactaaggaaagatgaatgggatgagtaatgcatatttcaacagaattaaaaccatatttcatatttgtgttaaatattatgagtagttgatgtggagcattttttgtagggaaatttgattttctatgcttagaaaatcaaaaaatttgatttttaaaccaaaaatttaaaacctaaaaaaactattccttttttttcaaaaccccaaa

SEQ ID NO: 24773 - DNA, 5326 bp, Cannabis sativa
  modified_base (3137)..(3150): a, c, t, g, unknown or other
  modified_base (4789)..(4789): a, c, t, g, unknown or other
tagggcacaaaacccaacagcggttcagtgaacatttattgctttagtagcttgttttattagtatgttataagaaaagtctgataggaagcatgtttgtaccctgatgactgaataggtgcatgttttaatttctaaagtaaaaggtaatttgtaaattattcttgatcgcgatctaaccaggctagatcctggtttcgcaggctgttttattagaatgaacaccaggaggaacaggagaagacaaggtaatttggtcagatccagtggtggtcagggagtgcagtttcccccatatattcgtggctggaggtagaggcccatgaggtaaggcacgcggtcagggagatgttaacccaccgaagggttcctaggattaggagacctggtttgcaggaatgcaagaaagaattaatgaacaagacgaagagattagacgtcttaggtagtagagtgctcctacaatacctactcctaaagtgcaggtggctcttgcccttgtggtagggcaggttgctgttatgaaccgaatagaaccactgtacgaaaagttccgcaagtaggcacctccagttgttctaggaggtctagatgtgatgaaagccgaatagtagctgattgttattagatgaattctaaattttatgggagttaccgaaattaacagggtggcttgtgcaacattccaattccaggaagatgtcctagtctagtgggatatggtggctcttactcaggatgtcactactattacctaggaagagttttaggagctgtttaatgtgaaatactgcaacgaggcagtttgtaatgcaaaaagaaaagaattcacccagctaactcagaaagagagtatgtcggttacagagtatacaacctagtttgataggctggcttggttggcctcgagaattgtgcaaactaattattacaatagatgataacaccacctatgcttatatggtgggaaaagcactacgagccaacgacgcggttgagtgcatttaggagtctcaagggacacaggttgttggtggagccactgctcctcctacttctaattatggtaggggtggtagtgacttgaccactgatcaaaagagaaaggcaccatctacacctgatggctcaagtcagaacaagaggttccgagggaaccaaggtcatggcaaccgtcagggtggttcagaaacccgatacacttaccaggaatatcccaactgtaggaagcatcatctgggtgaatgtaaagggtgagaatgttttcactgtggtatgcctaaacattataatagagattgtccacaactcaagaaagaagagcagaagacagaagcaaacccactttagcaagcgtgttcgctcttactcaggctgatgtagaagctagcccctaagttgttacaagtcagctctcgatcaacaactcttatatctctattttatttgactctggggcctctcactcgtatgtgacggtcagagtttttgataaattgggaagaccgtttgatagttatgataaagggtttggaaccctattgcctggtggagaattagttatctccaaaaggtaggttaggtctatgccaattcggattaaggttaaagagttgagtcgtgatttagtagaattgggcttagtagattttgatatcatacttggaatggatctcttgtcgaggtactccactagtactgattataagcggaagatggggatcttccaacccgagggcgaggaaccatttgtgtttatgggattagttcaaggatcccgaattccagtgatctcagttttaaatgccaaagatttgttacaagatgggtctctagggtttttagcagtggtattgaataccacgcaacctaaataagattggcctgaattagttcggcctgaatcagtttggccagaagacttcagagtggtctacgaatttttagatgtgtttcttgataaacttctaggtttaccatcgcagtggaaaaatagatttcgttatcaacttagcacctggagcagagtcagtatctaaagtaccttatagaagggctcttgtagaacttaaagagttaaagattcaactgcagcggatgcttgacttagggttttcttgacccaatgtgttacccaggggagctcaaatgttatttgttaagaagaaagatatatccctacacatgtgcattgcctatcgagaactaaacaaattgactatcaagaataaatatcctttacctaggatcaacggtttatttgattagcttcaagggaagacagtcttttctaagattgatctttgatcgggctatcatcagttgagaattcgagaggaggacattctaaagactacttttcacactaggtatgggcactatgaatttttggttatgtcttctggactaaccaatgctcctgcaacttttatggatttaatgaatagggtattcaaggatttcctcaatatatgtcttatagtgtttatcgatgacatccttgtgtactcccaatcagaagcagagtatgaacaacaactccatatggttttccagcgattacgagaacataagtagtatgccaagtttaaaaagtgtaaatttttgctatcccgtgtgtcttttctcagacacattgtaaggacggaatcaaggttgatcctaggaagatttaatccgtcggggattggccaagactgaatatagtcacaaaagttagaatttttctaggtttagctcgttattatcgtcggtttgttgagggatattctaagatctcaatgcctttaatagaacttactaaaatgaatcaacagtttctatggactaataagtgtgaagcaagttttcaagagttaaaatagcgtttgattacagctccggtattagggtaccatcggataaagacaagtttgtgttttactgtgatgcatccagacatggtctaggatgtgttttgatgcaagccaattgggtaatcgcttatgcctattgtcagttgaaggaatatgaacagcgatacccaactcatgatttagaacttgccgcagtagttttcaccttgaagatctggcaaaattatctctatagagaaaaatgtgagatttacaccaatcacaagagcctcaaatatttcnnnnnnnnnnnnnntttgaatatgaggcagagacgatggttggagctagttaaggattatgattgtgaaatcctttatcatcccgggaaggccaatatggtggcatatgccctaatcaagaagggttttgaacaagtatctagcatggttatgatttcacctcagctagtatatgacatggtcaggttaagtattgagttgattgtaggcaaacttaataatttgatgttacaattagatttttttgatagaatcagattcgcccagctggttaatcccgaattggtaaagatttgagataaaaatttctccagtcaagctagagacattacagtgtcagataacaagatgttgttattcaaaacaagaatttgtgttccagacagtgtggaacttaagaatgagattctcaaggaagctcatactaccccctattcattgcatcctagcactaccaaaatgtaccaggttttagaacccttctatttgtggtgggggatgaagaaggatgtggtagaatttgtatcccagtgcttgacttattagcagattaaggctaagaaccagagacctagagggttgttgcagcgtttgactcttcccaagtggaaatgggaggatgtcgctatggattttatggttggattacctagaaccacaggattgttcgattcaatatgggttgttgtggattgatttactaagttcgcacattttctaccagttaaaacaacctttacagtggatcaatatgcagacctatatgttaaggaaatagtgagattacatgggcctccaaagtccattatatcaaatagagattcaaagtttacctcaaaatttttgtaaagtcttcagcgagccatgggtaccaagcagaagttcagtacaacttttcatcctcaggctgacagaaagtctaaaaggacaattaagaaacatgtgaatatgttgcgagcctgtgtgatgaattttgaaggctcctggagcaagttcttaccactgatagaattttcatacaacaacagctatcagaatactacagggatggctccctatgagatgttgtatggcaggaagtgcagatctccaattcactggatgaaactagagaaaggaaatatttaggtctagaatcggtacaacaaaccaatgaagatatagagaagatcaaggccagaatgcttgcctctcagagtaggcaaaagaattatgcagatccaaaatgcaaaaatatatgatttcaggtaggatatcatgtattcctacgagtgtctccgatgaaggggattaaacgtttctggaaaaagggaaagttatgccctaggtttacagggccttttgagattctttaaaaggttggactagtagcttatcgtctagccttgcctccaacactatcagcagttcgtaacatatttcatgttttcatgttatggaaatacgtcgcagatcccactcgtgaagaggaaccagtactgattttagacagaaaagataaggtccttcggaacaagaccatagctttggtcaaggtactctggaggaaaagtaaggtggaggaagccacctaggagttggagtctgaaatgagggctcaatatccagagttgttcaggttagatttcaaggacaaaatccttttaacggggngataattgtaatgaccgcttaatttttgtttgagaattagcagataattagggtttaattcagaattagatttttaattatgatttatgaatttatagagatatgtttgaattttaggtgtgctattaatgttatataagaaatttcgtgttttttgtattttatgcccggtaatagtggaatgcgacttttggcagatagagtcactctttcttatagtttagtattttagaaataaagaggcaacttagatagacactaagaatgtcaagaatatttatggttttatatttgaccaaaatgcccttaggtggcaaggttactttttgatttagcaagggcaaaatggtcttttgccatgttgatttgttttgtcctctagtggattatgtttgaattagtaacctgattttatttgggattttgttctataaacattttctactggtgaaaacaacctttatagtggatcaatacgcagagttatatgtgaaagaaatagtgaggttacacggggctccaaagtccattatatca

SEQ ID NO: 24774 - DNA, 1966 bp, Cannabis sativa
gaaaatttgaaagatacatttatcattatttttattagttttgacttaatatttattcaagccctcactcaactaaatttctggcttcgtcactggttgtgttcaagcccatattttttgtgtcgtgtctgggcccatatttattcgtgttgtgttgggcccaagctcatattttttcgtgtcgtgtcgtacttgtatcacccgtgctcgtgctagtctcatgccgtgtcaaaaagcccgaccctagtctacaactttacacttgacattcaaacacaccatgtattttaaaatacagtataactactgtgcattataattactaccctatagatagtaattacacagttgcttccaaaacgcacttttatggtgcattttgaaaagccaagaaggaattagaattatgtataattgaagataattacataattttgtatatttttactattgtatttctttttatatcattgatttaatcttttattcttttagttatatttttatatgaataaaatttcactccattgaaataaactattgaaaaattttaataatctacttcttttctttatcctctttttcataataattttataacatttatttattaaatattatttttattaacacaaatattttttaaattatacgttcatggtagaaaaagtatgtatatactttatttaattttgtaatgcatcaaacatgtatagtactaatataattcagttcaattcaattcaagagattcagtcaaacatttattaatatgtatttgtgctcttttcttttcttctttcggtaaggttgtgctcctaaatctttgatacatttttcatttaaaaaaatgaaaaatccttgaatatcattcataatttataccattgaaacgataattgatcctaaaaaaattagttgttactaaaaaatagtaagtgaaaacaaattgtcaatagtttgtcacaatttgccaaaaaatatatatatagactaataaaaattgttgcgattaagtaaattatatttaagaattataatttttgtcactaaatacttttagcacaattattttttgaacacattaatattgatactgattatttaacagcagatctaataaaaagctccatacataatacagttctttctaaaaggccaaaatataaggcaatgtaatatatatcaaatgttaataatggattagtagaaggcacacatatataagatgacaataaactataacttcattgaaggaaaatcactgtaatttcacacattccaaacaaaaacaataaaataccccaacagaagtttaagacatttgattaaagaaaaactaaaactcatgactaagatgacacataaaaaacccaagttcaaaatcaaaacaaaaccatctaaaccaacaaacacatttcctaatcaccataagcaacagtgtccatgatattagcaagaacattcttacattcctgcaactttttcagacttccagtgagctttgagcgctttgtagcaacagaaggcgattcctccataagcctctcaatgccgccgccattaggggtcatcagctctgtcactatctcaatctccaaatccttgttgacaaggttaaaaacagaatgctgcaagtgaagagccattgaatccaccaatctcctcagcacaatcttccaataagctatcattctcatcttcaaatcaaatgcttgatgtagaagatgaggatacttccttaagtgctccacttcaatctcaccaaagccatccaaattcaccttaaagggtctcttctcatcatgcaaaatgctatgaatgaatccatctttctgcaacattagcttattccattctgtaagaaaatcaggattacaagtgtaatcagtcagcttttccatctgaaccacttccatcatccaattcaaagacctttccttcattttcgcgatcaaattatgac

SEQ ID NO: 24775 - DNA, 4749 bp, Cannabis sativa
aaataacaggattgcaaatactaataccccccccccctcaagatggagcatatatgtcatgtatggccatcttggacaaatgagaattgagagtagtagagggtaatggtttggtgaaggcatcggccaattgaaggttgctactcacgggaatgagacgaatggtagaattggcaatcttttcacgaatgaaatggcaatcaagttcaatgtgtttagttcgttcgtgaaaagtggggttgttagcaatgtggatggcagattggttgtcgcaatagatgaaagccggtgtgggttgtttgatgtgaagatctttgaggagatattggatccaagtcatctcactagtagtggctgccagacgatattcggcctcagcagaacttttagaaacagtgggttgtttctttgttttccatgaaatgaggcagtcgcctatgaagatgcagaacccggtagtagatcgtctagtgattgggcaagtagcccagtcagaatctgaaaaaccgcggagatgtagagacgatgttggagagtaaagaatgccttggccaggggatcctttcaaatatcgcagcaggtgatggagagcagataaatggggtgtccgagggcaggacataaactggctgagggtgttcacagtaaaagttatgtcgggacgagagagtgtcaagtagagaaggcgtccaataagttgacgatagtgagatgggttgtcgagagggtcgccttctttgtcatcaagtctttgtcttggatccatgggggccttagccggtttgctactggtgtacccggtatcatgaagaagttgcaaagtgtatttacgttgtgaaagaaagagaccggttgcagctctagcaatttcaaaaccaaggaaatacttgaggggtcctaaggttttgagtttgaatcttgcttgaagagagtcttgtaaatgttgtaatgtgggaaggttggggccagcaatgataatgtcgtcgacatagacgagtagaactataaatgtgtcattagagcctcgtgtgaagagggtgtaatcggcttgggactgagtaaacccttcttgtaaaagtgcatcagtaagctttttataccactgccgtgaggattgtcgaaggccgtaaatggatttgtggagtttgcaaacaaggttgttcccagtgattgtagatggaattgtgaggccttggggaatttgcatatagacctcctcgtctaagtctccatttaaaaaggcgttgttgatgtcgagttggagagtgtgccattgtttaatggtgacaattgcaagaaggagcttgaaagtaaccatcttggctacgggggagaatgtgtcaaaaaaatccaaaccttcttgttgtgtgtaaccttgggcaaccaaacgggctttgagacgttctacacttccatcactgttatatttgatcttgtaaacccaacgacaccctatagcacgtttgtttggtggaagaggtaccacggtccatgtgttgttggtgataagagccaagagttcattatccatagcttgtaaccaacgtttgaattgaattgcttgcttgtaattttgtggttcgaattcggctgtaacagcaagaataaaggatttgtaagtttttgaaagtttagaataagacataaatttggatatgggataagcagtagtagttttatcctgaattaaattgtagcactcaaaatcctttaagtagctcggtggacgagggatgcgagtagatcgtcttggtatagcagtaggtggtgtgtcaagatcctgctggtttgtaggtgcagaaagggctgtgtcatgcgatctgcttgatgttgcagcaggttgcgattcgagatcctgctgctggtgtgaagtttcagtatctgcaacttcattagtttcttgcctttcatcaagttcctcctgcaaagtcgggttaggagaaaaaatgcaagagtcttgtgtaggatagtcattaatatgagtgtgagtgacatgtgtatgaggaagaacaagtagagaaaaaggatctatagtactgttagtagtgtttagtttgtgaaaggggtaaacattctcatgaaaaattacattgcgtgaaatgaatatttgtttggattgtaaatcatacaatttataaccctttatacctctcggataaccaaggaagacacatgcttttgcccttggttcgaatttggttctgtgtgaagttatagtagaggcaaatgctagacaaccgaagcactttaaattgtcatattctgggggcttaccaaacaacacttcataaggggattgcttttgtagattcggtgtggggattcgattaatcaaaaaaactgcagtgagaagacattcggtccagtattgaatgggtactttcgattgaaaaaatagagctctagcaacgttaaggagatgttgatgctttctctcagcaaccgcgttttgttcgggcgtttctatgcaagtgaaatcatgtaaaataccatgttttgcaaataaatctttgaaggagagctcaggtgcattgtcagacctgaatcgtttgaaaatgcaatggtattgagtttgaatataagcaataaattcaggtattatggtaagaacatcagacttttgtttgagaagatacacccaagtaaatcttgagtgatcatcaaccaaagttaaaaaatatctatggttagaatgtgaagtaatatgataagggccccaaacatcacaatgtataagatcaaaacaatgaggagaaaaatttgcattatttggaaaaagggagccttttttgtttggctaaagggcatatgtaacaaggttcagcagtatgcagattcttagtgttacaatgtaaagaatcttgaagtaaatctaagtatttatttgataaatggcctaatcgcttgtgccatatttcagcggaagcaaaagcattgatagaaacgggtgtggtatccaagatgtagagaccattttccgaatcacctttgccaatcatcctcttggtgcgtgtttcctgtatgtaaaatttatcagtgaagaactttattttgtaatcattatcctcagttagacaactaacagatatgatgttgaatttgaagttaggaacatacaatacattatgaagtatgagatgattattaagagaaacattaccacttttatacaccatgagatgttcattgtttggcaaaattagcttggtaggacaaacagtgtgtatattttggaaagaattgatatccgaacaaatgtgtctagtggcacccgaatcaattatccaagaattagttttaggcaaaggggaacagtttgtaagaaccatacctgacttacctgttgatgtactaggatcggcaggacgcagattgttggtttgagcagcaagaagagacagcaactgttggtactgagttggagttagttgcggcaataaggtgttattttcacctgtgctgctggaaccgatttcattagaagtctgtagcttatttgctgcagcttctttgggtttattatttttgttgtaccccggtagatagccgtgtattttgtagcatttttctatggtgtgtccatgcatattgcaatgtgtgcagaatggtcttcctcgttttggtggctgagtttttgttggttcagattttcccgaggttctttctccttgaaaagcaaaggctaagttgccatttggatctgcagaagtattctgccttcccctttgattttcttcctgtgaaactagatgaaagacacgattaatctcgggtaaaggttccatcacaagaatgttacctctcacttgagcataaagatcggacaaccccatgaggaacgacattatgtattccatattatgatggtcttgcaatttcttgactcctccacatgagcatccattgcaagtgcaactcggcctaaaattggataattgctcccaaacagttttgagctttgtgaaatacatgcttactgtttgattctcttgccttaagttcatcaaatctttcctgagattataaatgtgagccccgtttctttgttggaatctaactctgaggtcattccaaattgcagcagccgattcatcatacaaaatactagatgaaatctctttagaaaccgaattaatgatccaagaaattacaatgttattgttacgaatccaagcattgtaaagaatatgattagatataggaggtttagaaattgaaccgttcaagaagcccaatttgtttttgacagaaattgcaagttccattgctctactccaagcaacatagttatcctgtccagtgagtggctgagacaccaagacattcccaggattgtcaccatggtgcaagaagtacggatccgaaggatcttcaatttggtttcttgatcttagcagctgcgtattaactccttcgtcagccatcagactttgatttttgccattgttggtctgatttgaagcttggtctactgctgctatggtttcttgatcatttgttgacatgatcgaggacgataaaggaggacagaagaaatagggaagaggtaatcaaaaggagaagaagatgtcgatgaagaattctgtgaagaaacgaattcctcaatacagacctttgatcgtcgccggagaagaaagatacacggcgagaagaaaagaggatttaggatcgaaaggaagcatagcttccttgctctgataccatattgcggatgaaagaaaaacaaactaaaagtcttattgattgaat

SEQ ID NO: 24776 - DNA, 4125 bp, Cannabis sativa
atatatatataaatatataaagaaggaatacttattattagatttgtgagtagaagttatttttatacttttcaattttattattttattaaaaagttcactatacttcaatttgttatggtatatcacacacaatcatgttgagctttaaatttaatgaaccaaattatgtcattttttaaaatataattttcattaagacaataatatcatcattttatttatttgaaattgtttttaagttttaaaaaaaaaattgatattttaaaaatagagttgacttgtaattacttttagtttttctaataaatatatacgaaaaaataaataaatagaaagtataatattgttaaaattcatttttcacaaaactaacctattaataaaagtttaaattattgaaaccaacatttaaggaaaaaatacgtggtcataagtataatttagttaattcatacttcttctcaaaaaaaaaaaagatattttaagtttaaattctccttcctaattaaaaaaaaaataaaaattaaacaaaatacaccaactcaattatacagtaaaataaattataatgcaagaaaagtaatcaatataactatacttaaatactatgttaatatatgttcatatcaagtatcttgttatgattttagttttgttatattgctgttgtaaggttagtttggttgtgttttgcaagactagcatgatgagcttcgctttgtaatggtagtatgggtagtttaagttttatatgcagaacagagaagtccaatacttcaataattatgcgtttaattaaccaaaggaataagataaacacttaaatgttggtctgtgtagacttaattattataaaatatgtgtgcttattctaaacaaaaaaaaaatacaatcactcctaataaacttagttacttttagggagcttgttataaaaagttgtttaagttgtttgtgagggttattttgttatcttggtgtataattaataaattataatgtggtttttgcggttaggaaaattcaaaaaaactgtatgtgcgggttggtttgaaaaaatagtgaaaaaccgcaatactcacacccctacctacaactacccactaccattgccgaaataactacacaccatcaccaccgccgaaaccacaacttcccactacatcttttttagattcaaaataaccacaactaccgccacctccaacccaattcaaacacaaccctacaactcatatccaaaaacactcaaacaaacataaatcttgtccatgagatcggagctacccacgaccaccgacctcggacttgagacacctcaaaagagacgtccatccaccttggtcgacagccactcaccaccgctcacaacaactactcaaacggaggacagaggaccctctgccttcaacttgctacaacaccagccagatctagccggcggtgctgaagcactaaaagcccgaaaacggtcaaagaagaaaaagaaaaaaaagcaaactctcatatttcagttaaattttgagatttaataccattccataatagcaatcaattctagtattattaaaagtgtttaaatttagatttcttttaatatattaaagtagaaaataaatgttaggcaaaaatagtaaactctgtttgcaaactattattacagcaaagtaaataaaaatgccttgattaatatgtccgtggaataccacaccacttcttacttaagaagttaacgctcggccaaggactttaattgttcaaactcagcttactatattttatatatactcatctttcataacaaaatttcaagccatatacaatgtgggacacttttgttatttaaggccaaaattcatcaattaccttatatatatatattacaagttgccaatcattttttaaattaacatttcagtttctatttattttttgacatttttagtgtaaactaaggtctaaaatgtaatttgtgatagagatagactttgagaaagatattatttttaaaaaactgaaattatttatatatataaaaagaaatttagagcataaataaataaaaaaaatatatacaaaatcaatttatctaactagtcaatttaaagaaatatatattatttctgcaatatatacatataaattataaaaaatttcttttatattccagataaccactcacaaataaagattcattttttacaatctacatttttcaagttatatgaagtttcaaaactattacttttaatgtaaaacccttaattattattcactctaaatttttctaaaatatataaattttttaaaaaaatgaaatgatcttcattctcatttctcgggtttaattatctattcaaattttatcatactttattccctaaattacaaaatgaatgacctttttattatagcaacaacaataacaaatgcattgattcatccaaactcaaaaattttaaattaaaaatgaaattatatttcagaaattttgctccaaatttttcatgccaacatttaggacaccatgtaatataagtgggtacaaagacaacaagatatcaatatcacaacttatgtaagtttatatataaaaaaaagagatttttttttttattattttgtttgtttgtgatttacataaaatagaatggtggttaggaagaaattgaatgtgaaaaagaagtagaaaaaagcttgcccaatcaactcaatttcattcatgatcatcaacatcatcatcatcaagggtcactaaagttggtatttgaccttgatcaacaaaatcaatcttactcaatctcacacaacacagcactttctcaggcaattcttctggtttctgtgcctgtttcacaataagtaaaaaaacattactcttcatgtaatgtactaatatagagttaatttgtttgtttgtgtgtatagaataaagttaagttacctgaatagttaaacccaaatcaagtattccatttttcaaacgttctctaaaagattcaagtcctttcctagcaatgtagctgaatcggtgaatgtctagatcaatctcaaagtaattaggaccctgcaatatgaaacaaccaataaaactcacaatctcaaacaatgtatgaggcctcttgggatgaggggccttcgggcaataaccgctgtcctactttgagacggccctagttaggcccgtctcaagataattagagattttgagccaaaaaatttaattgaccttgtatgaaaatttttatgttttttcataatataatcacaaaaatttaaattattaaaaaatgttaaatgtagtattttagaaaataaatttggaacatttttgttaaagaattttgttgtcttgggtggggatgttggcgatatagactcatgttgccctactcttgagctaagtaacaagagaacaaagtaaaaaagaaaagaatttaccttgtaaaagttgtgttgaggacgcgaaaggacgggtttttcattgtaagcgtttataagcttcctttcggtagaacttaactgaagatcctcaggattaacaactccagccatgatcttaagcctttctctaaatggaacaatggagtcttttgcaaatcctttgaccttttccatctcatcttcaatcaatttctgtacatggcaaataatttagtccatttcagtgtgaaaagaacaaggaatgttgttggggttagaaaaagttaccttaatgttatcttgacattgaggtgagacatctttctcaaaagtatctgatactttaaaatatagtacaaggttcactccttctccatcactatctccaagaaacattgcagctggataagtaggcaactgcaataatgcaaacatactattaaacactctcctcaatttctctattctatttttcaaaatatcatcatcaaaactctattttttctattattaaactctatcctttaaaatacatcattaaaatccaattttctctattttacctcaaatttttacactacagcaccctcgttagcttatctactttatccttcaaaatacatcacaaaaattctattttttctatttgatctcaaacttttacgttataccatacatcactaaaactccacttttttt

SEQ ID NO: 24777 - DNA, 4584 bp, Cannabis sativa
  modified_base (2531)..(2533): a, c, t, g, unknown or other
gacggaggtgtgcagagcaaaacgaaaccagggtttaggcagtttagccgccaaaattttagtttttgtggttaagtgttacaaaccgtaaattcaggtggtttagccgcctatatcccatatatatatatatatatatatactcatatttaaactatgttgacactggatctcaatttataaaaattcattaatagtattctatgtgatatattatagaaactaacctgttcaagcaatgtcaaagaacttgagaaacttggcaaattcaaagttttcaaaagctcctcagtgtattctgcaattccaattgcagtcaagaaaatgtttaaatcataaaagtaaaatttaacaagcaaagtacaaaactttattgtcagattgcccaatgagaagtcaaaattaacataaaaagcttttctactctatctaaacagagagtaaaactttattaattaaggttaggttacaaattgatcaactttgcttataagtagacatgaaatactaaaaggacacattaatcttcaacacgaacaatatctcttttaccaaacattccaaggtgaatactgtaaaaaccagtattttctataatgacaaattaggtccagtcgagtctagaatggttgatgtgaagtctatagtttgtgatgttagtgcagtccatgtcagtaaagatactttgggtgtttaatctccaactagttacagctatctactttgagtttctttgtttagttggatataaataacttttcttgttactattttgactaacctctttgatcgaagattagatattacgttttacatttctttcttcttgtttcgtctttgtgttattgtaggtactagcaagaaactccatttttgtgggttgaagttttagagcaagtcctgaagtcaagtaatgagagctgaagggttcatttaaggcttggtgttacagatctaaaggtgttcagatctagagcttcgttgaagggatttcaacaaacaagaagcaagagaatcttgcttgttcgaccaagggattcggaagatcggggtaaatacttctgtaagggacttggcaaatttgtacaaacattgtatttttgcaaatcatttagtgaggtttcttaccttgattcagagaacccaagcaatatctgactgaaatgtgtttccagtggtaggggaagcttgttattgattgtctcttactgttgttttttaatatctctgatgcttaatctcgtgaattttattggtaatatgattaaactgaaacttggtaatcgaacttagtaacaaagcaatttagaacttacaattggtatcagagcaagcttattctattacaaatattgatcatcatggttcatgcaagctgtgttgtactgaaattcattattgctgcaattcttgatatttttgcattatgtttcctttctacaacacccagttggagctaaccccctctccagacacgactttgggagtatattgctctctacctttgttttaattttcattgttcgtaaaagaatagagatgttcagagaaggagggtccacatctcgcctcccaatgctggaaggtgcgaattacccatagtagaaaaccaaattgcgagcattcttgaggaagaactggatcttgatgaactgattggatccttgcagaattatgaaatgtccttaacaaggtgaaagaaagaaaaaagtagaagggtgtggacaaagaaaaaggggacaactgtaacgccctaatgcatgggcgcgctatagtgattttccaaataacatactaccttgctaatcaagggttttcttttaaaatcgtgtcaaatcaaatcaaaactttgaataaaattaataaactttataaacatacatatgtatatatatatatatattacataactgggatccgtgctaaaacttttataaacattttgaaaatatttttacaacatgtcgcatagcgactacaaaatgtgccctaagatgtctcgagaccaaacactccaggtcgctccgtcttgacatgtacaatcattacccgagttcgaaactcactcttgttcagcttccacctttcctttacctacacatgatagtagaatctgtgagccaatagactcagtaagaaaagcatacaacaaaataaataatcgacctgtttttagacgcccatacacatatccacaaggcttaccaaatgattaagaacgttcttaatggttggtgctattgaccatgatatcatccactaccagcactatgatcgcactacaagactagcactatgttcgtaccgctataatagcatcaatagagcctcagagtacagcatcaatagcacccaacagtacaattggccatgatatcactcttaactagtactatgcccgtactgtcgaactgacacaatggttgtgtcgttataatagctccaattaatactctctagggtatcactcttaaccagtacgatgcttgtactgccgaaccgacacaatggttgtgccgctatgatatcannnaaaacatatacaatcacaaacacatcatgcatatataatatattctatgctaatcttacctcatttctgaattcaagtaagttggctgacctgaacggaaaacctcgtgcaaaaatgaatgccctaagtcacatttacacaaacaagtaaataatgcgccaaaaccctaatccggaaacccaaactactacgggttctgctattggtactcgttattacaatatcctaattatcacaaaaaccagaaaaactagggttcctaaaattttcccaaccggcagaccagtttcccaaccagaagaccagttcggtggggtttcttaaggaccaaccagaattctagttcccacaagtccccctgaaccggtcaaccggttcagcgcaggaaaccccaaaatcactcctaacatctcaattcaatcccaaacttttcaataacttctgaaccacctgtttatactccaacaaactcaatttaagcaaaagaactcaacaaatagctcaaaaattaaaaacaccataagaggacaaagtatgagtccttaaactcatactttgctcaaacaccataactaccaacaaactcaactcaagatatcacaaatattctcaacataactccagaacacgaaattaagcacaaattatcactacagaacctaaattcgaaaattcaaacattaaaacctaacaaaacctttagtaacacatataatagggtttcttagcccatcccttagcttagaaactccaaacgctagctggaaattcaagaaattcactgagttggctgctcctacccttgatttttccttggagccgagtacaagagagagatagagacaagcatgaggttttgttctttgtatatgcttgagttttctaattagagaaactatgggatgatgtattagtcccctctttaattaaaaacgagctgcaaacacacacaagtgacacctaattcctttttgtaaaattcctaaagtgccattgacttgaaagttaagcaacatataaactttggggtaaaatggtccaaaccttaatcctacctaagcctgacattctaaatacctcttatgtttgtcctgctaagaataggttctaaatttattcatgtaactttaacggccatctattgcattattcgtcattaccgaacaaaattataaaaaaattgcacaattaatatttgacttaactaatactcatagagtttaataaaatctaaaattataaagctagtacccattttcaagaataggacccacaacataataaaatcgtacataattaatgctaattgtctttactaagatgtataataaacttaattatttggatgaaagattactaagaggtatccctcttttatgtgattaaatcacatttgtgaaaaaaataaaatattaatagtaatatatatgtaaatttcctctcactaatattagtaaaattagttagcaataatatatagatgtatatcttattattatgaggcttgttggtgtgatatttgtagactaccttacccttacaaatttaattttattacaattctattttttttttttaagataaaattaagtattggcaaaatctttctccacatgatttaatttgaagtagtagtactactacatttacatttaagatttacattattcaaatcttattttcctaaaaagaataaactaatcaaccaatttctaaagggataagttgaaaattacctcttttttttacacattaaccaaatataactctaaaataattttaattgataaataccctcttttataatcaaagtactaaatataacctcacaaaactaatcaaaattagacttcctaatgcatataatggggatataacttataaaagtgggtataaattaaagagttgtaaaataaaggtaaaagttaaaatatgaaacaaaaagtgggtatagaggataattttctcatttgcttctaaaactctcacaatcacaagttcttaagtcaaacaattatatataattgcaaaaaaaaaaaaaaatatccata

SEQ ID NO: 24778 - DNA, 887 bp, Cannabis sativa
tccccatgatactcgcacctttgagtcagatctttcttgaaatggcccccctgaggtgttcgtgggagttttccaataatggaccatatggccggtcgcttataaacatttttgcgagtatccaccaagctagagtactcagtgtatctcggctcatattctttcatagacttcttggaattctcacctcatcccggaccctttcccactctcttgctccaggattgactcatgtcctgcttgggagctttcgttttcgattgtctgagagccacacttcatccagtttgtgttggtccgtacctagagaaataggtttgagtaggtgcgagcaccgatgaggagggctcgtaaatcgtgggagtatacaatgttttaggaacaggaacgaacgaggaaaatccgagaatggaggttaccggggtcgatgccgaaaggacctcgaacacatgttgataggcatcctccaagctaataaagccttgtgccttagccataaactcagacaatgtctcggttctccttctttgcatctccccccacaacagagaacctactgcaactttggactgtagggccacgagtttcatgtcttcggtcactatggtcttggttttcgcttccatcatccattgaatgaaacctttcaagctttccaaatacttccaagaatggattgatctgggagctaaccttttccaccaatcctcagcagacttagtgagggtcaaggaaaagcatgaacacttagcgttatcgctcaccctaagcacttgcgttatcttattatatctggcctggtgagtctttggatctgtgtgcccatcatacaactctattgagggcattttaaagttctccgggagtggagcttctgtgatcctcca

SEQ ID NO: 24779 - DNA, 3133 bp, Cannabis sativa
aagaacaagttcgatacaagagaacacatattcatgagtagatttttttcataaaaaatgtaccatgcaatgacatgaatagattaatgagataccaaagtttaaggagacttacatgagacagtttaacatcttcggagctgcacccttgtcaacacgatactctccattaacaaggtagtcaggctctttaattacaggaaacactccaccaccgattctcaccatccacaaaaacctagtatgaagtaattccatcattatatgtctaatctcaacttttaaaagtgtaaaataacaataacaactaaaaattaataataataatctcagttcatttaagtttcacgagtaaaattaatatattttgaagatctaaatatatatcatcaaaagaaaagggactacaggggctctcccatagcactaaagcggaggaggagatccagagagggagttaccgaatgacccagtgtaatgcattactattttcattattcaattatataataaaaaaataaaaaaatcaacgctaagcacgttacacaaagatatctgcagccatatattgtttacacttttttgttaaagttggaaaacaagcattttcaaaacaaaattagtagctaattacatgcctctaaaagttagtccaatattgatcattttgttaaaattaatggaatatgtaattttgtatggccttacttgttaatgtcatcagaagaataaccagtcacaccaccaaatacaactaaaacataatcaacatcaagtgatctcattatgtcataagcctcatcttcataagatgacattgcacgtccaacagtagcaatgtgtgtattattccaggtgttattgtcaactataacagttctgtttcccattgcagtgatctgatacccataatcccaccatgacatcaccttagcatcctgaggagtattttgacgaagccaaaagtatgcctcacgataatcatcaaaaatgactctgttgccatgagcaccccttgcagccaagacaatcgaaggggatgagtatgcttctgatgtcacccaggtacagtgggtggcatacgtactgagcaagtaaaatgcaccaaaaagtagggctatagcaccatttctttggaaaggctgagactgatcaatggaaacctgtttgtacgacaaaatgtgaacaacaatactgactgtatatcaatattctagaactaactatagttaaaacaccaaagcaagataagaaaatagaagtttcataaacattaaatgatcaacaaaaagaagaaccaaacaatataaaatttccattttgaaaatgaagatgaaaatatatccttatttgaagattactaactacaaagtaaagcatattttagattagtgttttactttaacaactctgcttttcaattttattttattttttaagtttttggagctggatgtttgacagggagacctccaagtggccccaaggttttttgtgactgtggggcttcgaaccttgaaacaaatgcctacctagcactttccaacactcctccttaccactaggccacctcttggggttactttatttttataattatattcaacaggaaaaataagaaaagaaataactaaataaaacataagaagcgcaaacactacagctaaagctaaagctaaacaaaatagtgcacaagggcaagataacaccaattcttttaatccttgaaagcacttaagttacaagtgtcttccccttgattaacccctactgagaccctatttcttttgaaacactaacaaaccaagttttaccaagccactccacaataacagaccatgatcatttacagttacagataggaaattcacgctatcatctatgacaaaactttcaccaaattattgtcaaatgattcaagtgtcaatacctctcttaactattatatccccaaaatttcatttcctaccccatctagaccagcaaataataaattctagaaaaaaattcattttattttcaccaagcaagaaagagcttctaatgaaactgatcactgattgtcttgacattgataatggacaatactcaatgcatataacttagatttcttaattgtgtagaagacttataatactagctgagcagtgacttgtgagtgcagaacatacaacagtacaagtgtacatagcatttggttcaactcttcttacagttttgaaaagagaacatttccaaaaatagcataaataaattgacaataagaaaaattgaagtggagaaaatataaatatatatatacatagtaaattcataatcataactccaaaagaacaagcgcatatcattttaatcctcgttattgtgtgtcaactccaactcaacgaaatgtttaacagaatgcaccacagttcataaacgttttggactttaggacattaagtagaagcttgcactagtatatgattaaatattcctagtacatgtctgtagcaaaaggttctttctaataacataaacaattaggcataaatcaaaattcaaaacaaaagattcatgtctaaccttggaagagcttttaacactaccagttcctttactagaaccagtctgagaagccttattacttgaccttaacaactgtgtcaaattcttcactgttgcagacacagcaatggcactaataaggcaaaccgctggtgtagcaacaagaattaaccgaaccataacaccggcaaaatacatgcttgtgagcccatacattacaataaatatcgtcgcatctgatagccgtttgaagcaaaaatagagacctgctgggaaaaggaaaagaaggatgtggaaatcaaacatgaaagatgaccaagctgttggttgatgctccgagacggatgcaataattgggatgtgatcctttgcataagtaggatcaagcaaagaataaaatcttccagtccatggagatatataacccgatgccatgccaactcccaaagcaagaccaccaacaccaacagcagaggtaacagtgatcctcaagaaggcttggaataattttgtgtcacttaacatgtacttaacccagtccagaaaataaaacacctaagcaaaaataatccaaattagcccaaga

SEQ ID NO: 24780 - DNA, 3437 bp, Cannabis sativa
tatatatatactggtgagacggcgtcgttttagtgaatgtaaaaccccataaaccccttcactctcaatctccttttcattctgccttgcatggttttgattttgagttcttggcaaacccaacaaaacttcacatttccaatctcagattctcccaaaccattcagacccatctcgtgattctcagaatttgggttatttctcaactatggtttccacagattcattacaagtttcacttttgagataaacttctattctcttatgtgctctgctctcagattcaacagctatgtacaccatgtgtttgagaaaatgtctgtaagaaaatttggctgcttttcaatctagcgtttctgggttttgtttgctgagttgaactttcttttatttcttgaatttttgtgtctatatcgtctcagtgagaaaatgctaacccgtgttacttctcgtttattgtcctcttcacatttcactatgaaacatattggctttaacccaactaggaaagttctctgctttttctcttctcaatcttcatcttccttaaccacaaactcagactcaagtttggctctggttgattttcttataagtacttgcaaactcaccaaagtacaagctcactccatatctgaatgcttcccatcagttaagtccactgataagccacaatcagttcataaactttttctggagtatggcttgtctgacacccatataaggtctactattattggttgtccccaaacattgtttgctgatgctgataagacactcagaggaaagcttgaggctttgattgagttgggaatggatggtgatgatttgggcaagtttctttctaagaacccaacagtgttagctcgtagtttggagaataagttgaagccaagtattgaacttcttaaggatattttgggagatgatgctaacagcaaagattttatgcgtatccttagatgtagatggattttgtgggcagaccataataggttgttggctaataggacctttctaaagagttgtggacttgttggtgctcagctcgcttttgtttttaagatggagcctcgtatttgtcttatgcaagaatctgaacttagagatcttgtttccagggtgttagatatgggagttccgctagcttcgaacatgttccctcatgccctccacgcgattggcggtttgagaaaagagacagttactgaaaagttggacttgcttgtaagtcttggcttttccaaggatgaatctttgcagttgtttagaagagcacctcttgttttaagaacttcagaggaaaaattgaggtttggagtcgatttctatttgaatacagctaagtttaataggtcagtgttgattcgatcgccatggttgttgatgtctagtatggagaaacgagtgattcctcggtacaaggttttacaagttttgaagctgaagaggctgtttgtgaaggagcctagtttttacactatgctgcagaaaacagagggccagttcttgctgagctttatatcaaagtttcggaattatgctgatgaacttttagcagtatacgagggttataagtcaggctccattggtagtttaaaagaagaagaagaaaaatctacaatggctctgatttagctgacactcaaatctgtagaatggtatgagaacttattctttccattcctttcatcaacagaattgaactgagttggcttgtcaaaatctctgttataggtttttgactgaagagaacaagaagagaacactcacaaacctcatctcagtaagattttttccccttgtattgatttcttcataattagttgataggtagagtggtaaaaacaaattatgaggaaatttggggaaaaaagtctgtcttatatttttattgtttcattctattttgtttttccatgttatatgtttctagagtgatgtgcttatatggtagaaaattcttatttaatgatccaagtctcaattgctttttgtgaatttacttaaatttgttttgacagttaaaaataaagatagttcgaaaatgaataaaaagacattgtttatgaatatcattgaactaaaaacttaactacccttgaaagtttacttgataatattcttaagtctttcctaagagagaaaaaccatgttcttcattttctttttgaaaaaagagaaagagaccacttgtcttagactggcctccccctgatatatattgcaagcctcacttaagacggaggaaaaccatggtaaacaaacaggaagcaaaaataaaaacgaaaaaaactgtagaaaaaattgtgacagcagtcacgaaaaccatgttcttcattttatttctgtagttaatagaaaagctcacattttctcttatttcttaaggcgataattaggaatagccactagatgtttagccctaggagtagtcaaaccaaactcttcactcatatccagctccgaagccatcataccatcaggtagttcccaatcaaagcagtgaacaagctgagccaccatcaacctcaccacagttagaccgagctgcattccagggcaacttcttcttccagacccaaatggaatgaactcaaagtttctacctttgaaatctatgtcacttcccgaaaacctttctgggataaacatttctggctcattccaatacttggggtctctcccaattgtccaaaagtttatgatcacacgcgagtttcggggtatgttaaaaccatttactgtgcagtcttcgattgttgcatggggaattaacaacggtgccactggatgaagcctcattgattcctttactaccatgtctaaatatggcaagttttctaaatctgattcttccaccattctttccattcccaccttgttcttaagctcttcttggagttttttcattgttgttgggtgctttatgagttctgatattgcccattctactgctgtcgatgatgtatcaattgagcctacaagcacgtcctgcataaataaagttgagtaagactattgagtttagaaaatataataataataataaaaaccttaaaaatattattttttctaaatctacatcatttttttttatatttggtatgagatatagagtattaaaaaataaatacaaaactcaaaaatgtacttaaaatccaacgccatatttaaagaaaaatcaaaagccctaaaagtattgaagaaaacatagtattatttttggaaaaattccttgatgttaaattatttaaatcatttaaattgcatgaatttataagagtactcacaacatatgttttaaaatagagattctctaaaatatttaaagaattgaacaaaaaacacgttacatcagatgctctaaacttcttctctattttaaaacttctttaaaattcattattcacgctctacttttatagaatactatt

SEQ ID NO: 24781 - DNA, 4878 bp, Cannabis sativa
atgaagttgtgggtgccctactgtccaccaaacctccgtatcattgatgttccctaataatatcatggctttaggagaagtatgtccattgtgtttaaaaaaacctgtaccatttgcgcctccactacctcatcggttggaattcctaaggtttcctcgatggccgactactctgcttcccacatcttctcctagattcgaatcactttcaactctagagctgtacaacgatgcccacgagcttaggtatcatcacattcgaagttaactcctttatttttttctcttgattttttgctttggttaataatacccattggttgtgtcgtgcaatgaagaagatgaaggcacgtacttctctttgtttattattgttgggctttgcacataagtgccctttgaactcatgggtaacccatgaatctgaagaggcccactaaggatattagtgttttgtatttccatgactaacctgttcatagatgctgattccttcagtgatccatcaatcgttccaagcgaggaagccaatgtattcttgtattgtcgaagttgttgcaagtttagaaaacgatcatggacagaaccttgatgaactggtaagaattgtcttagcagcaacgatttgagttcttcccaagtgcaaatttttgctgtctattttccctgcggaaccagcgaagagccagaccttccaagcatagcacgacaacttcgagttgtttgacaggcttcaactgttgcaaactgaaatattgttcaacacactatgttcagtcgtctggctcgagaactaaggaaactggtaattcaatttttcttgctttgaactcatggcatcgcgctccatctcctttgtgtttaccttgttgttgttgccactgctactgcccagaatagagctatatgaagccgacgctccttagattctttgtggcttggactcttgggaccattggttaattttgtagcaactcttgcctgatctcatcaaagctcatttcacataggtcatttcatcttggttttgattatgagaagcttcttcctcaatcgtctccattagtttggcactcctagtattcagccaccacctaagatcaaactatactaaaaaagcaccacaagcaattgaacaataactagaaaacaatagcaacacaccagctaaaaactaaaaaccataacagccatggttcttgattgtatttgtcaaagaggaaagcaacaacaaaagggcaagacaatggttctttcagaccttgatgaaatctgagttcttacataacttttcccactaacactagctgtcactgttttgcctttccaaccactcaataattactaaaaggccctccctcatacacacacctcactgtccttttcatgtttgttcccttattaccctttgccaagtaaacctcataggaggtctaacattaactcaaaataattggcaattgtagataaattttgttatagcaaagatattaatacaatttctttgaaaaacctcacttatttttctctcgcactctttctttctctatgttgagttctctttttctgtctctcactaaaattactctataataatgagataatcaactcgtagatatagtttgtatatggggtgactttaggctgtggaagtttgtggaatgcaagcttactttgtcacaaataatttgtagaacttcattcataaattaatttctattactttgtagaaaattctcacattcttggactattcaacacttagttgagaagcaatagttatatatggccgactcaatttcgaaaatccacaaaaggggctttatttacaacctttttctccgacttaagtcacgtttgtaattcttctttcctttctactttgccacttccgtgctgctacgtttccgctaggccaatagagaatctatgattctataccaaataaatttgtcactgttaaccaactttattaacatgtttgctaggttatctctaatatggatattctgcatatccacacatctttcctcctcacaaacaaaatgatatttggcgcgtatgagttttgtgtttgtgtgaaattttgaatttttctcaggtggaaagtgctttgattgtcacaaaacttaatgattttctcttgtttgtgccaaagctcttcgagtaacatttgcaaccaaattgcctttttggcgcacacattctgtatagttgattgcatttttaaaatccagcttacaactccagcaagagtaaacatatatcctatggtgaactgacttttatcgagatcacttacataatctgaattaacataacctctaacaataaagtttgatccttcgtaacataatgcagtatttgaggtacctttgatgtatgtcatgatcctcttcacaatattccaatgctctctaccaagattcgctttgtatcgactaaccgctcccactatgtaagcaatgtttcttcttgtacatatcatagcaaacattaaacttcccactaacctatttgcttcactgttagggctcatacttgagaataacttgaattaatagggagcagggtagatattgacttacatcttgcatgttgaagcattttctgaaagtacttcttttgagattcttcctatttctgtcttggtgatttttataccgagatagaaataataggaagatttgacctttgaagacgaactacttcaagaaaatcttgcagcgcgtcaacatgcaagattgttagccaatctctacctcgttttcttttaacttcaagctatcctcaagtatgagccttagcagtagagtaagagcgattcgccaatacatggaaaatttgggtagagaatattgaaatactgtgaggaggatctgagatatatcaagagtacctcaaatgcacattatgttgtggggaatcaaactttaatgtcagaagttatgttgattcagattgtgttggtgatttcataagtaagcccgtcttagaatgtgtttttgtctggaagagttcgactacaaacaagtgacattgagagcactttgcacatggcaaataatttggcatttcatttcaacaaagcacatacacatcaaatattattttgttcatgagaaggtggaggattatatgttgaattgcaaaataatctacactagagacaactttgcagctatgttaataaagccgattaacaatggctaatttatttgtgtcgattatccattggtctagcggaaacataagcggcatggaagtgacaaagtagaaataaaacaagaattacaaaagtgttaagtgagagagatatttaaataaaatcacttttgtgaactttcaaaattaagtcaaaccatatatgactattgcttctcaatcaaatattgaatagttgaaggaagtgagagttttctacaaagctgttgaagataattaatgaatgatgaagtgttacaaattgtaacaaagctgtaatattacaacatgcattacataagcttccaccgcctaatgtcaccgccatatacaagctacatatgatcttggtcatttgtcatttgaatttgatcatattattccaattttgtagagtaatttgagtgagagaaatagagctcaatatagaggttgaaaggtgtttctgagaaaagaatgaggtttctcctaaacatttgtttgtagtcttttatttattagagtacgaggattattatcatatgttatccttgttatgcaattatcaatttttttggctcaactttatttgaggttctcatattcatacatcaacttcagttgtaattgagtgcctaagttcctcaacatttctaacataaactataataatgctactgtgcaggaccatcaaagactctgcgtgaacgtttttcaattcactgcttcaactttgccgggtgtaatggacaccattgccgtcttctgtttgaaatgtaaggcatactgtcatgagggtcggtgttgcccctaaaatcttgcaccttaggtgccatgtatttagacaaagcctccacattgatgatatttctggtgtacacgataatgtgcttgcagtgttcaccagatctttgtgatccgatcggttttaacattcatcatgctctccattgtgactattttctccatcgtggtcctattcgttcagctggtgacgattactgttcgagtagattctgccccacttgatcttccagccttattcccttgtgcagtgatccaggttcagtgccttcgatatgtcctgcaggggtaactggaggaacgactgcctccttataggttctcgaattgattttagtgtattagtttctttttatttgacaaagtgatttgatgtggtaagataaaaaattcacaccacacatcattatgatcatagaagcacatgattatatctaaagctaggatcacacattcacattgtgcttaatctctttctctctcattcctcactggtttttgttttctcactgaagaaagaaaaaccattttctcaaataccagtcctatgatttcttcataattttcggatagatcagtaacttcaactgggtatgtaagtttcataggttcattcatttttgttgtttctttttttctcgatcagttggtgatgtactatagtgtgacatagttctagatataatcacgtgcttccatgatcataatgatgtgtagtgtgaatttatatccctcataatgatcattaaaagaaacgaatacaattaaataataattggagttacctcatccctctctgcttgtccgaagacttgattaactcaacaattttttccccttagaactgtctggggatcccttgttaatgccctccgagttgctggacttgcg

SEQ ID NO: 24782 - DNA, 5793 bp, Cannabis sativa
attagggcgttacaataatttttcttggatttaattttttaaagaattttgtgtttgttgagagtatatcgacatttttgttgataatttttcttgtattttattttttttgaaggattttgagtttgtcgattgtatatcgatattttattaataattttgcttatgttttgattttctaaggattttgagtttgtcaattgtacattgacatttcatttattgtttatcaataattttgtgtattttttttttatgaatttttagtttatcgatagtttttctatggtctgtcgattattttttgatgaacttaccgtggtcttttttattttttttttatctttctttcagatgactccacgatttacagttctagcatccgattattttactggtcgtgtgacatataaaggcaacaatgtatttcaaaagatgaatagtctatttgtggaatacaaattgaacgacacggtgaaggtaagccctttcgaccatttttggaaggcaggacttctcacattttctttggtattatttcaccaactaatgtcgcatatgatgaaggatgattgtgagaagacaaaataaatacatttttacattggttagaatgatgtcagatttgtagtagttgagtttgtattcattacaggatggaacatcatatcaaagccaacaaaagaggagatggaggagaaggcttcccacttggggtcaaattagttaattaacaaatattttaactggtttgatagtgtaaagatagaagtactctaggataggttcttacactgtgagaatgcgcaagatgtgattgtgcatgtttttagagatagtcactacaaaaaaaatcttttctcagcgggctcgcgtgtgcgtgtcgagataggcctgagttttttttaaaaaaaatttctgagtatagctataacggtaggccaatataggcctatcattattgctattttttaaaacatagaatttgagcaatctcgatgggctcacgtgtgcgtgtcgagataggcctaattttttttttagaaaaaaaaaatgctgagcatagcaataacggggggcctatattgggctaccgagatcggtcaaaaatagcccagcccgtcccttaacctccctaaagtcttctttccattaatcattttctaaccagcccttgcttcttccccaatttgaaaatgacagccatttttccctaaaaaattcaagcaaaaattgattttcccttcttctatttcatcacaaccactccaaaaagaaaaagtgagcttgaatatatactattgatttttttttttttttgatattcttatcctgatagtttttaatttattttagtttaaaaagttagtaaaataatgagatgttagcttgtatttgaatgttttagattataatatgtttgggtaagcttcatacaacatgaataaagcttgtaaattgattggagcttcatttttgtgagttttgatttttttcttctttatgtttttttttggccgaaaatatttttttttggctaaaaatggtgttttttctttctttaaaaaaaattgttagtaaaataatgaaattagaacttgtatttggatattttaggtttaaaattatttgggtaaagtttcatacaacacaaaggctctttggggtgagaattgcttagaggtttatttgggtgagtttggtttttttttttttatttcttttttttttttggctgaaaatggctattaaatatgtcaaaatagttgctttgttttaatgttaattttaaaagtttatattttctttaaaatttataatggttatgtacataatttttttaagtgttttaagtatatagtgtagttatcatgatagtttaaatagtaaatatgagtatatataattttttagagttggtttatatgatggatgattgatatttatgttgttgtgaataatttgtttagtaaagatgtgtataaattggtaacggaaatagcatatatgtttgttggtatttgatagtagagtatatgaatatgtatttatgtatattgaaatgtgacactagtggaatagtcaagttaaactagtgtatattattaatgcccttgtaagtttttttaaaaaaagttttcgagaatttacaattagttattctagggtaatgtttattcatttttaagtgttgcaatatatacatatataaattagttaaattttcttttctataattgtgtaataattattttagtgtaatgttaaatttaaaaatttgtatattactagtttcttagctaattagatatgatacaacttaaaaactttttaaatattagatgtgtagaaaatgcaaatataattttgttttttatttttttttgaaagaaaagataattgtgttgattaaactttaagttgtaatatatactaactttattattattttgtgtaacataaaattgaaaagtttagtttaggatatgtacattagtgattacaattaaaaaaaaaattttgtttaaatagtttatgatatatattgtgtaactaaaattttaattttgtaatatgtatgtggtattattattttcttgacatattggataatatagtaaaattttaatattgtaggttgtgaatttaattagtaaggattcatttcacaaattgaagtgaagtttgtttggtggttcattaaaagatgtgtgtacaatcactcatttatttacttaacgacataatattgttcatcttagaagagtttgaatatcttaaacatccattcatagtgaagtaggttttgagattaagtgtgtgttgcgatgataatggaaggttgaaacttgtatgttatagtgaagtaggttttgggaaatttgtgtgttgcgcgcggagatataaggaagaaacttattatacgatatttgttatttgtagatataatatatgaaagtggaaaatattatagaaacagaaaaaactctggccaattttcaattatatttattgtgtgttgtttatcatgttttttatttgttgatataggtacttataaaattggaaaatataatagaaacaaaggaaactctgtccaatttttaattatgtttattgtgtgttgtttatcgtgtttgttatttgttgatataggtacttataaaattagaaaatattatagaaacagaggaaaatctgtccaatttttaataacattgaagatttataagtactaaaataatttaacatgtttaaaaattgctttgatataatttttaacttgtaatagcattaaattattttaggtaattatagattaatatgaatagagattagatgaaaaataataaattgtcaaaagagtatgaagatggagttaactatttcatgaatttttccatgcaaaataaaaatgatcctactatgatatcttgcccatgtatgaagtgtgaaaatttaaaaaaattaaaggttgtagatgcaagaggacacttatacataagtgatatagaccaaacttaccaaaaatggatatggtatggtaagagtgtgtctcaaccgtcatttccgaaaagagctcgcgaaaaggatgtatcagataggaactttcacattgatatggttcacgatctagaagaagtgtttgcagaccacccagatgaattcataagaataattgaagaataaacaaaatttatttatactcggtctaagtatcttttcttatgcactcacacaaatatgctgaaatatattctattgtatctgtaatatttgtggtaacctaaatattgagattaatatttgcattcagtgtcagtaggaaaaattgttataaaaaaatattatgtttgtatttgtaagtatggtgatgaatttgtttagattttataaaagcagatttgtgcttggaaaattatcaataaaataaatgtcaatggtgggaattaattttaacttcaaaataaacctaacccctcaaaattacaacttatttgcattttttttccacctttgatatatatgaacatcaaatgccattatagctattttatagttattggattatcattctattctaatatgaaactaataatcataagtaataataactggtcctcaagccttaacaacatgttgtataaagttaaaatacacacttgtgttaaatgattagcttcctaaataacattggaaaaaaaaaacttattacttcatccttgttgtaaagcatatcatttctcttcattatattagttaacaaagcagtgatatttactactattttgattaatttcaacataattttttgagtttacaacattatttttgtgttctgcacattaatatatgttgctttaatgattttctttcgtgcaagttgttgatactcttgaaaatattgcacttgaggggataagccattactaaaaaatgaggattgggaataaaaaatagttggttgttactttcatgagaggagatatcattggttaccatacttgtaaagtgaccaagttgtgtatgttacgtttatttttgtctatttattttgaaagatttttttttttgatgaatcagaatttcattactccaacaaacagttaatacaatctaaagactattcgaagtctgtacaggttctatacattctctccttttttttcctttgaacttgtatgcactatctaattacaaagaaataaaccactcatagtctattttcgctactattttaggcatcacataagtgatcctagttttgacttgccactttacttcttggatcaattgctgcacttgagtgctacttccctgccagattttacaatttatggttttccatatgtggtatactaaggctgcaatggcagcagcataaacagctttcagaaacttacttattttagctctgttaatccaccggagcacatcctgcatggatgtggttgctgctctccaacaaagccatgccttgatttgtccgaggcagtcctgtgaaatctgcagcagaaaaatatatgagaagttgtttcttctgaatcttcacagagaatgcattgagcatctgctgtaatttgaaacttgaccagcctctgtttggtctttaatttgtttaacattgctagccaaaggagaaagctatgtttaggaatgttcatcctcgaccatacttgtttaatccaataacataaatcatctgctgttgttaacactttatatacttcagaaactttgcaattttgagcagtgaactggttgtggctaactttctctttccattcatctttgagttcaacaattttcctccaataccagctactttgaatgggagccttgtactcccaccaagattctttgttaatatagacattatgcacccacttcacccatacattatctttttttgaagcaattgcccaaatattttttatgacagcagctttgttccattcatgaatactcatgaaaccaattccatcagctttcttaggcttgcacatgttcccccatgcaacacttccagggcctgccatttcactttgtcctttccacaagaaactcctacaaacagcttcaatatcagcaatcactcttttgggtagtatcattacttggctctagtatgcatgtatagtaagcaggacttaattggtcaagaagccctaccaagatatgaaagattcctagaactccacacctttattcgagcaatcatcttgtccactagcagcttgcaatcttccttagagattctttttgcaaagatgggaaggcctagatatttga

SEQ ID NO: 24783 - DNA, 3915 bp, Cannabis sativa
cactcactctttcctcccttcacagttttgagtattgaatttgtgattaaaaaaattgagaaaatattgttacctttctttatttttttctttcttttggcttaataacagttcaggcgaccatacatattcctttacttggtaaacaagttaatcactaagcaacaaatacaaaaggcaaacataattggggtcttgaacaattaataattagcaaaccaccggatcataaaatacattaaatgaaccagctaacattacttggaaaatttaaagaggattaatgctaacagtggctggtagagcaaaatggcatatttttcacgagcattgctattaggtaccagtggtgcccaacaccttctcgacatgtcacattacgattgactagcgatactctttaaaaactattatattaaactatgtaggacccgatacttaattaaaccaatagcgatacatagaaaggtgctaggcactactggtgccctttagcatttctctattttcacaccgaaaagaagcttcaactaaactctggaggatgacctagacctgatttcaggccagtactacccatacctaataaattatatttattatgttgtcatactgaatgtttcacgtgtaataacaaagcatagcagaacaacagtaacaccgtccattaagtatattaaaatgatggattgccatttaattaagctttcacataaacccaggagagaggtctccctgaatgtttcacattagcttaaactaataagccacaaagttcacttcacacctagcctgatttcaactaaagctggactctatgtccccattcttttgggtagcaggagccaactacacttgtaaatgaaatcattctaatacataaacttagtcaaaattcaaggtaagaaaaccagggttatagataaaattagcatgttacctactctgctttgaagtgggagcatggcaacaccacattttagtatagcaatcaacatttctgttattagaatataaataaagatcttgattgcttaatgattggataacaaccaggtcatgatgaaacatcaaaactggcttaagatgggaatcattaagaatttaagaataagatccagtatatataacaaacaaagttcaagatctagagaagtactcttctgagttcatgattgctcaaaatagatcatttacttaacagaataataatagctgggatctaggtgctttaacttattcaagcaaactgagtttcttcatttgggctttggtaagacgatggatcgtgctcgaagatttagaaaaattcccctgaaaggaaaaaataaaagattagaatggaaaagcataaagaagcttaacttttggcttaatggatatgaataagaagcccatgtgtataagtatagaataaagccaccaattaaaatttcgtaccagcaaaatgcaactaagctttgaagaatcacccggaattgcaggggcacatagcggtgattgatccaaccaataacaggccagaactgcatttatttctcttaagtcagattatgatatattcacctgttgttacattatatcatcatagcaaataattgaggttgagcatagagtaataccgtccatgaagtatattgtattgttggatagtccttctttattttagctttcacatgaacccaaggtcttcctgcatttcacatttgcataaaataattatcagtaaatacatactattgctatgtgaaatggccatatctagcctgcttattttcctaattcttttagacttgatataagtaatagagtttcgtatttaaatcagcatttataatgtgaaatccaaacctgaagtataaagttggttggtattacaagggtcaactcagttttatgatttaatcatttttgcttcagctaatgaaagaaaaaaaaatggcggaagtaacatgtttccatacaacttaccttccacaaccatcccatagtaaaccatgaaaagcaggttgttccaaggagaagaagtcacctgctccagcagcacctgacaatttgacaagccatttttagatttaacttctaataattgtttacttttctctaccacttgagtcaaccaaactgtcaactcattcaggaaaatcattttagaaacaccttattgatcctacaaagttctttctccagtcaagtatattcagcaaaatggaaaaactgaagcatcagaaactgaaggtttccttttcagcctgaccggagagatggaatgtcagaattcttacattactaacacaagtaataaataatgttgagttagattcttccaacacctaagtcattacatcaaggctttcaaggaacaaactaaagctcaaggctgagtagaatggtttaccttcttggctactgtttttgtatctcttttccccttgaaaattttgtctagaattatgtgcaggtaatgtccaaatggaccaagataagcaactccaaaaatctgcattaaaataaatcgcagacaagattgagatggcgctcaacagatacaataataaaaaaaaaagcataccatcactcaggtgttacaaacagcacaacaacaactaaagaacatattacatttgtgctacaaatttatcaatctagtgtttccctaatcattagttttttaggataaaatcaataaataaaacagctagattgaacaaagccaaaaatcttgtttgaatacaaatataacacaatcgtacatacatgttataatccagatttggtatctagaagcactacattgcaatcaagcaaatttcaaagcaaaattatcaaaaaaataatcttgtctttcactcataagcttcatagtgatcactgcccaattcgttacaaaacaataaaatgatcaatttggttcctaactacacagtaataccactatgaaagtgagcttaccactttaagaagtatacgtttcaattgaagtttctgtataccagtaagtttctgagaaactatatcgctaagtcctgctaacgtccccgctgtaattgcctgctctaacaaacaaattattcaggagaacatacccataaaaaagaaaaaagattcaaggtcaatctcagtacgagttgaacaagttttaaatcagatttaaacccaaatatgaaatagagcaaaaagatcaaaactttcatttaattttctcctctgtccacaaaccccaaaagagagagcaaagaaaagtaacgaaaaagacaaggtaacaaacaacccattcttcgtcttaataaacgaaaaataaatacgagaaaaaaaaaataacaaagagaaacatgagttgggaccttagttctgagaggatgttgctgaagctgcatcaagtattgatttaacccttttttagcaatcgaccccatgtttgatttctctaatttggttgcaaattgaagagtttgtacagcgactagatcagccagcaccgggagttaggtaggtgcctatgaccaaaaatatctcgctcacacacacgcacgctaagcagtatttatatgtgtgcgcgcgcgcgtgttgtgtttgggctggccctcggtggagacggattgcacaataattagtcccacaagcatcacatcgttacatactcttctctttctttatctatacatcccattggcaatttttggctagtttttgtttgatctaacagaatttaatgtggtcattttttattcggttaatttgtttgtgcatgttactttaggatttatattacatatataaaatttggaggtatctttatcttaggacttttggaactaacccatgtcaagctacatatgaattcaccctatcatcatggaagaagagtgtgtgaaaggccaatagtcaacaagctaggccactttcatgttacac

SEQ ID NO: 24784 - DNA, 1840 bp, Cannabis sativa
gaaggaccacaacccttggtcaatttatctcaaagtctacagataagtgcatccctttttttaatgtgttgtggaaataagaaatttgaatggatcgaagaatgcaaggaagcctttcagaagccaaaggaacacctaactaaaactcccatcctattgaagccggtggaaggagaagaattgtgcctttatttggaagtgtctgatcatgccacaagtgctgccttagtgtaggaagaaggacgagtctagttgctggtgtattatataagcagaagattacagggtacagaatctaggattgcaatgatagttaagtttaccttttgctttctaattgcctccaaaaagttgagaccttactttcaagcccttgccatcaaggtactaaccaatcaccttctctgccaagtgcttcaaaaagtagagtcatccgaaaggatattaaaataggctatggaacttagccaatttgatatccaatatcagccttaggtgtcaatcaaggggcaggctctagctgatttcatagtaaatgttctagaatgaatgacctcttggatgagccagtcctagagttgctagtctagaaggtctatgttgacggggcatcaaatgaataaggtgttggagcaagaattgtattaatttctctacaaggatattaactccaaaattccctccactttggatttccagcctccaacaacaaagcagaatattagccatgttagattggttataagtggctaaggagtaggggcctaaagcattgatgtacacaatggttcctaacgtgttatgaaccagatatttgaagaatatcaagctaaaggtgaaaagatggatgcctttgtaacacagtctcaggtgctattgcaagggttcaagacttacaacattcactgattcctaagtgaccaaaactcatttccagatatgctggccaaactcgcaatagacccaaagatcatgaaatacagagcagtgtccgtaggccattttaaggctatgagtatagaaacaccgggggtgaatgtcgtcattgatcactcaaattcctgaatgggccccatctatcaagttctaagtttgggagagcttctggttgacaaagctgcagccaagaaagtctagtatcaagctccctgatacgtgattctatatgggaagctttatagtaggggattatcagtaccatgcttgaggtgcatagccggaactgaggtaagtgcaatcatccacgtcgttcactgaggtttttattgagaccacacttccaggcaaagtccttctgagaaaattctttgtcaggggttcttttggccaacgatgaagaaatattatgtagagtatgtctagaaatgtgaacaatatcaaaggtaagccaaggtagtccctggccttttgcagtttggggaattgacctagtgggatcacaaccaatgggaaaatgaggagtaaaatatgcaatagacactgttgactacataaccaaatgggttgaagctgaactcatgaatacggttacctccaaaaggcctcagacttcttcattaagaatatcatgtgttgcttcagagttccacacaagattgtctccataacaagaagcagtttgaaagtgtacacttcattgacttctgtgttctatatggaatcatcaaaagcttctcagctgtggcaataccacaaactaacgaataggtggaagccataaataagattttgaaaacaacattgaataaaaaacttcaagcttgaaaagcccattggctagaggagcttctacgagccctttgggcgtatataacaatagagaaaacttcaacggggtaca

SEQ ID NO: 24785 - DNA, 2705 bp, Cannabis sativa
  modified_base (334)..(336): a, c, t, g, unknown or other
attttacaaatattagttattatttgtttagaaatttttttttaaccaaatgtaagcataaaaaatcaaatttccctagtcatttttctaaagattaaattaaaccaaacacattatttatctaattaagatttatactataaaattttttacttttaattacaataaaatttgtaactagtcaaaagtacaaggttgtgattaattataaattgtcattcttattacacattgggattaaaaagtctgtgactaaaagtaataatcacaaaaattataatttgttgtgactaaatatgtttttggtcacaatacttgttgtgactaaaactannntagtgacaacttgtatttaaatatcatatttgtcataattaattttttattgtgactaaaaatcacatttagccaattttttttattgtgactaaaaagttatcactatataaagatatgatttttttaaataccatgtcacccatgtcattgaatcaagatcccctattaaaaattagttttccatactagctatgttaaatctattaaaatttgacacatcaattaatttaatttatattaaatatgttaactatttttgttgactttattagaggtttaatttttttattaataaaaaattaattagcgtgttaaatttaaattagtttaacacatatgaaaccactttttaatatgagatattaattccatgtcattgcatatattaaataacttttgctacattattcaaccgaccattttacaaatgaaacatcaatattatttgcaacacagtaaataccttagtacgaatttgattattcgttattctaaaaaaatttccagactcttcttcttctccctctcgacatgcaaagtctgaacaggcctcctccttcctctacaatgagttcacacctatcccctacgcgttcccactcagtggaacctttgccaagccccagatccctcgatctaggtggctccgatccatcttccatcgacactcagagcagctcgacttcgtccaagccgtctcagctgcatcaaaacgatccgtcccaaccactccagtcgtatcaaccataactccggccagtttcccagacgattgaaccgtacacgcattaatcactctcttacaggtattaactcttttgatcatcttttcctattcactgtcaaatctcatcagagaaaagggtttttcttagggtcttttagatacaaatttggacttcccattaaattacctcaggacaaccgataccagaaagggattttgggtaaagaaaatgattttatattaatttccagaaaaggtttaattccttttgcccaaatttttcaaaatatagcattaatgttagtctgcaattgtgatctgcctggtacaattcgaaatcctcttgtgcagcaactctgttcgaaagtaaatgctacagatgtgatagttaccaaatttgttcataactatttcaaaatgtttttcctatataagggcagaacatccctttggtttcgcatctacattcctatcatatctaagctttattctctgcaaaagctttccaatattaactatttctgtttatatatatatatactttattcactgtaatagccaattagttccccccaggtctctctttcactgtacacaaccgagtccagttctgcatactgtcttcagtatctctctctctgatctctcaagttttctgttatggtattgtattggtcttaagttcactcagtcgttgcattattcgggtcaatatttttccacagttcgttggttattagctcatagtccccctgcttttagttttttgaatattattgttcaaatacactcttgttcgcccttgtctttggctcaccatattctgctcagggtcattttttcagactttctatagtcgtcattttaccttattcacacggtcctattacattaatattatttcattcgaactcagtcactatttattcacttgcatcatggatgagctaaccaaatcactatctgttactctcaacctcacagagaccgaatgcaccattcaaaccctccatgagcctgcccccaccaacactcctgactctgagatccaacccatccctttattcattgttgtcaaagttcacacggttaaatcttttaaccgcaagaacttcatagagaaaatgaccaaatattggaataatatctctcggaaccccgtgaccatcactgaccgatccaatggtctcttccttgttgagtttggctgtgacggggataggcgtcgggttttgctgcagcaaccttggacttatctcaaccaagcaatccttatggacatcccgaattctttggatgtactcaatggggatagcttactgaaaattcctctctgggttcaagttttcaatacacctttccttaaacgctccgaagaattggcggttcttgtctcatcctcccttggccacctcttggaaatttataggccttcgcttcgagaaacttggggaccctactttcgtcttagggtcatgtttgatgtggcccatcctttaccacgaggattacctatccacttctccggcataaacaaagtggtctggcttgaactgaaatatgaaaatctcccggacatatgcttcttctgtggccgaatgggtcatagctacaacaaagggtgcatggattacatgaa

SEQ ID NO: 24786 - DNA, 1924 bp, Cannabis sativa
attcagaaaatgtaaatagaaaaactactttttctcctagctttacaagcttcaactcaactacttgagcaacaatattggcactaggaacaacatctgttcttcctattactggatctttgcaaaaaataaggtatgtgctaccacaacaataaatcaatctttatagcagcccatatcattgcaacagtaaaaatcccattaatctcttcatacaatatttggaagaaaaaaaattacaaagaaaatctaaccatgagatatataaactctctctaacatatgaatctcttttctcagaaaaatctacaatcttaactttcggtttgcatttaaataacactaaatggagcctctataaattcaaaattaaaaacttactacacattttttttaaataaatgtacaactaaaattattatggaaaaaaaaaattaagatgtgaatttggaggagttggtctcgattggttgtgtgccttggtggagctaaaggagcagtggttgtgagctgaaaaagaacaaaaacagagaaaaaaaattaggatctcaaataatgtaataaacaatcatagaaatgattatccacactaaaatgtataatatattttttttgacatatcttaaagatattacatacataacataaaataaataacacatttaataaaaacaaattataatctcattttctgtatttttttaaaaaagttacacaaattttatattcttaaaagtattatgacgaaaataacatatttactatctgtttgagggtttcggctagcaaataaataaaatacaacataaaataataactctaatatatacataagcaagaataggactatttttaaaaagcttcgtacaccactcaagtatatgaaaacaaaaagcttcatagaaaaatgatgacgatgataatagtatgacacattcacaaaatttcacttcagaccaaaacaagaaacatagaaagaagtggattgaaaatcatattaatatggatgtgaacttgacatttatgatattaacaatagctttacctccctagaaaaaacaaataaatgtattaaattgaaccacaataagtcacaattatgaccacacaccagcagagggaaaaaaataatcaattcctgcttgacaatactcaaacaataacactcatacacatcatccctcacataaaattgacgaaaaataaaagtatttcaaaaccccatggtgtaaaacataaccaatcataataaattttaaaatccaacttgataatatgagaaaacaaacaaatcaatgagcacccattacccatctcctctctttgtgtatctaagatcattttttggctcttgtgctagaataaaaatttctaaatatgtattcacgataaattcacccaacacttaactaaaaatcaaactctttttctataaaataaaactccagtgattgacaaattggagaagaacaatgaatgaaacaaagctttatttttattactactagaggtgagcaacggtcggtttgatcgagctttttacacacaaaaaatccaaaattcagttttcattttttcatggttataatccgaaaatcgaccgactattatacaaatataaaaaaatcgaccgttttaatccacggtttggtcggtttaaaccgaccaaaccgaacttccttttttttaaaaaaataagttttaaattttttataattatttgaaaactaaaaaaaatagaatattgtatcaaatatcgtataatttaagaataaaacttagttaaataaataatgtaagataattttttttaaaaaaatttgtttaaattatttgtccaactaatatggtaatgagttatattaaaaaaactcgtattactttatgaatgtgtgtatataatacataaatacatcaaattata

SEQ ID NO: 24787 - DNA, 3392 bp, Cannabis sativa
aaaaaaaaaaaaaaaattctttggtaggaatatgagtttgcatgcttttcaccctaaattaaaaagcattgatattaaagtgactaatactatattgatgtagcattctataattaattggcaattttttatgtaatttattaaattaaaattaatatgtaagactaaatattaaaatgtacaaataataatataatggttggtctacgttatatgtttaaaggttattatatcctggtttgctaagatcttataagacattataatagtagtttgtgcaggattataaaatgtggagttgaaatagactgattgaatggggattgttaaaaaaaataattaatgagaacagttcattaagctagtgatagtgtgtggggctcgtttagaacctgtataggggtcatgttgtattgtattaaattatattagtataaaaatattactgttacgatatcattcataaaattagggttatattaagttttggagagttggttgcattagccaattaatactctctctctctctctctctctctctctctctcaccctaatctcttggctttttccgttcaaatcatcactggtttcagtcatcttctccggtagatttatcgcaactttgtgtggcatcatgtgcgtgtcttagcttcatcttctccgacggacccatgcatataactgtttttttatttttatttactttttttaaatttggatctaattaatttgttttcacagtggatttccccttctccatagttctctctctcacgctcaaacaaactcaaactcaaatataagttgtcgacattaatttctgacaattattgaaatgaaaaagttagaaataaaacactattcatatatatatataatataaactatatatatagtgggaggatgatgtattcagtattcacatgcactagctaccacaccaaatcattaatatttatagtgatgaacaaattaaataaaaaaaaaacatatataatataacaatatatattaattagtggattggtgcgttaataacatatatatactgtatagagtgatcatatatatgtgtgtgtgtgaatgtggcccatattaattatatattttgtgtgagttggttgatcaggacctaacttaaaactatatatatctgtataattttccatggtaggaaatcaatcaaatgttgatggaatatatactttataactttaatattaatatccaaatagtactaattatatatatatatatattattagtagtagtagtagagtatgtgcctcataatttggaattaatatttggatggaccaataatttgaagcaaaatctaggtgatgtcacctaactttccccttcatcaaatccttttttagtattcatcatcaccaattaatatatataatagtacaaccactcactgaactttataattattattattattattattattggcaaattaattaaggacagctgccttgctagtttggactaatactttggacagctcttctcttaattactaaatatatataatctatttcatatatatatatacagtttttaaggagactacaattataagaaatatatatataatacatatttattttaattaatacacgtgcgatctcatgatcgatatataaacatgcatgcattcgttattaatagctagcagataaataataataataccaaataaaaattaatgaatttatgatatgttatttaagaggtttttttttttcatttattaatgtattaatattattaattctgtcaactaataattattaatgtccaagtatatttttggagatggagacactttagattatattgatcgatcaacaaaatctacaatgtcgaagaaattattataagacaaacagcgacaaatataattaaattgctggataaatatataatttatatatatataaaaatgaaaaatgaaaaaaaataaaagtatagggacacttcaatattacatatatatatatagaaaataagtaagacttagatgtagtaataattaatgtactcatcataatgatcataattattgttattattactttcgtgtatatatatataaatggcgtctgattaaaattaatctggtccattgaaaattattagctggtaaaggaaatgtaaatagaagaaattagtgatctatatatagagagagggaaacttttattagtgcatcatcttcatttcagtatatatatatatatatatatttatatatattaatttgatcaaaaggaaaataatttcatttaaaatatattaatcatgtccaccaattgatccatgtacatatatagtgatcaacgtcataaaaaaattatatatatttatataataaccaatatatatgatcaataattgaagtgtgtaattattattattcaatattggaatcacgtcaaattgtaaaaaccactatatatatttatttatataagtcatgatatcaatcacacacacaaagtaataaattgaatctttgtctaaaaaatacagctataaacaagtcaaaccaaatgactatatatcagtgggaccatattcaaactatattcttttctcttatatatatctgatcactaaaaaataaaaataaaaaataaaaaaaaaaatcaattcttcgatatttttgtgatgatgttgttctagacactattaataaaaaatacacaattacactaaaaggaagaaaaataaacatttttaacaataaacttgtgaaaatatatatctatagttcaaagcaatttctttaattatttgattttttttgaagtaacctcagttattttatttataatattgtataggtttgattataattttaagattttatcaatttaattattttaatagaaaatgatacatatcatattactttccacttcacaaatcactaatatataatgaaatacacatttattaaacaaatcttgcaattatacttaatatgctttttttttttatattgggacctcttttttataaaaagaaatataaaattattagactaagcttatgaccactaaaatatatttttaatcatatatatagtagtttttattctggcacagctgcaatgtgggaaaaatatctgtagggatgctgtgagaaaaaacagttgcagaagaattgtagaaaaaaactaagctgagtgtggtaaattataaatttcaaagtactgtgtgttattaagatctattttaagatctattataataatgataatgttataatctagtttataattaccacaaatatataaaagtttattttatataacatttttattttctatatattttaaattcttttttttaagtttaaatttatatgta

SEQ ID NO: 24788 - DNA, 2368 bp, Cannabis sativa
  modified_base (80)..(81): a, c, t, g, unknown or other
  modified_base (165)..(192): a, c, t, g, unknown or other
atcttgacccgacttaaataaaaaaaaataaaaaaaaaatgaaaatgaactttatagaacacacttttgttttctgtttnnaaaattgaaaaacaaaagtagttagagaacgcattttagcttttgaaaaataattttttaaaaaacaaaaattttacttttatnnnnnnnnnnnnnnnnnnnnnnnnnnnngtgttaccaaacgacacctatatatagtgaaattaaatttgaaggctatatatatcaaaaaaaaaattctccacatatttttgtaaataggctagaaagccctaatccaaagtgggccgtttaagaagcccaattggtttgatgttataagatggagttcacacgtgcaaaagcagccgacaaaagagaagagacacgtgtaaagcattaagaatgaaaaggacaaaactagacacccctttagttactttttttttattaaagagagagtgattacgtatgatgtcatcatccctacctgacacggtcatcatagaagccagcattagtgatgacgtggcagaaaaagagggaccacagtaaggggttataatggagcccagcacagaatagagagcccccataaccatattcccttttccgaccagagactgagtctgttcattaattccaaagaaaattaaaaagaaaagctgaacaactccgccttctttgctccctcaaggaccggcaatcatcctctgctcctcactcaatcatggccctccgatttccccccatctatctcactcaccaactgacacctgtcactctattcattctactccacttcttctcaatactacttattattagtaattaaattaagagtatagcatttttataaatggtgctttatgattagttagccatattgtctaaaagatatttttttaaattatataaaactcgatacataactacatcaataacggtatgatactaaggagggtactaagcagcagtaatacctattagcaattctcttaaaataagtataacttaagaatttacaatttttgtgattaggctagattcagaagtttcagaaccctaactaacaaaaggtatttttacttatagaaattctaaaaccctaagctataatgctagaaattgtaatagtataacatatttatattttgtcaaataaacaatctacgtaagcaaatattttccaaaaatttaaccattagagtagctcttaggatttgagtaattttcaacgtaaatataattctcggttgtagtaaaatatattttgttaagaatttggaatttttgtaagtgtttggtcgttaagtgttaagttaattatcgacatattaccttgtgattggttcaaaactgagagttataagtaggtttttatctgcagccgaaaatttcaaaacctcaaaatatatttttacctaaggaagttctagaaccctaatagaaggtatttttacttacgaaagttttagaatcttaagatataaatgctagaaggtgtttattgtgtctaacaccaatgtgagatgccatattattattggtgtacttatatataaattagtgttatcttatagtggtgtatgatactattagtgactaataacaatattttacactatagggttgtaaataattaacaatatttttagaataattattaaattaattatgtggaaattaactcatttttttattgatattagaggaggaaatattcgaaattaggatattttctttgtgaagagaagtatgaaaccactaaattatgcctatgaccattatagaaactaatatttaattttactatataatatttcaattgtaattttaaatatattatttttacgttcatcttattcttattataatagttattattgaagaagatggtccttcttcttcttcttcttcttctttctttttcatattattattactttgtatgtgatgatgtaatggaataaaatgaaagctcttaattaattgaaaccaaattgaaaatgacataaagaatgtcaagtctctttctctcaaaactcacctattttcgttctaatttcacttacaaaaataattaagaaaattaccacttttggttgggcttagtggtaatttactttataattcacaagatacattcaaattacatacaatttttacatgtaattaatcgtaattatataatttaaaataatattatctcacttaaatacataaataattattatataatatataaattgtatataatataagtgtatgcaatatcgcgaaaaaaataactcacttataaatatttttggggaattactttatatactttttttttttttaaatttacggttttggtttctaaagt

SEQ ID NO: 24789 - DNA, 2401 bp, Cannabis sativa
cattttgtcttctattaggcacaccggtactcaaatgtgtttaagagttttatacatctctcaatttttttagtattactatgcccatatgaatatgataaaccatatgttgatattcatgtgaaagcctaacaaccttggttagaataaatactaacaaaaaaaaaacaaaaaagctcttttcatatacacaagaaaaccctgcaatccacagcacaaatttgtacactctcactcactctctctctctctctctctctcaaaccaattctgtccaagcccattcctgttagattacaagaaaccccacataattattttcatcctaatatttatcacaacccaaaaccatcagatcgcctactttctgctgttgattcagaaatatcagtttcagttccatgactctttttcaactttgccacaagaacccacatgttggcaagctcgttttctaggtaagcttctttctgcttcgattcctcaaccattttttgaagctcagcctctctttgttccttctccacaaaagcagcttcgtatgaaagctctctttcacgacttatggccagttctctcttgaattcagcaacagacccaccttgatcattccgcttgttcatactctctcttcgcccattcttgaccatactgccacttttgcgctgagtgggggagttcttggatgcggctagatcagctgctagtctctcattatggttcatcagtttggcaacttcttcagataatgccttcagttcaacagcagcagctgaagctaaacctttggcatatgaactctcctctgccaatttctggtttcgaacttctagatgttcctttgccaatgttacttcagacaacttttgtttcatttcttcaatctcagcctcctgatttcgacaagtcaaaagcaacaatttattcactttgacaattgacagagccataactggatagtaattatacttcagaaactaattaatgatactgcattaaaaggaaaacaagactaataatagtccaagtcttggaattaatatttttattcaccgaaagaatagtcttaaattcaccaacaaggtttgcttcaattgctaatggtctaaacatataataatttcatatagcagtgtcatttgggaattttaatctgtttcaaagtagtaacccatttttgtgcctcatatttccaagagggaggaagagaagagagtgtgagaaaaggatttataatcatagttcatttgaatttcacatctactcaagcccaaaagggatggaggaaaaacctgggcttgtagaagtaacccatcaattttttcttttgatgtcgtgttcttgttgtctgtgctatgttctccattgctgctctttgtttcagttgctcgattttctagtgcctcagagagctgctggtttagattagaaacctcttgttttagagaggctactgcttcgtgcaattcttcacattcagaaacctgaaaggaagagatatatcaaggatcaagactcaaaaaaaaaactaaatgaatttaacaagaatttgagtgagtggttaccttttggttcagctgatcctgaattacgcgattatcagcagttttaacctgtaacaagggaataacaatgctagacttatcaggaataactacattatcatatcaaaaccttcagaaatgaccaacaagaaatttatgacttctttagtcctattctgcagctaagaatccggaaaattgtaaacttaagtggaaacgatgacaagaacagatgcatgattttttaaattgcactaatttaatacaccaattatcatccacaattgatgttctattaccagacttattttaaacaacaacaaaaagaaattattgtgcttcttcaagagataattaattttctcaaacgaaaaagagagagggagagagacagagagaatcaattaagcttggaggtgtggaataatcaacttatgatatacatatatctgcatgcatgcatgtctacgcagattaaagtgtgtacacataatcacctcgagttcaaaagatttctcattcaactgtgccttcagttctgcaataatagtagactgcaatatgaagaaacaaaaaaatagtcaattaaaacaaataatacttcatataaaattacactaccaacctattgggagaacaggtaaacttacagttgatacttcaaaacaatccattttattttgtggagaaaggatggaatccccaatttgcttttctagcaaagctatttgttcgtttttagccatcatttcatctttcagcttcctcatctcgtccttaataacagaaatagcataacagtgaagatctaagaaaaattaagagcatttgaatagagataagacaacaaatacata

SEQ ID NO: 24790 - DNA, 3173 bp, Cannabis sativa
ttccgagaaagaaggctgaagttgcataaaaattaaagcttaaactttgcttgaaaagatcaaaaggagaaagcaccaaggggagtaaggtagacttcaagcaatccttcaattctaggaaagatggttgaagatgtgccatacccttagtgatctttcttactgaaaaaacaccgtgcctgcgagactcacgttgaatttttatgaggcaagcttagacttcgcttgaaaagatcaaaaggagaaagcaccacggggagtaagataaacttcaagcagtcctcccattttgggatgaagggttgaagacgtgtcataccctcagtaatattccttgcacaaaaaatatcgtgcatgcgagagtcatgttgaagatttatgaggtaatgttcggcttttgtgaaggaagtctgaagttgcataaaaatttaagattagactttgcttgaaaagatcaaaaggtgaaagcaccacggggagtaagacagacttcaagcagtccttccaatcccgaaagtagggttgaagatgtggcataccccctgttatctttcttgcacagaaaacatcgtgcatgagagactcacgttgaatttttatgaggcaagcttcgacatccgtgaagaaatgctgaagttgcataaaaattcaagcttagacttggtttgaaaagatcaaagtgtgaaagagtcattgggaggaaagcagacttcaagcattccttccattctaggaaggaggattgaagatgtgttgcacatccaatggtctttcatgcacggagagtaatgcgcctggatctcctgagctccaaaaagctccaagagctgcatgcacgcaccccagcatgttctgggtattctatttcctttagtgaactacaggccatccaatggcttcttaaggaaagactcgaactctcaataggataggcaattgtccagcaggaagttcctagttggtttataatttctcgagttactttctctgatgtaactacttgtttgtagtcacaccaggcaacaaaaaccttctgtgcaaactgtgcaaaaaatggtctgcctcaaccaataataccataactaggcatgacttgaggatcaacgaacactgacggtactgatggtctcctctcagccgccaccattacaagatcagtttctgacccactacacaacccaacgcaaatgtaggggaagtagttttcggacaacagatctggcctttgcatcggtaccggtgctgggtctttagcttgattgagtcgttatacctgatgacccttcttgagttagtcatcgtaagcacatcgggtcttagtttctttgcctggccctaacacctcttgttcctcaccgtgtctatttagttatgttttagtggatggaaaggaacacgagtaggaggatacaagtggccagtcatcttgcaagggagttggctggccagatttgggtttttgggggcgagtgcgagtatgctgagtgtttctaggctgcatgtgttcatcttctgcactttcttcaagcgcctaagggtgtagaccctcggtctgaacaatatctctggccaagaccctcttgacctttggccagaccctatcaagaagtcatgtggccttccttcttctttctttgcacaagctcttccttttactggcttgcactggcgaccaccgtgcatgtttctttcctcagctctaaattaaagcagaaaaatgtttaccaagttttttggcaactaaatatttttagagctaaagaaagtaataatggagtacatagcaaaataacaaataagagattttacatggttcaggcgttaactatccttagtccatgagtccattttattaggctctttgatcggtaactgtttaaaaaaataaagatataatggactagaactcctttccccggtgttcctcttggagaagaggaagcttaataggcatattctggagttgatagtagggttacaaaaatgtgtttgcttgggatgattaagaatgggccttttttcaaaggagaacttcctcctcttgcgctttttctggggtatttataagccaacttctttgtatgtgctaccttggatggatcattgttggggcgaaatccgatcattggattagtaggtggtatatttcccatatggcacttaagggcatcaagtcgtacgagttaggcctcggacgcgtgtcacctcagggcttctcctatttgaatttccctttatccctagctgttgaatcattttctcaaatacacaaggacatgcatgctctgtgcgatagggtatcgtgggagacaacctctgacattgtacccgaaaaagcctagtcactaggtccataggctgacacatttaggtgaggcttctacaggctaaaggcgtaccctggtttagtgtgtctcgaagtgtattggcccttttgggaaaacccattcttgctgtgggagtcgatggctttagttcttggaatagggcttggctcacagataccctccatgtagctggcagtcggggaactcccctttacatataattttctcacgaagttagagcctttgtcttcccggaacatcagtcaggaaagttgggcagctaatgactccctggctttccttgattaaagtccacgtgtcatgcttacgaaaatgtgtataacaactttgaatgcgaacttgaacaaaatgttgacaaaaccttcgttgtcgatcaagaccctagagacttacttttttgcaatctatgcgtcatttcataaagggtcattttgaggaaaacttacattcttagcatcctcctcaatgaaggtaatcaggagattcatcatcctcgggcgctctgtgggagactgtaccagtgcacacatttctccctcctcaacctcttttagatatctcttctatgtgttacgagtacatccgatgaggtggggtccacccaaattgttaaaacattcctatccacaggtggcgaagcaattccaggaggatatggagttcttggtcttagagcaagcaaagccaccctagccggagctggcagagaaagaagagcaagtaaagatgttctgagagtagggatgcacacggagcggggaattagcggggagtgctctccccgtccccatccccgttaagaattttaatccccatccccgctta

SEQ ID NO: 24791 - DNA, 4482 bp, Cannabis sativa
  modified_base (382)..(383): a, c, t, g, unknown or other
tttttctttattttgcattgtattatttgaacacaattatatatagtgggtcaaattaatatagcacaatattttttttttttaccataagtttaaatcttagagatggtcttatagttattatgtgcgttaagtttgaaagaagtttggcatgaaaattatttttttttaaaaaattaaattatatagatagatatatacaaatatatatttataaaatattaattgacatgaaaattagtgcagcacgtgatcctagaagcgccggccagcaagccaaatcccatgatccaagaaactaattgtactcttccacaaatcatcttcgttttggctaaacctcaatcaagaccaaatataaatcttattattattattattnntattattattattaatttatattatgtattgatatatatggagtactttgttcgattgatcataaaaaagaaaaaaaaacttgtataccaaataaaattacatacatcgcttttacataatcattaatcatatacacacattgaactaatattggatttggtccatcgatctgttagactaatattattacgatatatatatatatatatatatacgttgttgagagttcaacttgatgcaaatgggccaagtgtgatgatcatgactgttgggatatcacagtttggagaaactaataataataaaagtaagataaaaaaaaaagtcgtcgagagaagagatctcgtaaacatatttgtctaaatacagcagactgggttgtgaattcgatcgatatcgctagattattcttgataagcatatatagtttgaccgttgttttgtttggaaaaggaaaaagaaaaagaaaaagaaaaagagaagaagatacctacgtaaacactattacatataatattattacgtactattattaattaattattataattaaatagtttattattaattctctgatcaattatttaaaaaagaaacgtagttaattcacccatatatcttcaacgtttttgccccactacctctcccaaattaatttctcaggcatattcatttgcatgtgatttattaattacgagctataactaaacatatacacattgaaaaagtataacaatatctactatagaaaaataaaatgaaaagattaaaagaatacatattcttacacaaaaataatagaagagatacttcaattaatttgataattaatatacgactacatgacttgatcatttcaataagcttacaaggagagagaaacttcaatttgatcaccggaccttgtacgtacgtataacacatgcattacaactaattaattaaagaaaatataattgtatttttctacttccgtatctattagctcgtatatattgaaaatataccattaaaattgaaaaacttattaagaagaccatattaaatagatggtgtaaattttgttggtcaaaatatgaatcaatttcatatttggtctaaatattttataattgtgtttcaatgcaatagggaaagtaaattttattttaataaaaatgtgtaaaaaaatcaacaaaaatattaaatttttatgaaaatatatagaaattatattaaatatataaataaaaatataaaatgttatgaattatattaatgagtgataaaaaaaagtaaataaaaaagtggtatttatattatagtgtaaaatttgatcattgttatattttaagtcaaatttatcataatttttagtacatgtcaaatttagatcacattatacactattattgaagtttaattttatgaatataagctaaaaagttatatttacaccatatttacaacattcatgctctaataacaagcaagtattgcacaactaaatttaacttttatgataatgatcgagataaatatatattatattatatatgtataactagctaacaaataacaattatttgtgatgaaaaaaataatcaataaaaaataaaagagatgcaaaaaaaattagagtttcattcaattgcaaagtcaaaagtaaaaaaatacaactaataagaaaatcttatatatgtaacgaacataaaagactaaaataaccctaaataactatttaacaccctctttcaaactcacgatcatgctgcaagaaacatcgagagtttgcctaaaagaaaacaaaaaagaaaaatcgtatgcgacttagtaaaaaagtcagcaagctgaacgaaaaaggaataaaaggcaaagtacgagtaaaatgaaaatcaatctcaatatgcatggtgcattcatgaaaaattgagttgtaagcaatctcaatgacactttgattttctcagcaaatacgagtatataggacaaaagtgaataatacccatacctgcaagtaaccatctcaaccaaacaatctctttagtagtagacaccatgacacgatactcagcttccgtagaagattgagaaacaacagactgtgtcttgctctttcaagaaataaggaaatctcctaaaaggatacataaactagtgacagacttttggtctatgggatcacgaccatgatctacatcacagtaagctcgcaactccaaagagaaggtggaaggcagtaataggctctgaaagatggtaccacaaagatatatagcgaagaatgaaaagaataaaaacttagtgaatagtagtaggagaagcaagactaaaaatataaacatcatatgcaatgtctggacaagtaatagtgagataaaccagactgtcaacaatggtgcgatacaaagtaggatcttctcaaggagagccaatcaaaaggaatgctgatcacattcaacttagagggagtgtcaacaactctagtatcactaagacgagcacactcaataatatcagtagtgtactttgattgagaaagaagataactttttagagaaaagataacttcaatacccaaaaaatagcgtagagaacccaaatccttcatctcaaattgagatgctaattctgactttagcatttcaattccctgtaaattatcccctgtaacaatcatatcatcgacatccaagaaaaacataatacgacctacaaatatgcacttgacaaataaagttgaatcatgatcacttgaaacaaaactaaaagataaaataacagtagagagcttttgaaaccatgctaggggagcttgtttaagaccatacacgactttttttagcttgtaaattttgccttgcttttgaggagcaccaagaggaggaaccgtgtagacttcctcatgtaagtcaccattgagagaggcattcttaacatacattttagatatagtctattggcgaactgatggcattgctataagagtacgaacataagttatttttgtaataggagcaaaagtctcctcaaagttcataccatactgttgtgaaaaatccttagccactaatcgagccttgtatcgctcaatagatcgatcagacttgatcttaattttatacatccaatgagaactaatagcatgtttaccaggagaaaaaagtactaaaccccaagtatgattcttttgcatagcaaatagctcctcattcatagcacgctgccaaagggggtcaatagtcgcctctttatagggcaaaaactcagaaagacaatgaatagatgctaaaaacaaagttaaatgaagaaggataagaagagtatgtaaaattttcttggcgagtagacttacgaatgcgctgaggatagcgaggaggagggtccacaatctcaggaggatctggaactactgcaggaggaagggaatgagcaattccaggttgcaaagtaccagtatctaatggaggaacgatttcaggttacaaagtactagtatctaattcttgagacctatcaacacgatgcatgcaagagtaatgaagaggaaaaggaactgcagaagtagtggatgattcagagtctgactcagagaatggatcaatatgaataagatctgattttgtcaaattataaggagtgtcaggaataataatgtcaaactgtatgaatgttgtacgaacaccgattgtacgaacgtctacaaaaacttttggggcttaccccgaaaactagaaccgtgaaagctatgattacacttaagaaatccacctcataaattttgctctgataccatgataattatttgtgaagagaataataaacaataaagaataaaaaaaaatatagagaaattagaatttaattcaattacaaaatcaaaactaaaagaatacaactaataaaaaaatcttatataagcaactaacataaacgactaaaataaccttaaataactattttacacgagctactacttggtatatatatttaatattaaaacacaatgttaaattatatatcatgtataagagaaatgttaaagggcaccagtagtgcctaacatcctcctatgtgccaatatcgctattggtctaactaagtatcgggtcccatata

SEQ ID NO: 24792 - DNA, 3521 bp, Cannabis sativa
gctaacaaagagtgttagcatacagaagtttaggcacaacctaaatctactcaacattaagtaatgctaatctggtttttgacaaattttattcctctattttcgaaagtttttttgattcaagagattgaaccaaggaggatttgttgtggttcgagctacttgatcgctactatttgatgatgtgacaaagcttcattggttatgtatcattctactctaatccgagaatggacaattaaatttttagttagttgttagtgaagtttttgtttttaattttttatttgttagttagttttgtacaaaggtataaatacctcatttcacttccattctttttagattgtaattctcaatttcggtgggttgtaaattgagcttgagtgtgttcgatcacaagacacactgtgtgaggtttctttgtaatttgagagagttgttcaatttatgttgttctcggatttattatcatcaataaagtttcaaccattaaagattttgtttcatcttgtgattcaattttgttccaacatatctatttttttgctttcgttttaattcaagttcagtttctattaatttgttgatacattgttactttgatttttgtttttgagtgtacattcttgcacaacacaatgctcactaataaaagcacatatcttaatcaattctctttattattcttactctattatatttcactaaattaagcatcacataaaatgaaaccaaacaatgtaataatgattacattacatttcactgcaaaattgattaaagaaaacaaacatgtgcttaatcattcacattaggtgaggtaaaatagctaagatgacaaaacttgttagatgagatatttactgaagcactattcattagctacatttagttacaactattcatgctctaaactattattctataaatctttctctctctctttctaatattttagagaaaaaaaaaagttaatatgatataaatatgtgatatagtataaaaataaaaagttataaagtattttaaagggtacgctaatagaataaaacaactgatgggagtgctctaagtttgaggaacttgaaaactgaaaagtttggttcaagtgaaaaatataacgagtagtgttatcattaacatcctattacaacttcttaatcaatctctgtgctcgaaaacacataccaaaatatgttttttcaattttttttcatggcaatgttctttatagttacaacattattcttgtaaatttttgaatatttttgaatagtttgtattgttgaaaatagatttaaaattttaagaactcactttttgatactataaactatttgaaatatttcaaaaattttacgaaaataatatagtaactataacaaatgcaactataaaataaatattttttaaaaaatatattccaacatataatttcagcgtaaaaattaactaaagagtagtaattaacactcgtgggaatctataacaaacatttcattgtcaaaattgagcaaaacattaaacacagcatcaatatttttttaatgttgttctttccctttatctcaatgaaaaagacaactcttgtcactagccttttctttttaccaaatcagaccaaaaatcaattataactaccaaccacaagaaaagcaaaaaaaataaataaataaaaaagaaacaatatacaacttcttttttttattaatatattttgttccacctgaacacacactccccaaattatccaccaaacaatgagccaaatacaattcttccaaaaaaatcctagctgtataaatatgaacgacatttgaataaacaaaaggacaaaccaaacccaaaatgactattttaccctccttttttttccaactaaagagaagaaagatttggataacgttggcatcgacgactgagaaagaccatgcaatcatctttgggacatatcgtagggacataaacgatctcatcacaaccgtccgttctatgcctcttgaaatccaaaagtgtagaaaacatagcgatgaacaataccaaatggtttaaggcatatctttggcccacacattggtgggccccagctccgaaagccaaataatttcgtttataaattcgatcctcttgcctctcctccgagaatcggtccgggtcaaaccgatttgcgtcagtaaacccttgtaaacacgactcgtaagtagaagggaacacaatggtgccttttggaattgtgtaagattcggtcaatggaaagtcaactgcggcaatgtgtggtaccagagtcgcgggagctctataccgaaccacctcacgcgcaactgtgtgcgtgtacttcattcgcgacaacatttcccctgtaatgagcgagtctgattctggattccatatcgccaagacctcatccctaactctttggagaacattagggtgagattcaagcaatgtcactgcccaaagaactgacgaggtcgaagcatcttgagaggcgaagaggaaatcaaagaggtaagagcctatatcgacatcactaacgttttcagttgccatatcttcctcctttaatgtctcttgcatccaaaaatcgacaaggcaagttggttcctctccttgcatcattctctcacgactttgtttcgtgcaattactaagagtatgtacaaggcgactcacggcgagcctcgcattacgaaatgcagtaccgggaaaatcaatagggagtttcatgagtccaatgttgaaaaaattatagtcaactttgaaaacctcgcgagcctcaaggcccaaatacggcccaacaaagacagtttgagaggtttcgaggttcatgtcacgagccaataagcgaagaggaatcgatgctggagccgagttggaagaaagtctctcccatttcttgaggtggtcgaggattataatttgttgcaatgtagtgtaggtggagagagctctagggctgaaattgggagccattcgacgacgaacatccttgtgctcctgaccagtcatgtagatgagattgtgttccccgaagagttttttcccaaaagggtgtccgattagggcaaaagcatcaggcctaacattggcaaataccttgtgagagagttcagtgtctctgatgaagacaatgaatttaccaatgatgtagttggcacaaaagccaagaccagaggatttggccacttcagattggttgtcccaaaagtgggtagggtcacgaaccaacgcaatagcgtttccaatgaatggaagaacgacaagtggacctggaatcgaactcttctttacaaggtacaagatttgctccactaataaaatcaaaactactagagtgatcaagtaaggaatgagtgacataaataaggaatccatttattttaaacaaaataaatttttcgtctagcttaaggacatgctaattcgacacatggcaactggtatgaaaaaaaagatccccaagcaaaatttagtcaaagaaacttatcaaacacccaaaatcacttgatgaaacattc

SEQ ID NO: 24793 - DNA, 5045 bp, Cannabis sativa
aataaaattactttcaactcaaagcgacattcccctcaaagataataccatatgaggagaaaaatatgaagagcaagctaactaattgtcaaggacgcctatactaacaaccgttaggttttagttagtagttgttgtgtttgttacagtgtctattcaagctacttcttgtagttggcttggttaattcttgtaactaatatctctatataaatactactctgtaatcttttccaccttaatcaatacaacaactactttatcttctttctcactctctctgttttctctctctaagactgaacttaagatggtatcagggctccattgatcattcaacaatggaagcatcttcagcacaaaccaaaagagcatcaagattgaacaatgctcaggttcaaaacaatcaacaggtacctttacctatatcctatcctatctcctttaatcattctttgtccattaaactcgatgaacataacttccttccatggaagcatcaagtccttgcttcaatcaagggcaattgtctcttaaagtttttagattctgctaatgttctggcaaagttcttgagtgctgaagatgaaagaaccaacaacatcaatcctgactttgaagattgggaacaacaagataatctcctggtttcttggctcttgtcttccatgttggagaagacaaccaatcaaatgatcggttgtgagattacaactcaaattaggtcctccctgaatgaactgccttcgatgctgccaacgttggtctctacaaaactcaacttcaaaacaccaagatgactggttgactgaacgactatctccttaaaatcaaagggatagttgactaacttgccatgatcagtcactcttaatctgctcaagatcatattgaagccattttcaatggtcttccttctgagtatgatgtcagctttgttacatctgtgacaacaagaaaatatgcctatactgtggctgagattgaagctcttctaatgggtcaatctgtgtgtattgacaagaaagaatcttgatatcaacaaaggtgaggctaacctttcacgcacaaagcagtgggggtacaatcctttcatcagacctagtttctctagttctcaaaacagtcattatatcaacaggagtgctactggtcctactaacatgtatatggtggtcccccacatcagtccctatctcgtggaaatggcgcccctgctcctagcagaggtggtcatgtcagtcgaggaagtggtccccctagctttggccgtggttcaaacaccaattatggacagaaagttcagtgccaactctgtcacaagctttgtcacactatcaaacagtgtttctatcgatttgacaaaactttcacatgccctgaatccttcaacaatttccctactactacaaatgttgctgaaatgcaagccttgtatgccacatctgaatttgtctgtgatgaaaactggtatcctgatactggtgctattttaattaacttaattaagctcaagctcattaatctttaatggacaaatcgaactgaaactttagctaatcttattatgtgatataaaaagcaatatgttcaatgatgagattatacaaaactaaacaacaattaaatagaagtggaataataaaagtaggtcatggattatgttggggaggaggtcacggattttacaaactggtttggagatttattgacaaaaaaccagatagaagtggtggaagaagcagcaatggttgcttggcgtatatggatggcccgtaatgatatcctttggaataataaaagtattaaagcttttgatgtggttaaattggctaggactaatcttgttagttggagaaatgctcaaaatcaaagatcagatctattacttaatgtcaattatagtaatgatacagagcattggagaaagccagttgttcataaatacaagatcaatgttgatggcgctatttttgaagctgaaaatcgttttggtgttggaatggtcattcggaattagaatgctcaactagttgaagctgtatcaattagtaaagttggtgtggtgactccagaaattgctgaagttattggggttaaggaggctctaagctggataaaaaaacatagcctttctgatgttgaaatcgaaactgactccttagtagttgttcaagctattaatggggagattcatatgccatctcaatttggtatgttagtacaagattgtcgcatgatggtatcttttctgaacaatgtgttaatttcttttgttaaatgatctgcaaatagggctgctcattgtgttgcgagacagtcttgtttaatgtcaggttgtatctttagcgaattaaatgctccttttaatttattatctattgtaatggatgaacgttcgtgttaaataaaaattctctatttcaaaaaaaaaaaaaaaaacaacaacaacaacaattaaataattagcataaagtgatgtaacattaacaagatttattattatatacccaagacaaatttagaatcaaaatataagtgtggtgatgataattagtttctagatattaagattttttttttttgaaacataaatatgaagattttttttttgaaagaaagatacatataaagtaagactatcttagaatcaaaatacatacacatttgtaatctttatggattcttagttgtaacaataatataactgcactcagaaaaaatccattaaatattatagatctcaatttttttttttttttggaaatattaatatctatttttttttttcagaattatatatattgaatggaaatttaagttttattaaatctcaagttcagccacagtaaagtagcaaatcagttgaaaaagattttaaatcaaaatgacaattagaatataatttagtagctttagcaaaagtattcactacattagttgatcatttaacaaaagaaataacgacataattatgcactattaaccatacaaattaaactcattaattaggcttaagagtagtttttcacattactataagtacttataaacaaattatataacacctcacacacaagaactaaattaaagatattttaagtagaaactatatataaatcacattaatactctataattaaatgtacacgactgggttttgtggtatgattaattataagatgatggatattgtaataaaataaaaatattaaagttttaaggagaaaatttattatgggatattgtaacctaggagaagatattaaagatatttgtataattaaaataaaatttataagattttccaaatataattaatttgaattagattgggttttcaagttaatttggtattttttaaatttagatatattagcaaaatttaaaaactaactatttattattgggtaacacctttagctagttatttttaattctttcataactaatttatgttttaaattaagtggtaaaatttaagaacttagtattttattgatatattattttctttgtagatagacattataatataatttatttttttggtttttgttttgagacctttcaggttgttaatttttcagtgttacaaagctgaagctctatctcttctggtatgttattttgaggacggtataagtttattatctaaatttttttaggccagttttgtcccatgttgctcacttacttcagccgttcatggtttgacaagatatgcccttcggttagacgatgagttattctaattcgaggaggtttctgatatctgcattgtaatttcataagtgattctaatcattacgttaaaaaaataaaagagctagagagagaaaagagaaaacctaggtttactaatgttagtgattttgttaatttcttaacacaactatcctatctgcaacatacccccaaagccccaatcaataatccttgaaaatttgagatccttataccgcacatgtatcgacaaaatggaacagagatgtcccctcagccatgcatgacttgagcacacacaaggaatggaacgatgcattaacgaagaagacactgaaaaagaaagagaaaccctaagtttatttagatagaaaacctaggtttagtagtatacattattctaatttcctaaaatgaaaaattctaagcaattatttagcatcgttaatttgtattttgatcacaaaaactttcactttaagagtctgaaacacctattcctaattttaagtacgtaatcttattaatgtcttggaagaatcaagagtcgtaacgtaaatattaaaaattaataatgtagacagtaagaggtaacaaagaaatctaattagggttagcgttcttagttattaattcttcagcgccgtaatttgatcacaagatttccatttcgagagatcgtatcaacggtttctaatgtttaattactaattagtaaatctctaaattttacatagttcaaatgattttaaatatcaaatatgtcaatttttttatttagattttatctcacttaaattaacaaagtttactagctagttagtaagcatatgtgggcataaagtactatttgttctatatgcatcattgtttatctattataattatttatttcttctaaattccttcctttttattattataatattggtagagagatatattatgatttttttttcttctatttttttttttacacaaatgagatattgtaataatatacaaatatatggaaatagaggattttttttcacagtcacgaataacatatgaggttaattagtcacttacaactgtactttccttatacaaattaaccatgacaaattattatttaataaaatgattcccaataataaatatttccatttactcattaattatttagtcttagcatgcatattcaaacaaataacttctcttcacaataattaatacttgaccaaatttgactcacataacaattctgaccaatctccggccgaccacttttccggcaccgtagacctaacacattttacaatatataaatatacaaa

SEQ ID NO: 24794 - DNA, 3991 bp, Cannabis sativa
  modified_base (2008)..(2020): a, c, t, g, unknown or other
  modified_base (3926)..(3959): a, c, t, g, unknown or other
gggatgcttcttctttagcatcccgagggattactttctcgagatagtggacgcaagcaacataatcttggctttcctctttggttgggactgagaccttctcccacgaggagtatttcaaaaccttgtagtcacaggtgaactggtccgagccaaggaggttgatagtcctcagattggcctcgttcaaaaggaaatttgctgatcgcaatccgaaaagaagacccaacaagattttgtggcgcttagccatctcgggggtgggaattggtcttttggtaaccgctgtcaacacaataaatgtaatgagtaagcaacctcaaagtcataaatataaaaagaactcaaaaccaagtttttgagatagaaattacttacgtataatgcgaaatgcagttgcattgacaggagaaagacaggtagtccagaagaaatcatccttgaactcggtcttgtttcacctcacaatgatcctatgaccatttgtgtgggtaccaagataataaaaacctcctaaacaccgcttcctcacaggaatagctttgacagaataaaaataaactatctcgaggggagtgggacactcccaaccaaaaatatggtacaagacttttaggccctcaagaatcctgtaagaacttggaatcaattgaaaaggtacaattccaagataattacagaaccctttgtagtactctctcaaggggagaactgctccagccttgatgtgctcgaggctccaagcacctatcccaaacgagccactagttatagggccaccacactcctcacaaattactcgttcttgtggaaagcagctgaattctctaggagcaacagatatgatgcggcatccttacccttgcttaatgccacaagtctttaatacgccaccaacacagtctccaatggcccttatcttggaatcaataagctcgacctcaaaagggacattaggatcatagggggtctttgatttacaagtcttgggggacataattttaaaatctaggtaacctggtgaaaaagcaacaataacttgaggtaaaaacaagggtctcactaaagggatagaagataaagtatgaggttcaagccaagctgcatctcacagataacgacgtttaccataagttatctcttgtgaaaatcgcctatagcaactggaaatttcatcttgattggtttttgttaaatgatccctaattttggaatcattaatctcaagtttggatttaggtttttggattttggatttgaatggaagggctaattctttaggatattctatttctaggaaacctagatttaaaatatcaaaaccaggttgggcacatattgacaaaaaataataataatcctgattcctggaaggagttaattcgacttaaaccaggaacctaggaatttaataaacctaagttcactccttaaagccctagaaattaccaaaaacaaaatcaaaaaatacttaaaccaaacacagtaaaagaagatgcaatcggaagcaaaaataaaagtaccaactcaagaaaaagggaataacatagagtaagaaataaaccacttactatatatttgaagatttttgggcagtgaataactttgcgattgggatcgtgacgaatgtgatgatggcctctaagaatttctaagattaaaaatgaaatatgatgaaatacgcaaaaaataggtcaatgacaatgagggcatgcaaggtgatgaaaaacgaagatgattttttgtagaaaagctggaaggtttgaaaggcagaaatggtaaataagtgttttcacttgagttttatactttaagaataatcaccgttagattgaaagaataaagatctaacggatgtagacagaggagaattggaaaagatgggcatttaatgcgtgcctcaaaatcatgaatcctcaaaactcaaagcatgccatttttcaaactaagattaagacaaaaatacacttataatcatttaaaaagctctttttattaaaaaagaacnnnnnnnnnnnnnattgttatacccaaaatttggcttaacttcaaaaagtgacgtgtcttgcattggaatataaaccacctgatataatgaaattatatcatttaatgcaaagaaaaagaataactcgttaaataaaggattaatagaaaatattcataactcgctgactacatagtcttaagcgagataaggataaaaggctatgtaacaccccgaccctcagggacgccgcgtgtgtgctttttcaaacctatttcttactagtctattagtttaggaaaagtgtggtttaaattaaaaccctttcagattttaaattacaataaaatttccatacaaagtacccttataatatagggatcctcagtttattaaaattcctttataacaaatttacaaaactactattacaaaatcaaggttacattttcaaatatagaaaaaggggtcgatcctacttcctagaagccaagacaccacggctgatatgtacatgagtcatggctgaacacaactcctattctccttacctgctccacgaaacaccagtgagtcacaatgactcagcaagaaaagctactagatagaaatcatggaacgtgctagcagttttcattacaatataatatacattctaataggtcatttcatattcaacaagcatatataacttaacatctatgcgagcacatttattacataattaagaatatttatagctattcataatcaataatctcatctttccaccaaacatacattcgttcaatacatagccacatagtctcagtacttcgtcaagcaccctaatcatacaacattataaacactcaatttcagtgcttcataaagcaccaaaattcacacattaccataatcacataatctcaatgcttcataaagcactcttaccactcgttatctacgagctatgtatgtcactatcgttgcccgataaagcaaacgataagtaagaaacttatccgtggttttaacgagtaattactcataacggtaatgaccgtatgttttattcatttacaataacggtaatgaccgtgtcttttccccaatcataattgagtcacaaacgatcataatcgtttctcatcacaacctcgaccacagtcgagtcacacatttacatatcattaataacaatcttaattgagatactaacgattataatcgtttcttatataaccacttagcggtgcataaaaattttcttacctcagtccaaaaattaagcgtgcatgccaacttaagtggaaacaaagcttgatgatcctgggtcctatgtcacgacaacaacattcaataaataccttaaatcaataattctgggaataacaataattcccatagccagtaaacattaacttcgattagctcccaaaataggttttacaacttctaaacaatctactccagacacgaaaaatcacctcgagccctaaaaccggccctgaagaaaactgacaatttccccctgcagggaaaccggctgaccggttctgctgcaccagaaccaatcggtcgaccgattctggcaaggttgcaatcttgagttttctcctccaaactcgaaccaaaactcaaccacacctacccaaccgctccagatcaaactaatattataaacacaacaccccaagtatcaatgcgcaacaattcattaattaaaccaatatagcatagtcaattagaaatttaagcttagaaatctcaaattcctctaactcaaccctaactgagctgattctaacaaagtcaatcttaagcaaactctaattagagcctagagacttattttaacttcagtttaataccccaatcccgaagtcaccaaaaccctaacttatatctaacttggaacttgatgaatgttggaattattttaccagaatcttagatnnnnnnnnnnnnnnnnnnnnnnnnnnnnnnnnnntgaacttctaaaacgattataagtaaacacat

SEQ ID NO: 24795 - DNA, 1996 bp, Cannabis sativa
ctccgcatgtttaacccactagtaccttctaatgattgcatctaagtcacagcagataaagattggaactttattggtggacatataatatacagggatagaggcaactaccgagttaattaaagttaatcgactcgcataagataaaagtttcatcgtctatccttcaaggcgcttcatcatactagctttcaacatttgatagtcctccttcttcattcttttgaacacaaacgggttctccaaatgcctttcatcacctcaaatttgagaaatttccaaggttgagaagagctcatcctttcgggactttgataggtttttggagaaaatcacactagacttcaccttacaacaaacttaacctggccatgattcatacaaagccaaacaattcagaatatccttgcatcacccgcatttgcccgagcaaaaataattatattgtcaacaaatattagatgggaaacggctagagaagctttggatatcttaatgccatgaatttttccattatgttcatttctaaagataagttttgacaaaacttcctgacaaagtagaaaaataaaaggagagagcaggttgccttgacgaagctctctcctaggaacaaactttttaagaggactcccgttatggagaactgaataggatacacttatcatacaattcataattaatcgacaaacgtgtccatcaaatttgttatgctcaagagcactagaaatgaacccccgctccattttatcataatctatgtgcatatctagcttaatagccattagaccaccttttcctctcttctaacgaattttatagacaagttcttgagtgagaattgaagattccgcgatccaacgaccaagaatgaaatgttgactgaactggggacaccaaatcattcataaaaagatacaatattttagctataatttttggtatcaccttgtagtaagaattacaaagacttataggtctaaattgctcaatcttgtcagaattatccaccttaggtacaagataaataaaagtatgatttagctcaaatccatagttcccttctaaaaaaattctttgatcgctccactgaaattttggcccacaaggtcctaatacctttaaaaaagcaacccgagaatccatcaagacttggagccttaagggtatggagactgaacactgcatctttcacctcctcgttcgaagggataactacaatactctgattagcctctctactcacttgcttaatatgtgggattatgatcctactaatctatttcagcatagaatttaaatttgttataagtgagtaaataaacgtaatttataaatttcgaacatttatatagcatgtgtgaatgtaatatgagttatatgtagaataaaaatattttttaggttcaacgaccctgaagacccaataagtggataaatacgtggatataatatgagttatttgttaaacaaaaatattttcaggttcgacgaccttggaaacccgattggaggccaaaaatatcacaacaattttagttagaaatattgatgggattattgagataagttgattttagaaataccggagtattttagggtactcgaagttggccaaataccctagaaaaagaaatttcttagtggctaaaaaataataagataactattaataataatttttttattaatattattattaatattatatattattattattatattagttttatatatataaaaaaaaaacttatcgtttttgaatatgtatattatataagttacagtaaatataaacataaacgaatgaacaaatcctcgttctctcctcttcgacaaaaccttctcgatctatattcgttttcctcgattttcaatctgaaacatagtgatctaaactctggtagtagcaggatagcaaatccttgaagagggaaagcttaaggtatggtttaatttcgttttaagtttaaaaacgattggttttatatag

SEQ ID NO: 24796 - DNA, 1796 bp, Cannabis sativa
gtcgttcacttcccgtgtaaggaatttcacttagtgcaaattcaatatgtagagcatcctcaaattgtcactttttgaaccagagagtgcgcacgttaccgtacatgatgaagttaaaccatcccacacaacacccttgttcattatttagtaagtaatttcgttgctcttcctgtttgtatacagcttcatgcttagtgtaaaatactagcgttgggcttgtactagtgtgtatcgtatacgagtctctacactctgtgcatgttggtcttgtttgaacgatctgttgcaaagagagaagcatggtggtttgacaagatgatagtgtgtcgaggggtcattcatctggttagagagattggcttgtcccctaatgcaatgtcgaaggtcgaccaccacgtactaaatagatttttttattgactttgttattctgagttggcccacttaattctgcactaactgtctttgcaagtgtttcctggtttaacatgctaggcccaaggaaggaaactagttccccaaaagttgatggtgacggtactcctcatagaaagaggatgagacaggagactgttatttacactggggcttccaatgcatcttcatctactctagattcccgtggggaccaccccagcgacatggtcaaccctgcctgcaccaacaatcttctcctctgaaaattccctttgtgggattcacatttcccatgaaaagtgttcctctcaatctccctgctatgcatagagaaggggagattaaaagacctttcgaggtgcgtcttgaggaagaaaatggatttttgcacaggcgggccagcatacttttggccgtgaggagggttgaagtcttggagggcctccatgcctcaatcctaattgggccaagagttgatgtagaggccctggaaaaacacttggcacccaaggtggggactgaggctgcactctttccagcgaaactcttggatcaagtggttggtaacgtgtccaagttacctttggagacctgggcaatctataccaatgtcgatgccttttccctggctcacgctgccaaacaacaagcaattggggtgaggttttgacctttccattttggtttctaacattgtacctagccttctcatttttccttgttgtaacaggtagctttgttggcagaaaaggacactcaagaggtggacactttggtcgtggaattggaacaagctaagctaacaaccgcaaactgcatgatgccaattggacttttctcgctgaacttgcggaagccaaggctcagattgaaggcctggagagagaaaattagccactaaaagataactatgcctagcaaactcatctcatacaaggtatgagagccatctgtgatcttcatagaaagaccacggagaggatgcaaggggtaaactcttcccaacagtccaacagcacccaatcctgagcagttggccgaggcagtggttcctcccgagactggggcctataatttcctccattgattctttcctctttgattttcttattttacgaaaacaattttactgtgccctaaccgcggggccatttgtaataactctatgcctttatacttttcttttgagctttactcctgatctgctagcgttttagactattttaagggttgtcaccttaggtcgtcttgaagtttgtggttccaacaaccaccacttcagactttttcatccattatttaattcctcaactgatttaggaagggtccaaagactcttgcctccgatttttaggtaggattactactgccataac

SEQ ID NO: 24797 - DNA, 2693 bp, Cannabis sativa
aatacttactttaattttattttcatatatattttttaaagtcatgtatattttttttcaataaaatttcacataattttttgtttttttttttgttgtaatagttgaaataaatttttttttgataagtatattttttaagaatataattgaaaaaaaataaaaactaatataattaaaaatatatattttatacaaaataaaaattattaaaatgaaatgaaactctcccaaaagataattataagtaattttgttaaatgtattttttggttacatctagtaaattattcatccaaactaatttattatttatattaagtgagtgcactattaattttttaaataatgtctaaaaattaaaaaaaatctaacataatatcttaatttatttcaaaaataagaatttttaagtgttcgtaataactaaataatgattcaataaagaccattccaatatgttcataagatcaagctttgaatgttataatataatttaatgatataattagtactaatatgtattttttcttttataaaattaaccatttttaatatgttttgagatgacacccattataagaaaaagacaaaaattattcaaaaataaaaaaaaaataatttacacatcaaaaatattaattagtatgtttgtaaaaattattggacttttcttttattggtcactcttgagttatttactataagattaatacatcattttgtatagtgtttattatttaattaccactttaggattaagtctacatcattattaatatatataagactttatatatgaatttaattatatcttaaaggtaataataaagagcatatacaaataaaactgtgggctgattattcatcaattttttaatctaaaaaaaaactagtacaaatatgttttttttttttttaaaaataatcacattattatattgtagttacatatgatttttggtacattttttaaataatcacattattatttttatatcattttgaaaaatttatttaacacaacagaaaatccaattaataatttttacaaatcacaagatctaaaataatattatttaccttatatatttcacttttgaaacctattaattaattttcaacatcctaaataattttcaattttttttaagtataataaatatcatcagtagtataaattattacactccaacaacttgagttatgacatataattagacaaaattaaaaggttcctaaatacagctgagtccatatagtacctcttattattaacatatatatgatcacatgttttgtgattatttggtgatattatgtaacatatttatatctaggcccctatatatagctatatatatatgatatttatatatgtatgatcatcatcatcatcatcattcatcattaaaatctctattgactattataaattactcatatcgatcatcaaatcatcattttatacgtgtgttttatcttatgtatatatatataaatggcaattattaaaacaaactaaacaattttgtatatatgtataactccactccacatgtttatctatctaaatatgttttaatttaaaaccaacttaatttcctgctattaaattaaatacacaatttttctttgtatctataattgaaaaaaaaatcatatagtaggagcaaggaatcaagattaaagtggctaaaataataacaaaataaaaatatagggtggggaaaaactagtatgtataattatatactaattaataaaaattaaagaaatatattaatgtaattttttaatctttaattaaaattttagggtggccaagaccattcttgaatttctaacttcgtttctcatattaatgatgtaatatatatttttttttttggagaaaattcaaaataaaaattattaattttaatattattattattttaatttttttaatacaattttataaaaggtggaaacaattttctagtaacacaaaaagccacccattgaaatgaattggatgcattaattttcagcttgttcttttagcagagtttatttaactatataaatctcacataactaatataaataaatgaacttaaatcactaattaatatattgctgaatttttttgcataaagttgaccataaaaaaattgactccatttataataaatgtttttattaaatatttaatggaatatataacttggcttagatttggcaattggcattattaggccttaatccaaaacaaatcaacaaacttacatcaactatgataattttaatcaccaaactctctcatatcaagagagagaactagtttagcaaaattttaaataataaaatttattaagagattacaaaataaaaacttaaaaatattcaaattatcacaaactaaataaatattttttttttaaattaagtcatatacagtgaatcacaactctttcttgttcaacaaattggaaacaatttgagaatccgtttcgatttcaatattgacatagtcaagacgagaacataactggagacccaccaaaattgccatagtctcggctacagaagaagaaagaacacccaacactgtagaagtagaagaaataacacaaatgctattgtgatcacgaatgactgctccaaagcccatacgacattcactaatacacatgtatataatataaata

SEQ ID NO: 24798 - DNA, 3133 bp, Cannabis sativa
atggtttgatatttttaaaattaatatttatagttaaatttgtttagcaaccattcatgggtaatatctattaagaagtgttccataatatttatgttgattatatttattgatataatagatgggaaaaattggatattgattttgtggttcaactggtgataatttttatgataatggattgaagagtgaagatgacactgcatttgaagaatctttcactaaaatttactcataacagtcttcaaacaaagtggtatagttggtaagtaaataaggtaccagtgtttatttaatttttttagttattgtgagtggttaaatgaactttgttctatatactatctagatgattcggtagttcttggtagtagaccaaatttgcttctttggaaagttatttttaacagagcaattaaaatgagctaacacttccttcaaaaaaaaaaaaaagagctaacacttattgccttttgggttattgacaactctacaaaactcaggagaagaagtatcttctcgatttgcaacgagttgagggaccacagtttctattgttagatttttgtgctatattcattgtccaactaatgtcttctagtaggaagtagcaatgcccatattgcttatttcttattgttttgatagaatgcttatttctagttagtgaaaactactatcacagaatgaaaaaaaaaaaaaaaaaaaaaacaacacacgcacaagtactcacgaatataattcaaaaaaaagaaaactactatcatttcctgattatatatggtaatatttgtagaattgacttaatcacttggttacacgcattttcgtgcctttatgatgtttgtgaaaatgaattttctttatgataatatgtattttttttcttcagttatgtaatagaatttgatgaaattagtttaagttatcagttatgcatgatatttttttttgcttattaatttttaatttgttcactttacgtaactagtttttgtgttttgctgtgtaatgtgattgctctatttttttgtagtgttttgtcttttatttttaatatggtcgaaactggttttagaggattcgttatgattttgtatgcattcacaagttttattataattttttatacgtacggtgatcaaacttagtttcacaagattcgaaattggttttcccacttatattttattttaatatttatgttgtgcattatgtgttgttttgattatattcgtgagtacgtatttgtatgtgtgctttttttattttttatttttttttttcatttagtcgattaatgaaattggtttcaatgatctttgctatttaccatttatgatttgttatgatttttatatataaggtcgaaactgatttcatagggttcatcagtttgaaaatagtttcagagggttcacatgttttgaagtttttgcaatggagttgctatattttatgatgttattgtatattttttatttaaaagtttgttttattattttgtttctaggtttgaaattacttttcataattatattttacttttagttttttgttgtgtattgtgtgttgttgttagtttttttaattttttttttgtgcgtgttttttttaatttggttggctgatgaagtggtttcagttatttttattgtttatcattttatgtttcgttatgattttgttccgaggttcacaggtttaaaactggtttattgttgtacgtaattaagctttaagtttcttttttttcttttttagtttaagaaactacagtgtgaaatttttaattagtttataagagaaactagcttttaataatttaattttataagttatttattaaaaaatgtgttatttttttaactcgtttttgtgtttatttttttttttttattgcttagttgttctatgtctattcaattgtttacgtaatcagtttctttatttaagattattaattagtttttaatgtaactgattttttatgttagatttttaaatatttgttcaatgtaactttgtatttttatactatattcatttagttgtttaatgtagttaatttctctgtatcaaaatttttattagttagttaatgcaactcatttcaataatttaagtttatttaaatattaagaataattctctttgtttttttttttttttaattaactagtttttctatttcagtatcattttattgttttgagtttcttatatttttgttttaatttttttagataattgtattaagtaactagtttttgtatttaatttttattttagagatttaggtaattaatttatgtgagttagtttttaatttaattattttacataaccagtttctttatatcacttttttgttaatttgtttaatgtaacgtttataggtctttgttaaaaattctttgatggtatgtaattttttaagtaactggaatttgtaattgatatatattttcattactttaggcgtcatatttttattcactttttagttgattgtaatatgagattggttctgtattaaattattactttttattatacgtaactggttttaagatttagtttttaatctggttaatctacataatttgtttctcaatgtcatatttttaactagctgataaatattagtgatttctctttgtcaaattccaaggtccaactccagctacaataccaacttccagcatcgatcggtgaaaactttgatgtctaactacggtgactttttggtagggacgacttttccgaatttatttcggctaatattatattttagtgaataatgaaaatattgtgtagtgggttgatggttgaatcttagagcttcttagaaatttgtaactagttttaattttagtcttgtgtttggttttaattttggtagtgggttggtggtaagtcttatagaatcatgtaaaatttatatatgagttttggtattaactgtaattgatttttttcgtaaaaaaccagtatttaattatataaaattaattagttcatcattaaattattgtctgactaaaattattttagtactaatatttcaatttctgtaaaaaaaaaaaagccttcacttgagattttctttttcttgatttcagcatttttt

SEQ ID NO: 24799 - DNA, 3757 bp, Cannabis sativa
  modified_base (1531)..(1535): a, c, t, g, unknown or other
  modified_base (3692)..(3718): a, c, t, g, unknown or other
tttatcgaataaaattaaataatttattttgagataaatgaatattttatatttattgaatctagacaaaattaattaggtaatattgtatatatggtcaggtttcgatattcattacccgattttattttctaattaattgtcaaaatattttgataattgatatggcccagatactgatagagtatctcacctataaatatagagtctcgttcctcgagctcttcactaattctgtgcaaacaacaaaattctatgtaaagagagattgagagactgaggaagctcgaattccatattgaagctatcgttgcgattgaaactcaaacatcaatggctcgaggtatttcggtcctttcatcgcatacatgattttgatatgtctatagttattctactttacatatagttcatgtatgctttactttatattatattgtaatataacaattggtatcaaaatattttttttttatctctaccttgattatattttaagttttggtatttatatatacaattggttttgctttacttaccccaatctaatttttccttcatatatatatttgatcgtgttttgtttattgatttaattttttatgtatatatacattcataggaaagctacgttgattcaaagtgtaggaatatcgagttctaagtggaacattttatatttctttgagtatcgcctatgaaagggatacgtagaaagggaagttaaaccctagattcgttaaaccattttggataccggagtaagtaggccaagtatcctatatcggctagctttaactcatgcgttatccggagtatatgatgtgtttcatatccccatgctgagaatgcatgtatcagatctgacacctattcttagttgtgacgattttgagctttagacagatttattatatgagggacaacctatctaagttttgggctggaaagacaaagtacttttgaataagacaattccactggttaaagtgctatagagaaacaacaaaatagaataagcgacttggaagttaaaatcataaatgtgggagcaatatcttgagttgttcaggaaactttcgagcacaaaatttctgtaaggagttgatggttgtaatatctcaaaaacctaattgtgaataattaggctttattatatattatgggattaattagagagtaatgactaggattatgatcccactaacctaattcagcataaattatgaattttgtcacaagttgataaataagcgtaatttattaattataaaaatttatttggaatatgtgggtataatgtgatttattggtagaataaaaatatttccaagtttgacaactttggagacccgatcagaggcctaaaatatcacaacgggtttagttaaaaaatttaatgagattattgagataagatgattatagaattaccaagatattttaggctactcagaattgatcaaataccttaggtttagaaatttcttagtgctaaaaaataataaaataatatttattattattattnnnnntattattattattattatgatgatcttctgattatatatatatatcatatatgttaaactaaaaaaaaaaactctccttctccttcttgtgcaagccaaacaccagtaccactatcatttttcctttgaattttttaccccaaattaacccaagtagatggtagatgcttagacaattaaagataaaagattgagctaaggttttagctctctttcttgagttttatgtgatgaactataggttttaagggattgacttttattctattattgcttggagattgttaagtcttgggttttttctctagggtattttaagactagtcttgatgctcattttatagctttgtggtagttttgaggtaggaatgaagtttcagcttttaaagctcaaagcttgagctttaatggtactttttatttcagggcatgattttgagttatgttatgtagggattttgtatggatgttgaagtttggaatcaattagtttgatttggtggggttttgagaagttaaaacttaagtttttttgtctttgcaaataattgtttttttaaggatcaaaattcgcattttggccataacttttcacacgagttttccatttcaattgttctatattttgaagctttcaatgagatctaaaatatggtatgcattttagagctaaattataagttttattttaagttgtttataccacgagatttagtagaaaatactagattgttttatgcaaatattaagcattattttggaatagacacttagcaatttatcattattgtgaaataagatcaagatcaccgagtattttctccacttggattggctgacatgcatgaatctggattaaaagtaagaaaaaaaatcatttgtactacatagcatgttatgttaggaaacaatgattatcgttgtgaatcaattaatatcgagattaaaatacagttattactgctatgtgatagaaaacgttgtgttattagacaatgattaaaatattgccgtatgagataatgataaaagattgtcttattaggcaatgataatttgatataccaaagggttaagtatcaaaagtcatgactataaacggaaaccgttgttaggtttcctgtttttcgattgtcttattagacaatgacagagatatatggataccgagtttgggcatcgtcttgccttattaggaaagctgatatgtggatatcaggttagggcttcgacttaccttattagacaatgagatatatgaatactagattaggtcatcgacttactttattaagaaatgtgatttatgaatactggagaataattttctagttgtcttatttgacaatgatggtaagatttgaatatcaattttaagtatcaggataattttattaaacaacagcaagtacattagtatgccaggtaatgtattagaattactttgctaggagaatagtgagaaagattactatatgaagtaatgattatagttattatcttggattggtaattgtgtataactatatatatttatattgacattcatcatgtttaaatatctatactggcccaaatttcaatatctgagcaatgtatgattatttgattctgatgatgtgagttacttgctgatattgtgtggtgaattatatgattattgttattacttttcttgatgagtccttgtgactcacatgtgctatgtggtgaaaggtaataagtaataacgtttcgaaaaccatgagttagaaatcatctccagcaagtgtacatatcagttaatctgacaagttgtgttgagttgttaggaattatattcaatttttatgaactttgaaatgtatttttatgataatactgtaatggcatgtcttttaatatttcaaataggagatctccaattgtaaaaaagattatgccataattttataattcagattagttagcaaaattttattaaatcacattttatgtaagccaataatttattatcataaactattttataaacgcacacatgtgcttccctaagggttagggtgttacaagaacactacgtatacttgggtactagaattttcttgagggcaatggggagagaaggagagagcagcggggagagggagagagggaaatggagagagagagagagannnnnnnnnnnnnnnnnnnnnnnnnnnagagagagagagagggggggggggagagagagagagaga

SEQ ID NO: 24800 - DNA, 12952 bp, Cannabis sativa
gacacactaaaaaagcatcttgaataggcaaatggaaactagcccaaacaacttccaaaagtactttggtcatacaggaacaccgagagccaccgggcaaaaaccttttacattagcttatggttatgaaacaatgctatccatcgagttgaaaccaccatctcacagaagggtattctacgaccaagaagtaaaccacactctcctaacagaatcccttgacaaaatctaagaaaaaaaagatgaccaagaagtaaaccacactctcctaatagaatttcttgacaaaatcaaagaaaaaagagatcaggccaacttgaaattacaagcttatcaacaaaaagtggccacatactttaacgagcacatcaagaatagaaaattctttgtgggggacatggtacttcgagtatttctaaacaccaaagaccttgcagcaggggtggaccatataaagttacggacatcacaattttgggcgcatacaaacttggtcggtacaatgagaaaatggaactaatcttgttactaaggtattggaatggagaacatctcagaaagtactaccagtaagccaatttgtaaagacactgctcttaagtagtggctcgtagacgatatgccgcacaggaattcattaataatatatcactctgtgatggcttctacatggtatgccgcatagaagtgcttgaatacttaagtttttaaaagcattcttgtggcctttaagcttttattttaatatatgtatgttgcccaataacagcacatttgtaagaccaatgaatgaataaaagtgattctttcatttagattgtgtcaaataacttgctaataattgacttattaaagttaatattatgtctagcatccatgcaaacaagaaactggacagataaaggctaaaggacttggttaattgtaagtgaccaaaagaccataagtctgctcaatcacttgggggcacctacacccccacagcataagacaagcacaatgaaaatacttaagcaaaaatttaaagcaaagtttatgcaaaaaattgaaagttgagtatgtgtaaaagtggctttgttaaacataaaaagaaatcagtacgagattaaaggatgcccgaccaaccatatttcttaacagaaaataaagccaggattaaaagttgtctagctggctatatgtcttaaatttaatggcctttatggtcgtgcaaacaataaaagataaacaaaataagatctttaaagctctggaatgtcaaaaggagtaggtgggttcatattatcaccggtctggtcctgaacagcaagttcagaagatggtttgacaagagggtccactcgatcaatagcttggccaataacatcagcaagctggccggaagatatagtttcctaaatagagttattctccctaagaggtttagatgcctttaattcctcgtgccgagctaccaggaattcgagcaactcgggcctcatgtatctttaatcacccttggggttccgtttctagaacttgtaaaagatcttaatggccaagtttccatattcttccttctctgtagcccaggtttgctttgatttgccagttttgtcttctcaaccttcagttttgtcttctcagctacaaatgcctccttgattccagtaatatccccatcccgagcaattagcagctgaaccaaggactctttctcgtctatcaagtctctcacttgcctctctacttcctctaagtcctctccaactttgtggtagatggcatatcttcaatattctatttcagctccttgacagaattatttgcagcaaacatttatttcttcacctctctgagctgggtctcaaagtcctcaaccttctttttggtagcaacacatgtctccttgagatgggcatacgtgtgcccaaacttcaaggacatctaagaataaaaaattacatgtcagaatgagagttgcacgattagcagagataaaagcctcttgagttatcaaaaaaagaatacagtttactagagcctgatcctttaggaggccaaagactaagatatcaacaaacttaatgtttgtgtcgtgtagctactcatatgcctgaaccaagcacctatctagataattatggataacttctttttctttctttgcccagagttgagtagatgcacgggtggatgtctagcattccttacttgactcttggcaggaagaggatgcccctctaagtttctcatataggttggttagccagaggagagtaagggggaggcagtggaagacatgaccgggtagagtttgacccatctttctaagcaaacttggatagggactcttccccaaagatacccccagtcttcctcatgataaacggttccggtttggaatccatatctacaaagatgcaaaatattgtttagaaactaacttcaaaagatagaagttcaatatatagtaaagaatttttaccctcggtctgcctagaaacatcatcccagggagggttgtactgaacaccatcatcatctgaagaagactcttcactttcctcactggcaatgccttaacccttgccctcaataactactgggcaggtagtcctgacagactctgacttttgaggcctaatgagaatatggcctctcccaaagattcaccccgcttaaccctcttctgagaagctctctctctcactctcttggtttatgatttttttttcgaagaaaggttatcaaaatgggctttggtctcgggttctttcctcttggttcctttcttcctcacaaaaatcttatcaaatgaacctagaggtttgcccgttgaaggatagagaccatacttgatgaagttttctctagtttccaacttgtagatattccatcttgaagctggcaacgagaggatatgattggctctatccctaaaccttagggtaggtattggccggtcaaatgtagggaccctccgaaaggcatgatgcacaccctctgcaccatagaccatgaagtagtcttgggcatagcaaccaatttgaaacatggtggggtcatttgtgccaccaaaccagatgtagccaactggctgaagtagaagtaccctgacaggccctaacccaggttgcatttcaagtcaaaatgccattgaatctcaaagagcgaaggttacggccaacccatctgtgcatataaaacgaagagggtagataggtacttgatccttttcgtagtcaactatactgggaagatcccgtaatagttgactatgtctcaaaagtacaagtgaagcagaccatgccatgccaggtattcttcacctggaaggtcaatgtcaagacccccaaacaacgttttggcctcaaggttcttaaacctcgcaagagtaaatgtatatgggggagacacccaagtagcctttgtctctcctatttggggcaaaggcttcggggttgacagttcttcctcagcatgattaatccatgcacgagatggcaacccatcttcattcagaagctccctagcctcattatattcccctaaagggttgtctgtgagcacttcacagtctttgactggcctctgggcaggtcgtgccctttcctcaagctgagcaggccttttcagcctgctcaacaagcctttcagcgtggttggcctgtgtagcccatccccttaccatcagttcagcaatgtagggatcagtagttgaaggggctacatggtaggtctactttgacctagccaagtttggatcatgtccagtataccgtgcaactataacgacaacctcagcctcagagagtttcttcacaaaggataatttgcgtccttctggtagggtgtccaagacacctagctggacaatatatgtctaagaagttggaagaaatttcttccaatctcgattcagttcacaaatgagtcggtagtaggtttctcctccaatccgtttagagtagtggtggtgttgtattttaggttcaggagtagcactgctgacttccaagttagagtaactacttggagagctggctggataattaacagatagagaaccacttgcccagtgtgcgagctgatccttaaagagaaggctgaggagatttgtgtctattcgatgttcacctacccagtagtcgtgctaaagaaaaagtgaattgaacatctagacaacataaataccataggggcagcatataattagtcggccagggtaaaaacatcttgaataggatggctagggttcctaataaatctaaaaaaacctattcgttagaaagaaaccatgaaaccctggttcttcgtgttcctcaagacccataatcaaaaatatgggaaacaaagccaagattcaacctatttttagctaaaatccctacatttatctatcctattacacatgtgcaaccattgaggatggttttccctaaattcacggaatggaggctttttcacctccaacaatggcgtaaaatcaaaaataaaagaacttttaaagaaaaagaatggtttttaagaaacatactcactggacagagcctaactagggcctagatgttgaagacgatagttggattcttgttgcacggaggatggttgatagaaaaatacgaagaaaaccttaagttttcttgagcttttcttaattttttctttatggagtttttctttttctgaggataaaaaatggaaatgaggagatctaagaaaaacaaagggcttcaaatatgcctcattaatttaatttacctcaaaaaaattaaatagaaaatgcattccctgtaaaatcagtatggaaaagtagaaaaagcaaaaagtgcaattataggggagtgcagccgttagcacgatctcccataaaatgtgatttaaaactgtcataatgagagttgataccaaatggtaagttgaagggacggaaatgtgaccgctcacttctacattgaataattacaagagtaccaactgcatggagctcgcatgcctgccagcatccgcacaagtatcaaaagtccccatccgaatagacgtttgtacgaggacttgggggcaaatgttactccaaagttttcacatatgatgtggcacttatacatgtcataatccagtcaactcttaaacatgacaaaggtcttctagggagaagtgtgtctggcaggtcccatatgggggtggcatccataagttatggattgccttccattaagcatctggctaggccatcgacatgccaaccagagaagagaagggtgataccttgcaagaatgattccacaggtaatcccacaagaaaggcaagtcttgagaggggcctggctaggtagtcaatatgtcagccagaagaaacgatgccaggaatgtcgaacaaggctacacgagtcttggatttcttcttcaacaagcttccaaaattatcccaaactgaatcctacaaactcagatccagttagtctatctgagaatagaggagcttcaacagatcataacgacaccctagaatataggaatattcactcgttaatcactacttttatggagccaattgtaacctcttccccctataaatagtgaagacattcgcaagaaaaagtgatctgaaatcatactcacacatctaagagcactttgctaaaagatattctttgtaaacactttgagagttgtagctagaattcactttgtcttccttagtgatctgcacggttaattaatacaactaaaaggagagtagttcattacccatatacaagggggccaaacctctatgattgttgtgtgttcttatttattctttgttcttaactccttattggtgaataatcaatgattatctgactccaaatcagtttactatttttccaatcaacacaatggagtagcaagaaatatcattaaaaaaaatagaagtgtgtttaaaaagaatatatatatgtaataaaaaaaaaaaagcaaaagtctcacacataacaagagagagggggatctattaaaataaataaatttgttagataaataaaggagaatatttaaaagaaaaacatgtcaggcacacagagaaagagagtgtgagtgagagagacatagggagcattaaaaaatatgtttcaggcgatggcaaagacagtaaacatgaacaaattaacattaaatatgtggcacatagtataaatgtaataaaacaacttatttaagtattaatgatcaaaaactttttaagttttttttttaaaaataaaaatctaattttaattgtgttgacgcagtttttcgtcaactgatctaagaagattgtaaaacataagaggactgcgatgaactaatttggctaaatacaattgcaataaataaaaaaggacaccatggatttatagtagttcacccccatgtcgccatggtaatggggctacatctactttatttttattaattagatccaacacgctagggttattttctaaagagtgtgtgtataatttgtaccaaagaaatgtcttggtgaaatctgtatcaagacttatgagcacaaggctcgtgggagacccaacattgagattgttgttgaagtttgttatttcccttgtcttaaacttgcttatgtagcattccgctttgaaaatgcaaaattggagagtgataaatgatgtcacctctcggctagaaatactctcaatgggagagaagtgttttgggatggcacttcacgatgattatgccacatgggttgtgccatagctctcccaacatcccattataattcacacttaataaaaccaattaattcttgagtaaattatgaacatgagacacacttagattcatcttgaaaaggtctttccaatgaaagtttaaccaagtcatttggataaaaaaatgagagagttatgcttattttaccgaagggaagtatgtactttttagctcaaaatctgacctgttccatgtcatcatgatctgtatcaccttattatggtacaggtcaaccgtgcatgttctcggacaccttggggtgtattttgacttatttttttgatggtgaatcatattttggaggtcttaggaacccaaaacctcattttgacgtctaaaaccctaataagggacttgtgccatcttttggtaccaaaagatgccagtggtcggctagggcatgtgggaacctgttgatggtgtttcttgcttatttcattcatatagatgctagaaaaatactttggacacattagttcttggccaattagtaggagagagcactgccatcttttgggacacaaagatggtagtggtcggccatgggagttacacatccttcggttacttttctcacttgtatttggtactttatgttggaaatacactttggccacattagttcttggccaattggtaggagagagggtggtcaaccatgggggttatacaacctttggtgacttttctcacttgtatttggtaccttgacgttggaggaacacattttgacaaatctcctttggtgttttgagagtatagacatgtgccatttctgtgcccaaagatggaacagatcagccatgcacttgcaatcttgaatttaagttcaagtttagtcattttagacctaaataagtcaagtccttgttggtttccttatcggattgaagtctctaggataaagatgtttcgcgggcccataaaccctaggctgggcacacttgggtgtgtgggcaccggtaccaaatggttggttaatattttcaacaatttcctaaggtttgttagtaatcccctcatgtcggggtgtctcaattttaaatctcgcatctcattctaaataatgaattaaaataggaataaataactatctatgaaaatatctcttattcttagtcaaatatcccacaaatattgggattattgtagaagttggttatttccctagtcttaaacttgcttatgtggcattgcgctttagaaatgcaaaattggagatgagtgacaaaagatgtcacctctcagctagaaattctctcatgggagagaagtgttttggggtgacacttctcgtcatgatgcaacatgggttgtggcatagctctcctaacatcccataatagttcacacttaataaaactaattaattttcaatcatatcttgcaaccaagtcacacactttagaattgagctatgaccatgagacacacttcaatctgtcttgaaaagatatttccaatgcaagttgaattgtcatttggatgaaaaaatgaaagagttatgcttgttttaccgaagggcagtatgtatttttcagctccaaattagacctgtgccatgtcatcatgatctgtatcaccttattatggtacaggtcgaatgtgcatgttcccgaacacctcgaggtgtgttttcacttattttcttatggtgaatcatatttttgaggtcttgggactccaaaatctcatttcgacgtctaaaaccctaataggagacctgcaccatcttttggtaccaaaatatgtcagtggtcgactagggcatttcggaagcccttgatggtgtttcttgcttattttagtcctatgaatgctaagaaaatactttggctacattagttcttgacgaattggtaggaaagagcactgccatcttttgggacataaagatggcagtggtcgaccatgggagttacacacctttggtgacttttgtcacttgtatttggtgccttgatattgaaaatacactttggccacattagttattagccaattggtaggagagagcactgccatcttttgggacacaaagatggcagtggccggccatgggggttacacaccctttggtaacttttctcacttgtattaggtaccttgatgttggaggaacatattttgacaaatctcctttggtgttttaagagtagagacatgtaccatctttttgtgctcaaagatggcataggtcgaccatgcactatgagatggacctcttgtgcaatcttaactttaagttcaagttttaatcattttaggcctaaataagtcaagttcttgttagtttttttgtcggattgaggtctctaggatgaaaacacttgcacaggccaataaaccctatgttggccacactaaggtgtgtgggccccggtaccaaatagttggtcaatgttttcaagtctccttgaggtgtcatgggaccctcaaataagatgtctttacttgtttggcatttgtaagtcttagtcaatgtcgcaaggttgacttgaatgttttgaatgtactcctaggtcgtagatccttgtacaagagtagtcaatttatttttttacaaaaattagatataacaaattggttggacaaaaatgagtacaatttgaaaactgaaggtcactattctagactctagttgctttgaaggcttgttctcgtattatcatgtcattgttactcttgcaataaggttcaacatataaaacttttctgagttagaaaatgaggcttatatttaacaaattacgaacaaagatcgattaaatacaagaattgtgttacattttttttaattagcatgaataattgaccaaaaagaatattgagttctatttaaaacatacaagatattactttaatcatggagtgagcgatatcaacgagcatatctaaaacacaattgaaccccatcggattagtacacacaatgagtttaatctcttcggtttgcacataaatacaagatctataatttttgttcttcacttcctttctttcctctcctatgtgctttctatctcctctcttgtgattgttctgttccttttctcctctgtttaggactacttttttaattttacaaaaaaacaatatcaagagtggagagattaactaaaaaataaatcatggatttaatatttattatgaaaccttaatttgccaatcttttcaattttttaaagcaagttacaacaaaagagtaccaaaagtaaaagctatcaatccttaagcagctcactagctagatccctgtagctaactttcttccttttaggctctgctggcggcattgcagcatttacatccatcagccgcttatcatcttcaatccttaatttactagtaatcggtgctgcatttatgtccatcggtggtttatcatcttcaattcttaaattagtagtagtagttgcacttttcggctttccaagacttggaatcatgtccaacaacatggcatgaacaggatcagtcagaacttccagcttctgctgtggaatgttttcacaactaaacttctcagtcatttcatattcaggaactttgttgaaccactcttcatgtctaaaactttcttcaccttgcttaatctctttcagttcaactgctgattgaggctcttctaccctctcacttttatgaatcagttcatgagtttgctccatttgtttgctctcctctttgactgagtttacctcatgagaaacatcatcatctgattcattgcaagataatttagcaggcctttttccagtgcgtgcacgtgttcttcgaactttattgggtcctgctcttgctttattaatatgtgaacttttcttatcatcttccatcatttgtttgttctcttctttcaatatgttttcttcatgagaaacactatctgattcattaccagatattttagcaggcttatttccaatatgtggtcgtgttcttcgagctttcttaggtactggtttccttttatctatgcttttgccagcaaatcttccacgtttcctactagattcaagtgttgtcaagacttcagtgtttttcggggcatcattgtcgtctctcctatcaatttcatcttctttagaggaacatgacaaagcctgattctccacaggatccaactccaaatccatgtcatattcgcttgtgagagaaccaagaaaaaaaagaaaatcaatattagtcaggaattacaagaaaaaaaaaatgtaagcattcacataacagaaagacattgcagatatttgatattttttctattttacatctagaatcctcctttttccttgacacttcccaccattatgagccccatatagattcaggcaatgacttgaactcttaaaatatagattttttttttctcaccacgaaatttttcttaaacatgttaatgcttgacaacttatgtttaaaaacacctttaagtaaaatacccaaaggcacaccccactaacaggagtcaagtaaaagtaaacagtagtacaaccgctccccattcaatacctgaaagagaacgatgctaattgacgataagttcaaagattaatattgtaaatttgttctaagaaaagttacaaatttattaattcaaaattattaggtattttttaatggctattcacaatttttgcctttggattatgaactatatattattatatctcctaaatttttcagcctaatattataaattagtcattctatcatatcacacgtggcaaataaaacgatgatatggttgtttagccaattgccacatcagtacacatatgtaattaatttaaaaaaatactataaaaatttttaaatttagttttatttaatcttcatgatcattaattgatttttagtttaatgattttttaaaactgcttaattttttttttaatgttaaattatatatgtggctggcaatttgctaagcagccataaacttcaaaggactaatttacaatattctgaataattcagagattatttgtaacggcttaaaaagttcaagagacacaataatacatatatcatagttcggggagtcaaaaatcttaaataaacttttttaaataaaggacttgattgccaaggaacaaaagaaaaagtgaagaataatttgccagtttcactaaattcaaaggagtttgcttggaattttatttcaaactcaccagttttcatcattctgttgctccaacatatgctttaagctatatgtttcttctggcaatctttgttcacttgcagcacagtcatccaaccattgagattcgacaatatgtaaagtccgcttccggagaatacgtttttccattgcattgaaactgtttacaaaggatgaaaaacaacaaagagattgtgatagtggtaaagaatgaataataattaacaccatagaaagcagcctaacatgccttaatatggtttctctacgctagtgcattgtggcacatatttgtgatataaggaacaaaagtttgcaactttctttttgaaatgctagaacacaacattaaccatcagtgattgttgaatactgttcaaatattagctataaattagctagaaacttaggttaattataaatgttttatttcctaatttctctcctatttttctagtttagtttctgttgtataaatgtgttatttacatgaataaaaaacacaattctttcaccattttctacatggtatcaaagccaattaggcttacaaaattcaaaatttgtgtcaagattagggttctttgggtttgttgaaaaaaaaacataaattaggttgtcctttttaagggttcttctgggaaaccctatttctgctagtcctctattccacactgcccatactaggagattccccagctgtcgatcttccaaaccccaaaatccggtagccaccccacacatgggccccacgcacagccacaaatctctatctctcttcccgtgcgtcggtgcatgagagcgcgcggagccatctccggtggtcgtcttacgtcaggtaatttgtctcgggttttctgatcatttggtgctcgtgttttgccaacctcttttgcaaattagtggttctcaaagtttggtctagtgttttgttgtgaatctaccttggttttttggtttggtccaatgtacttatttcaaaagaagtatgtatttaatttgttaacttaaacaggaaaattaggagcaaattcttatagtact

SEQ ID NO: 24801 - DNA, 2669 bp, Cannabis sativa
  modified_base (2150)..(2153): a, c, t, g, unknown or other
  modified_base (2630)..(2630): a, c, t, g, unknown or other
cccgagacccaacttgaggggggtatcaatcgtcatctcagggtgacccccaagaccccttgtccgttgttagtaattatagggtaatgtggatttccctgtatacctttgagaatgtcgtatatctatgggaaatgcatgacttgtaccatgagggtgtagggggtaggggtatacccctcgactggtttgactcccgtaggtgtgtggtgatcgttcattccacttacgaaggtatagtccatcatttttccttcttagagacgcctaccttactcaagctagaggtaagggtgaccgtctaacttccgctctaacggtcatgactacccttcatggttgacggtcatcccaacagtcatgactttacatattcttcattaatttagtcccaatatttttatgccacgagttactactcttgacacatcatcgtcgttaaaatttgggtaaacataactataatagggcctacatagtttatcaagtactcttgacgccacgtaagagtgtgtagccccagagtcaaatagtacagtataataggagttgtttataaaaagctaacttgtaacaattgatggactggcctcgacatctgcatgtgtgatggcaaatacccgagcaggagtggatatgagctccttctttggctattccctcttcaattgagagcattccctcttaacgtgtcccatctgaccacattagaagtaggaattcttgttacattctcccaagtgatgtttcttacaacgaggacattctgggtacataaatccaccctaacgaccttggttcctgcggaacctcttgttttgtctaaaactactcaatgtaaaacgagtcttcctctttgaatcaaaaactgaatcactactaatcctacccaaaccaaaaggagaaggagcaatgactccactagaaccctgagtccctcgatgctcatgcaaaaactgtactgcaccttcagctcgaagagccttctgtaccatcagtgcatatatggtagcatcatcggtcgtaattgtcaaatcatgacagatcttggcattaagcccacctagatacttttccttcttagtgtaatctgtaggtactatacttgaggctaatttggccagttgttcaagcctagttgtatactccgtcactaacattaattattctttaaccaattaaaactccttttgttttgcatgatggacaacttcattataatacttggagttaaaaatatcgtggaattcatcccaagtcataacagtgacatctcgtgtgagcgatactaactcccaccatatcagggcatcttcttagaattgaaatatggcaaaggccactctgtcgctaccagtgactcccataaaattcagtatccaattcatagtggttagccattgctcgagtttcataacatcagggcctcctagaaagactggaggtctctgttttttgaactgctcatacaatggtaccaacatgttaccaactacaggatattccattggcaacattagtattcaagcaataccaatctgaggaagaggagcaacctgaaggccttgctgcctcagcctaacaatctcatcatcttgttattatattctagcctgaaactcaacaagcctttgctcccaatcttgtggagcttgtggtggattaacattacccagaccacgagcttgtcgacagtctctaccttagccttagagatgagggagttcctagtggccttgaccgccactagttccgaccacattaccctaacttcgtacatttcactgggtatccatatgatactagcctacgaacccataagtcaatttaatcaggtagtggttaacataataaacttaagactgcatacatgggatcttagacacgcacataattaataaatatatcactaacatgtttccatcatgcctttctaattataataagctactaaaacatgtaaagtcttactaaattgtgagtcgagattatctttgatgatgattgtacatatctttacggtcttcggtagacaacctggtagctctgataccaaaattgtaacactttactagcttaggtgtgctacagtgcttttcataattactgtgcaacctatactaatcaaagggtttatcaaaagtgataannnntaaactttaataaataaacatatactgtattacatttataaagtatgagattccgaatctacattcttcaactatacataatcaaaagatgtcgcatagtgactacaaaatcgtgagtcctatctgccccaaagatccaacactccaagtcgaactatcttgatatgtaaaatcttcatccagctcaaaactcactgccgttcaacaatagctttgcctttacctgcacataacataacaatcgtgagtcaacaaagtcagtaagaaaaacataaaatataaacatataaccgacctacaactaagtgcccatacacttattaacaagtcataaaccatgtcaaacatgtatacttgagtctcgaacattcttgaccatagtataattgaccataataccacatgcactcagtactctagtcgtactagtgttgtagcgtcaatccatactataagtgttgggaatattttaccagnatctagatttactaataagtatgtgttgggttttatgcc

SEQ ID NO: 24802 - DNA, 3560 bp, Cannabis sativa
tcacctcacgtggtcaaatgccacagcatcttccaaaattcatcgggagagtttggtatagtcatggagtatatggattcaggttccttagagaatgttctcaaatccgaaggagctttctctgaatctaaagttgctgacatagcaaagaaagtcctcaacggtcttcactaccttcactcccacaaaattattcatcgtgatatcaaaccagccaatctcttagtgaattccaaaatggaagttaagatcgccgatttcggggtaagcaaaatcctcggccctactttggatacttgcaattcctacattggaacgtgcgcttacatgagtccggagaggttggattcgctgacttatggccaaaattacaacggttacgctggagatatttggagtttgggtctcaccctaatggagctttatatgggtcattttcctctatttccgccaggtcagacacctgattggcctactttgatgtgcgttgtatgtttcagtgagctgccgagtttcccagaaggcgtttcggatgagtttaggagcttccttcactgttgtttgcagaaggaatcaagtaaaagatggtctgtgtcgaagttgttgtctcacccgtttatctgtaaagattctacaatcgaagaaccgtaaatctaacctgaccccaatggagagaatcatattcgaaaattcatactgtttttttttttaatattgtagttgtaaaaatagttggaggaattcagattaatgagtacattttaattgggatctaacattaacgaaattgatattgtatagaatattttttgttatgattttttatatatataatttcatttttgtataccctcaaacaaaatttcaattatgtaagtagcaactttcataaaatcaattacatcttgtatttttgattatttttaatattactatttaatacttttatgagaaacgtaaaactcctcttaaaaaaattatgtcaattttatatgtattaattttattattattattattttaatctctcgctctttgatacattttgtgttttgattattattattattatgaaatggttggcagaagtattaagttggacaattaagttgcatttcataataataatcaagaaagcaatttaaaagtattaagttgcatttcaatatttgtttcaacccatatatattatatgacattgaacttcaagttctataaacttcaagttcaagttcaacaattatgaacttaattcatttcttagaataagtcatacgcgtataattataaatacataaatttacaaattaattttgtaaatctatgattatatgattttatcacatcgataagaaattatacaataaaaatctaacaatgtctcaagattactaaagaaatataattcaaatatttttttcaaaaataatttaatatatatttattttctagataaataaataaaatcatatacattaaaatgaattatattagcaaaataattatcaataaaaatataactgtatcttataaacaagtataaaagagaaactaaatgaaatactacatatatatttttttaaaattaaaaatatgaaaatatactttcatttttactatgtgcaaatatgtgcattcttttttttttttttttgagccatataaattaataatgaggagaatcaacattttttttaatgggacaagttggttttctttttaattatcaatttactatatgttttattaattcaaatattcaccattattaattctattttttaaactccaacccaatttttttttgaaactctataactgtattaatcaaaaataattataactcaactataccatccaattaattaattacaagttttatataaagcctccacccaaattaattacaactcccatccaaattttactccaacaataagtaccaatcttctatcaaataataaagatttgttagaatgattttactgtgtactcttaatgaatgttatacattataatattaatttttcttatatatgatggtgtgtaaataagaattgctaaaagacactgatgtgtaaaacttttttcactgttatactattattggtgtaattaagtattgagtctcatataacttaagaaaatagcttttagggtgtcatacccagggccgaccctaaaactatatgggcccaagacgaattaaattttggggccctaaaaaatatatcaaaaaaatagtgttatgggatttgaacccatgaccttgaacattataccatccacatcaaccaactaagttatgaatatttgttgattataatagacttaaattttacttaaataaaagcctatatatatattttttttattttggtctcccggaaagtgtgggccctagacacgggcttagccgcctatgcctagggccgacctttttcatacctctcgagacacccttgatctatttgggccgacgtgatcaacttcctatacatgggttgaagtgatcaccttggcataacactcccctcactcatgttagttttctcacctctcctacgtacttgttttcacaaatgtatgctcatgaccgttggagggtgacaaccgcatcaatgaggatctctagctctcattttgccttggtgttggtcttgagtaacatgtttggtcatgtgggtcaaagttgcttgagcatcatgtttgggcacaacttcttttcatcttgaactatgtacctccagtatggagtttaaaacgtaaagtggagactcatgacttccctagctatatgagttttgagctacctatctcatctcattagatattcgagttgagttgtttctcttactcaaatttggcaccagaatagagttagagtctcttactcaaaaactcttttacgttggcctaaggtggggtctttcccgcttttgcctttaccgacgctcaagcactcgtataagttccaacggatataaagcgtcagtaaaggtggcattcacgatacatttaagcgctagtaaaatttttaacaatcaaaatttatattttttcataacttttttttaaaaaaatttcgactacaatcaaaccatctattaataactctaaaacattaaattatatgataaatagaaaatttataactcaataaaatgaacatagataataacagataatcttattattatttttttttgtgaatcaaaaaatttgtattacctcaaaataattaaaagctacaacacctatttaattaagacctgaaatactcccaattacatgcatatacttttattataatcctttataccagtcactattgatttggctcacttttaaaggccaatgactcataattctattttttgcactttctttaatcaactgcacttacttccggtgttaaaaacccttgattccacaaaatatcatttctcacaagccaaatttcataaaccatagatgccaacatatagaatttctttcttttaatgatgtgatctaaactaatactatactatactatattgggtagattttattggcta

SEQ ID NO: 24803 - DNA, 1179 bp, Cannabis sativa
  modified_base (47)..(54): a, c, t, g, unknown or other
  modified_base (1121)..(1145): a, c, t, g, unknown or other
gtgcccgacaacattagaacgtggtgtttggctattagaatcacatnnnnnnnntttagtatagcggggcgatatagttagacattgggaatgtcaagaatagtcataagtttagaattcccaaaataccctttagtgccctttttggcgttttagtgtgggaggggattaaaggtcattttgccccattagccttttgtcattttgtgactttagataagtaatttaatcaattttctaagttatgttatgctgatattatctttgataaaacccttttattcattattttaaaaataagaaaaaaagtttcgaaaggaagctctttctcaactctctctttccctctctcgaaatcccaagaaccagctagggtttgggtgttcttcagcaattcaaggtgatttccagcagctctaactgtaatctaagccaaggtaaagcatcttgtagccccctctttagattcttgtttttgaagaaataaattatgcatgtttttgggattttggttgttgttcttgttgctggtgtttaattgtgttctctgtagttaaaatttgttggaataagttggtttaagcttggtttgtgggctgttattgggtttgagcaagctttgagttttagaactcaagcttggccccttaatggcaagttttgtttcagtgcttgttgttgtgttttgttgctcggagaatgaactttaggacgctaagaacaggtctggaaggtctcatgtggattggcgttttttgggttgagatatagaatttttaggcattcctgcactgaaccgtaattcaagttcagagggccatgtaggaaccagaattccggtttagagaggcctgtaggaaatggaattccggttggtccccaggaaaccccacagaactggaatttcagttggggaaccggtctaccggttggcgcagttttggggaccgtagttttcccatttttaagatatttagggtattgccatgttattcattgatagggaaacttttagtttcaagttaaagtccttggaaagtgatgtagcgtgtcacttaccactgttgtgattgatgtaatttaggggcctgtaattcgccgagtagttgttccactcaggnnnnnnnnnnnnnnnnnnnnnnnnntcaaggtaagattagtataatattttgcatatgt

SEQ ID NO: 24804 - DNA, 2102 bp, Cannabis sativa
attaaagtaccatcactacaacatgtgtaagagtacaagggttatagtcatgaataaataatacacataaaattttccaaaaaaattaacgaagaaacatttatgaagagagatcaatattacaatgatacgtaatacattagatgccataattttgatttcaagaaccaaaaactaaatttggttacaatatacacataccctcaagacattctttaagttttccaaattcttttctagttgttgctcaccgggaatatgctttaatgtaacgattatccatattgaaggcctctgtgcagtcatcctcaacatcctggaatctaaagaacaaaactgaattatcagtcaagtattgaaagacaaaggaaacttactccaaaagaaaagcaaatgcagaatgaatgttaataggttatgcttaaacgtttaaataacctgatcttgagcaaaatgtcaagttaaactaacagtattctaaaaatataaaattcaacaatctaatttatgttgatgaacttcgcaagcttgcttagtgtagcagatccaatggtgatatccagaggtacttaaaaaattaacctgtgaggcctctgggaaccaaacaattaaaccattctcttatattggtcttggtaagaatggatggagtacatacttttacaccaatcaacatacagggtacgctggcccatgtaaattgaaaagaaattaatattttactcaatataaagcaacttgtcaattttgtaagtactgtaatgcctagtaagatttatcatgtcaaagtaatacacgaatgattcaatcaagttttcagaatcaaaacaagggaaaagtgaaactaaacaaaaccttactctgtgatgaccagcctaaaagaatagaatgataatcaagcaattggactcacatgggctggtgaatgcccgaacctgccattcggcccatcccctattttagaatatactgcatactcttaccaatcaatcactttattaaataataacaaaaataaatcagaggactcatatcaaatttgtctaccagctttgtggactaatgagatgagctataaaattatcaaagttcaatacaagaagagcaatcagtatctaggcatcacatttctccccatacacatgacacatagacacatataatagccactcttctttaaaagatgctaaaactttaaaaacagaacaggaataaagcatttttaaaaaagaaaggtcaaatttattggaaatcttcgtaataaaacaaaataaagtaagggtgcaagtagctgcacccctgcaccttcgtaagactaatacatttctatgtatgcaacagactaaattatgaatttcatgacatcaaccagttgtgcaccactattttttataaaaataaaataaaatgtcaaacatatcatgaaattaccgaaacatgtgattgttgtatcttcaccaaaatccaaggagaaaggttgagctatataattgtgctacttctaatatttaataccttcaacttctttatgtttgcaaagtgtgatgtcatgtagctactatgcttagaatcatgtatctaaataaccataagattaagaagaggaaaaaaacaactacaaattttggtaagataacaaatgaaactctgaattatcagtcaagtattgaaaaatttaaaaagattttttgtaataaaagaaaagtaaaactcttaagcaaaatttggttttattaaagtgaggcatagaatatgtcttgacccccaaaaatcctttcttggtgcagccaagatatcatagaaatataaatgattaataattttcaataaaaataatatgactaattgcgttcttcacctactccaggtcagcatccaaagatgattattctagctattaaaactgtcaataaacaggtagacataaacaaatctttacgtatgcaaaacagttttttatttccggttgatcaccaacataataggaatgagggcgtcgccatccaccacaatgtatttgcaagacctgctccaatgtgaactacattcaggcactaataaaagtaaaaataatttatgtttgttataatatttatatatat

SEQ ID NO: 24805 - DNA, 4940 bp, Cannabis sativa
  modified_base (4905)..(4911): a, c, t, g, unknown or other
gctctatctcagattttacaggatgctcaagttatattattgtattcaactattcatatctaattgtttttattcttgtacctggttaagggcatgagaaaggagttcgctcatgcgagggctttggctatttctcaagcacaagttctgcaagctcacgatgagatcaagatgactactccaaggttgcagttacaagtggatgaaaatgataaatccttttatgccttaactaaagaagagttaccttcggctagcgtgcagtactctagtgacaagtttatggccttgcacttgttaccattatgaagtattgggtattttaataattaatgtcaggctcaaaggtagatagatttatgggtgcctaatttttacatttcttgtgcttccatataatcagtgctcatgtcctaatatttttcattaatctacctctagcaaatagcaatagtaaacaataataggctaagtcccttattctaatttactgtgctacatacaaaattttcttcaaattggctaggctaattcctaattggcttcaaaacaaaccaaggttttgtgtaagctaaactaagctctccattagaaactccaatgagctcaccgctaactgaagaggtagcagcagcttcttcagctaacactgaacagaaaagtgaaagcatacttaaagttgatgaatcgtgctcagtttgttaagagactttgagcattaaaaagatagttttccaatgtgagcatattacatgctgtaaatgaatgttctttcgatcctttaatttttctcgtttgcattagcagtgagatatttttatagtaaaagatattaaatgttagacagttgaccaagtgtaaaaatttctgtattcaattgatagaatctactgcccatgctaagctaaatttgatttgattattttttttatatcatttcaatgtttatttgcaccgactgaacagataatactttgagataacaaagttcacgacaagtgggtaaagtgccctgcttgtagagagcataggataggaatttcctatcattccggtacaaacagtagcaaaatagagataatagagatgctatattgatatattgatatagaagataaaagataataaggttgctaggtattcgagagacccagctctctcccaagagctaagagctcacttaactaaaatcattcacaccccaaaactcttctaatactctcctatatatactctctcaatatccctcttacaatgacccatataccctttttatttatcctaaggcctaacagcataccgatatcaggaatattgcttatgttaatgatagtcaaagagattcgagtaattcttctatgattgatacaattgaaggtcttgaaagtagtgcaacatccacactggttcaaggttcatagggaactaaggtataattccatattttgtaagtttttataaaacatatatactagatttaattgccaatattatacaaatgcatttgcatagttctaccttttacttatttaattattcctatgctttaattatggaggcataaactatgttagttttcggattgggtaaatcttacaatgttaataaatcattatattatcaaattgaaattttattcattgttaaggccatttggaataaatgaggtgttcaattcaagagaaaagagtaagaaaataatttagtttcgagtgaaagtatagggttgaaattgacaagtatttcatttgatcattttttttttatgtataaatcaaatattgacacaatatattatatgtaggtcttaggcaacctaatgacattgtgtgttgtttttatattatacagttaatgagagattgaactatgacaatagatctaaaacaatatctttcgaaacacgtaagtaattaatatattcttttaaatttgattaattttaattataatgaaacttattaatgtactcttatatggcagtgtgatggtaagaccgagtgtacgaggatgatattaacattgtacatgaagaatgggtcaactactatacaaagtattttctagtatagttttacttttttgttttttttttactagcaagtataatctttacctaaatttatagttagaacatatagttgtcatacttataaccattaacaaaacctatgtaaattgatatattatgaattttatgaaataatattgtacatatcatgaatactaatgttgggaaaattttttagaaaaagaaaataattttttccttctaaaatcaattacggcagttgttaagaaactgcaatcattaacctatcttatgggttcttaaccacaaagatagtgtagcaatctcgacagttcaaaaggaatcgtcgagattgctacgctatcttgggggttccagcgttgacattgcacatatatttgagcatgtggcacacctatctctgtggttatattttgaatcgccaagatagggtaccctatctcaacaattaccaaccgtagagataggtcatcatctctatgtcgatggtcaaatcctcaacggttgacgactgctgagataggtctatctcataggttcttatccgccgagatagggtaattttcttgtaatgactctcctatctcattcttattcacaatattgaatagaactattagttcaaaatatttaatatatatacaatacataaaaaatatacaatataattacaatatttttatttttacatatacaatacaatatgttattttattttttgcacaataacgtgtcatctagcttgatgacacgtgtattgcattcttcaatctgggtggataattttacacatagcacccacaaggaatgatatgaaggtccaagttgtacatacatagcaggatgttcggacaaagtcatcaagggacatctgaccagttcgattgtgtaatcaactcgcatgcaccagcaggaaatgtgagttggcaatttcagtagtgatcattgatatctcctagcttgcatgacatgaagtaatccctacttttgtaggattgttcataccttcaaagaatacaagcaatcagcctatacttgcagaattccttcattgtaattttggaaacatattaatttcttatttttatttcttattgattaagggaaaccattcctatgtaatgagcccctacaaaatagtcgcttcatctctttattaggggacacgaatttcttcagagagaacactaaagagaaatagcgatataagagagaattactcagggatcttttgtaaaagcttttgagagagaattttttgttctttgtctcataagtcaatataaccaaaagagaagtagactattaccactatcatggggccgaacctagaaactctggtgttttctttacgtacagttctttgcttccattatttattttatcttctcgctttaattaagactcattgtcgttggctagaaaagaggtcaatattttggtactttcatttagagcaatgaaataagtttttgtcttaagtaattttataggatacaagatggatatacatactcgaaggggagataaaactgatccagttaacccaatggtgacagatccaagcttgcagacatctggaaacgcaagagatccactagggataactcttgaacaagttaatacataaccaccaacagtaggccatggagtgacttcccctctggctggggtcactccaggtgtacaagaaactagaaataccagtatggcagccaagcagaccactcctggcactgaagtcccatccatcacaaacactcaaaggctagttggagatgatacataacttcagcacttgcgagctgcgttaaattaatgcaatgccacaataacatctttcaccgtgacaagcgagatatctgagtagctatcaatctttcctttgatgaacaaagatgtcggttgatatagttagtggagcgactaagagatggaattcatgagagcccaacaggcagccattgacaaccattctaggcaggccatcgtactgatcaaaagggcctatcatgttactagttagcaaccaatgactgattccagtatccgcttcagatcttagaatgggttagaagagtatgtcgctgatcatactctacagacttatatcgaccaactgtccaatctaaggccacaggtttaaactgtgggccaaatggtagataggaagatcttactagactaccccttaagagtaaatagtcacctaaacaatcatactcaaacggaggtatcaggccaacctctcaaccaagctggtcagacacaaagaccccttggcacatcggtgttcgactgactaggtaccgtacacgacctcagaaacaaattgaaccacagaagaggactagatgggcaaaatgtactacctactgtccagccaaacaatgcaaacaactatatcccaggtctagtcctaagagatcctaatgtaatacaagtcagtcaacaggctggcctagctcatccacttgtgcaagcataaatagactagcttaaaagccttgtacaaggcctgactggccataaactcacagatcttgaacttgactaggcaagaggttcaccattctcactagaaatcaatgctctcgacctaccgcccaagttcaaaatgatagtatggaagatgtatacaggcaaggaagatattttatctcacttaaaaactttgaaatgaaaatggacttacacggggtgagatataatgtacgatgtagaatcttcccaacaatattagcaaaagccacctagcaatggtatatcaaattagccatagggaaatccagttcatgaatttctttctcatctaaattccatgcataatttgttgggctttgtgccctaannnnnnntctatttcaatgtaatcttctctattcaa

SEQ ID NO: 24806 - DNA, 3040 bp, Cannabis sativa
tacgtggaaaaaccacttccaccactcataatggattttttttttttaactggccgagctatggaattcaggtacatcaattgtgaatttatgagagaggaccttcaaggaaattgttgaataaacctaatccgtgtgaataatggaatcaacgtgacgtgatacaccccacacaaagagaaaagtatgcgcttaaaaatccatttttatgtgaaaaaatttccctgaaaatggctcgtgtatatgatattttcttctttatattaatatgttcagatgaaatttctttagtgcctatagacatgcatagcagattgactaatgatgttgacccgtattgaccgtagttgatgataactcctgattttcatctagaaaataaaaccattgcaaggcctgcagcatgatttcattcgggacgttaaatatgagtcctctaactctacttcttttctttcttttcagatttattcatcttcctattcccaaccatgcccaactcatagattgtacatcaagcgctgaatattgctggaattgcagttccaacggtggaaactactccgctaatagcttgtaccaaagaaacctcaacaatctcttgctctcttttccttctgtagcactagcaccaaacaccatcagattttacaacctgtcatcgccacaagtattcaacaaagtaaacgtaattgctctatgcagaggagacgttgattcgaccaattgcctatcttgcttaaacaccactagtcgtatgattttggatcagtgtccaaatcagatggaagcaatcttatggggcgagagatgtatggtacgttactcgaacaggtctatatatcaagtgttagaggaagaccccagtcgaatgttgccaagcccgaatcctgtacctgaccctgaagcgtttaaaaacgtattaaagcctctgcttgacaagttaattaacgtaactagttctaatgaaagactgtacggaacaggaaacgctaaagtccctaacgctaagccaatatatgcccttgcccaatgcacaccagacttgaccgagaaggagtgtaaagcttgcttgcaagactcaagttccaggcttccaggttgttgcgctggagtagatggagcaagaatacttaaacccagctgtcatctcaggttcgagaacggtcccttttacagcactacggcacctcaacaaaatggtgtgtgtacagacaacgctgaatattgctggaagtgtttagccagtgaaaacgacactagtatcaacatgttcatgacaaatgtcaaagaactcctgtcttctttctcttctgataaaactcgaagtgcttacgggtttttcaattcttccataggagaaaactcaaataaagcctacgctattgcactttgtagaggagacctttccccagaaagttgccggagctgtgtgagtagctctagtaaaaatatcttggacaactgtccaaataggtgggaggctatcctatgggacgagctttgtatggtaaggtactccaacaactcaatattctctgcgagaaatgatgagcctaggatgtatatcccgaatccaaacaacgtttgggaatccaatctgtttaggcttacccttaaaccgttgttggataagataactagcaaagcttctatgggtgattctttaaagaagtacgattctggacaagccactgttccaggatacgaaaccatatatgcagccgcgcagtgtactcctgatttggacaaagatgagtgttacggctgcttagacgatgctgccaatttcattcctcaacagtttgatgggaagcaaggtggcagaattcttaaaccaagttgtaacttaaggttcgaagtgaagccattctttagtgctacggctgatccagtactgtctcctaatttatctgaaggtaaagtgtttctaaataattttgtcatcaaattaaagtttatgctatatgattagtaaaatttagaaagaagagtaatggattcttttttttttcttcaggaaaaaatactacagcacgaattgttgctatagctgttgttattccgtctgttgcagttgtgataattatcattatgatatgcacttttctgaagttaaagaagaagccgagtgaaaatcttaaaagtaagtttaatttacatggttttaatatatataattaacatttgctttgctgcttgatgcatatgctttatatagggtgatgcttaacttagttatttataaaaccagtatatattactataatttttaattatagtaaaatttggtgataaaatatttacagtggcattttagttatgactcggtaaactttgacaaaatggatacaagagtacttatttcatactttaatgtataaatatgtgtgggtgtgggagtgaaaatggtttttttcttcataattgagttgttgttatccctactttttgtgtctggagaacatttgtactcaaatagaaatacagtgtaatatagctaaaccataaggaatatatactctggcttgttttattttggactcacttcaagtgtcactctgtgccattgaatattaaattttattttatacttattgaagttgaagctgaagctgaagttgaagaggacatcagctgggatgattctttgcaattcaacttagacaccatgatgaaagcaacctgtgacttttccgatgaaaacaaacttggagaaggtggatttggatccgtttacaaggtaaaaccacaacaaagaaaatggtttgtgttcatgacaaaagttaattatatatcaaaaatccatttgatcatcaatatcttgattgagatgtgactcattctccttgcatattaatcgatgtgtacctcgtctccaggggaggctatctaatggacagtatatagcagtgaaacggctctccaagacttctggacagggtcagtggttagtgggatttgaacctttcacctctaacctatttaccaactaccttaaccattacaccaaagttactattatgtctataaatatcat

SEQ ID NO: 24807 - DNA, 2217 bp, Cannabis sativa
  modified_base (89)..(98): a, c, t, g, unknown or other
tgataggggtaaaattggtacaatgttttaaaaaagaggtaaaaatgatagactttgaaaaagaggataaaaataaaagaggacaatannnnnnnnnnatagagtgtaatttcctctaaatctaaatttaacttaccatattaactagcattgggctgaaatcatgtatttgggccgaactaatgtggttgggctggcccatttttcaatttttctctaattttcctcggcatcttacattcgacgtctaattttctcagttcccaaacatctgagagggcaaaaataaaaatgagcaccagtttcgtcccctttggtccattaattcagttgaaaatcccatctcaatttcgcaccaacaacaacgtccgaaagtccttatcggtctcagctcgtctcgacgataattccagaagcaacctagacaattcccaagtcaatctctcagttctccgattcactttcggtaaagtaatctctttatcggttccttctctttactttactctgagattatgatcttgaatttgatgattttggttttcagggatacctgggctcgatgagtcctacttacccagatggatcggatatggattcggttcgcttatacttttaaaccatttcgcaggttccaactcagtgactgatattacaccagcacaactcgtaagcatatgaaaaccttggtttttgtactaagtttttctcaattatggtttagattatagatacgtatgtgtataagcatgtcgtaaaattttgcttgtttcttttttttttttgggcctttagagaaccgaggccttaggactttctttggctgcattttcaattgtactgccatatctcggaaaatttcttaaggtaaattcactttctttttcgtctgttaatgaaaactgcttatgcatataacgcagtaaaaaaattgagcgtgccaaattcatgttcattttcatgaattagtgcaatggatggcaaactagtttggatagtttttttatagtataattaaaaaataattgtatatatgtgtatattttagaatataaagaaaagaaacaataaaaaatccaatacaagctaaaaaaaatatgagtttttttttatgtaaaactaaataaaaaaatgggcattttattgtttaaaaaaataaataaataaaagaaaggggtgttttaaataaaattttgaatcataatgttagaaaattggtacaacttatccttttggtacatcattgtgttggatactaatttgttgggcttgattaaaaattgacgaatttgaactcttcttctcaataatttattttatggtattcttttcttggtaaaatgtattggaaatgttatgattgtttatgaagatgcatctatacatacatatatagggtgcaactccaatggatcaaacaactattcctgacggaagtgaacaaatatttgtgatgtctgaagatgtttcggatactcagaaggaagatttggcttgggcaacatacgttttacttcgcaatacaaacaccatagctgtggtacaaatacccattatacattcatttggaacatagcttttagtgacttaaacaaagagacaaattctaatgagaagataatgagcaataagttaaatctaatcaaaacttaacgaatgttgttaattttgcagttaacatcaattcaaggtgaattgtgtgttcgtggatactggaacacaccaattggtatgtctaaaacaaaaaccaatctattagattggttcactcaacaaattgaaaaaattggcatctcggacttgaaggataccctttactttcctcagatttcaggtaaacattttatgacctttttttttttatttattattattttcattttcttataatgctgagaataataataaaaagaaaatggctgcgtgtacaccatttgcactaaattagatgaataattttgagagtacctagtaagtacatgaaatttgaaaaatctttctgtgtgaagtatcaagaccaatcggggtcttaggcatagtctagtggtttcatatctctcctcataaagaggaggttccaagttcgaatccccactcccccaatataaaaaaagaagtatcaaaaccaagccaatctaatgaccttggattatcaaacatgctatggtggcgtttggtaacattttttaaatcagttttctgtttttaaaagtagaa

SEQ ID NO: 24808 - DNA, 2142 bp, Cannabis sativa
ataaaaatttgatttttttttcttgggcgattgatttgagattgttgtttgttcactcccaaatcccaattgtctaatttttcagaaaccagctttgactctgatacgaagctgttcttctagagtgttctctcatgttcatcgtgaggcagaaagaaaaagagaattttttttattattatttaattatttatttaggtggcgtttggttagagttaataaaatggaatggaatagaaaggaaacaatattcattttattcctttgtttggttgtattttaaagtattggaatgacattccaatagaatgtttttttccactattttggtggaatgactaaatgatcattcaatgtaacaagaaaaaaaaattaatgaatttttttattaattttttatgcattttaaattttattctattccattcctattctcattcttattttcattcctattcctatattttcattcctcccaactaaacgcctccaattcatttttattattttcagttttattatatatataaatgtatttttgtttattatttgatatatgatgtggcagatgaattactgatttgttaaatgaagtggtccaataatcttatttcatacaaaacataaggcaatattaatatatatttttatagtaaaatatttaactaagatattaaagtgcaacttaaaggctatccttcttgtggttttgtttggatagcgaatcttttgactgaaattaggaatagggactccaaaaacttaactatttgtttgatcatggtaccgttggttgctgccattttaaaataagaaagacctctagggaggtgtagggattcttgagtttggacaaaagaaaggagaggtaccttttcgtgtaaatttacttatttagtctaagctcttgatcgagcccctcagtgtgttgtctttctggaataagctttggaatagtaaaattttagagtgtcataagattttgtggtagagtatcctctcaaacgcacttctagttcgttccattctgagtgcaagattttgtattgataacctcatgtgccctatttgtggaagcaataatgaaactatggagtatcttttccttcggtgcaatctggcctttcacttatggcagtattccccatgggatattttctctaatttagactctggtattcgcatgtgagactgggtcaaattcatttggagtcaaaaagataagggcattgatgtggataagggctttttatacgcttctattgtggtggacatcatttggcgggcacgaaataataaggtacatactgataatctaggtaacattaaacactatattgactttatttctttttgttacaaaaatgatagagttgttatcattccttctctcactctgagccaaatggatgtttggcgacctcccccgatagactggatcaaactgaattgtgatgttagagtggggatgaaacatatgtgcattggtaccatttcaagaaatcatatggggatggtttgttgagaagttatgtcaagccttgattttactgatgctctctgtggagagacgactgcttgttgtttagctttggagaaggcagcaaagaaggggtgctattttgttattgttaaaagtgactctcgggtggttatcatctctcaatggattagaatctagatgtgaaattgcaaactactcaagtcactgtttaagtacttcttctttatttgcggggtgtattttttctaatgttattcggacttgtaatagtgtagctcataatgtggctaagtggacttttacccaccatcaatatggttggttgaatgtaagcgaaataccttcgaatgtttcttgtaatgacctggaggtgtaatttttttcatttaatattaactctttttcttcaaaaaaaaaaaaaaaaacttaaaggctatgtttggtaggaatgaggaagagttggatggaaggagagtttatagatgatggagaggatagttgctttcctttttgttgtttggtatgataataagagaaacactaaaagatgttgggttttgtgccataaataaaacccatttcaaaataattagatttactaattaataaagatcagaaatcattctatgttgcatggt

SEQ ID NO: 24809 - DNA, 4159 bp, Cannabis sativa
  modified_base (3154)..(3156): a, c, t, g, unknown or other
aaagttcagggggcatgatttgaatgatcaagatatgaaaataatgtattatgggaagcactgtaatttttttctacaccaccttatatatttgttttatataaaaattatttctttcaacaaagcaatttaaaaaactacatataataaattttgaatttcttaataaataattctaaataataattaataaaattgtgcatttaatttttaataaataaattattaataataatataaaataagataatatatttataattttactatatattagaattatatttttaagcaactatttattataatacttaaaatattaaattagtcgcgggaagagcggctatattgcctagttatataatattatcaaataaagaaagaggtgtgtagaaaaatgactcagctgagttttcattctttctcaaacctcccgatttatggggtaatgctataccgcacaaacaaaaatatgggttgggcttcgaccttgtctaacatcacgggataagttgagaaatatcttttttttttatctattaatcaaatatatttgtatattatattttattaaaatctacccacttttatgagtgagttatctaatatatccttaccctccacttagtgtagcacatgatttatattaatttaaggggtataatggggacatcatttataaaagtgggtatatcttaaagagcatagaaatgaaggtaaaaattaaaacaaataaaataaaaagggtatacaatgcaatttccaccaacatcgcatagtggattaggttcagcccgatggtttacatattaacacaaattcattagggattatttcacgggaatttttcgataatatacttaatatacaatctattaacaaaaataatgttaatttacttaatgcaatcctattaacatgacacgtcatcacccctatcgtgaaatcaaaataatcagaacctgcaatctcactcatcaacgcgccaacctattctattaatcacaggattgaatttcctaacagcgcgtgatatataaacaataaagaaacctataaatctataactcaaattctcacaattcaaaccaattctcacaaaaaacaaaccattaacgaacaaaaaaaagcttccttcgacaatcgatcaaacattctaaaacacaatttgtttatcaaactgcaacaacaacctgaaaaattgtttcactacaattataaaaaaatcaaaatcacaactcgaaaccttctctccaaaaatatttccattaaagaacaaaaaaaaaagtttctgttacaaaaatgacacctagtcgatcaacaaaaattcagaatcgacgaagcaatcagtcattctactgtacgacagatcaaccaaacagtcgacacagcaatgcaatcaaaaatctaaagttaagcaaagtttacctttcgcattataattgacaacatgtccgtcttcatcatcgatgctttgcctttctcactcttctgaatactagtcgcaccaccaaaagctaccaaaataggtaattataaaaaaataaaaatacagaactgattattatacaaaaatactttattaagtatgtgagaaaataattttttatacatatacttgtcaacaaaaaaaaattactttcaatattcaaaactgtttagaacaaatattacacatctattatcataattgtatatttaattcaagaaaaaacatgcatttatttataactggtgaaaagttcttccattcacattacatgttatttagcctaacaatttttatgatttgcattgattgttaacagtttgatatagaagatccaagaacagttatgatattttataatggacaatgggtggacaaaacaaactacactgattatgaagtgacacggatattgatactatcaagttgttcttacaacatacttgcacaaacgatatgttctactttgggttttgacagaaataaacaaaacattgatgttcgattccaaataacatcatgaataccacccatgaagattacaaatgacaatggatgcaaattttatgaacaagttagaaaaaaagatgatgatgagaccaaataccctatgatggttaacctttcggcagccattccaatagaaaatattggtagcagctctagtgatatctacaaggacagagtatgcacaacacatggcagacttcgtaatcaatcaagttgaaaatgcaattgaaacaagccatcaagcaacaagtcaggtgatcttaaatcctcatgttgatagcatatttgttggacaacttttaacaaacaaagaaacactacaaaatgctatcagcctatacttaataagaaaaaactagcccttcaaggtaaagagatcctccaaacttgactataagttaatttgcttcgatgaaaattgcaaatggagttttttggcatcaaaacatggaaaaacaaacatgttcaaaatcagaaagattcaacattctcatacatgctcaataactgtcatatctgtagaccatcctaatgcaataagtaacctgattgggagcgtaataagaaccaaatttgtaaatccaaaaagagactacacaccaaataaaatagtggatgacatggcagatgattatagtgtctccatatcttaccaaaaagcatggagagctagagaaaaagctattgtggatgcaagacgctgcccacaagaatcgtactctgcaataacatgaatcttatgcatgatggaacaatgcaacccaggtactacttgactaccctataaacaagttctaaaaacaaaattataaatatctaataaatgaattatatactaaatggtttattgtatcacagggacaatcacagactttgtcatagacgaaaatggccacttcaaatacctatgcttcgcgataggtgcttcaatcaaaggttggcaacactgcaatccaataatagtcacggatggtactttcttaaaaaatcaacatggtagaacattattaatagctagagcacaaaatataaatagacatatattcccactagcatttgtaatagtagactctgaaaatgacacttcatgaaactggttcttcaacaagataaaagaatcatacagtgaaagagaagggcagtgcattatttcannnagacatgaaagtattgcgaaagcagcaaatacaaacttcccaaacctcatgcatgggatttgttgctaccacttgctaaaaaatattaagaccaagttcagaaaaagtggagatgaactcagaaatgcattcaatgatgcttcaaaagcatacaatatttctgaatatgaaaattacatgagtgatttagacaatattaataactgcataagaaactatctggttagtgaagttggaaacagtaaatggacaaagttagacagccaaaacaagcgatacaaaacaatgacatcaaacattgcagaatctgtaaatgcaagactcaaagaagtaagagaattaccaatagcaactttactagaatgtcttcactctttggttcaaaaattgtattgggacaataagaatagagcattatctacattcacatacttggcacaaatcccagagaaaactctacgtcaagaaagagatatgagcttaaagtacaaggtaacaaattattgttctgccttataaatattattccacaattatttaaaataaatctactggtttattactgcaaataaaaaataatacatacacgcattattgaaaataaacttactagtttataactatatagaagatcatacaatgcttctaaaaaatcaacaaaatagtcatcaaataaatatatatatatatatgcagataatcatttaatatagtaacattttatcattttctttataaaccaccttataaacatacatatacatttattaaataaacttattagtctattgatgcatgtccaaaatcatacttagatgcataccaataaacatgctgttatatttttatacatgcaattaaaatgtaactaatatgtctacttgtacaggtggaacatcaaacctagttgtatacaaagtagggctgtacatcggtcggtttagtcggtttatactacatattttctaacccaacgtaaagatcggtttgtaaaattctgcat

SEQ ID NO: 24810 - DNA, 1536 bp, Cannabis sativa
ttaagttgatattcctcttattcagttgatgatcatcattataaccagttaagaacacttgaagagctttacaaagagaaccccaaaacactcaatccgagcactccaagaacataacttgggactagtctctcaaactctcactctcactctcacattctttgtttcttctctccccttcaatctaatctcaaagctttaatattttgtaaattaaaacatacatgtctttatatacacatgctacaagagaataaaacatagggaaaacgaatagcctaactacccgggctcgtgtgagtcctaactaacattaactgtcaatgatagtttgtaactaaaattaacaatcatagcagaaaggtcgatgttgatgttgattttctttggattaccaaccaattactaataaaatgtaaagatattgttatcataatattttaatcaatatcttattttatttttatattattttacgttaaagttataattttcttgatttatattctattgatatataaaattttatatatatgataatttcaaaacatcactcacgtataaacaatattttaaagaacaaaaaaaaaataaataaataaataaactttaacacatgacagtaattgttattctatattagggttatttttttggggagatttgcaattgctatatgaaaattttcaaatatatggacatttttcgaatgtaacccattaatgaaatttcatttacttaataaataagaaataaaaactaagcatgccctatattattgcaagatgccaaagtttgataagatgtcactatgatgttaccaaaatttactttttagaaaaaatctattaatcacatgtaaccaaaattcataaattgcaaactctaatatattatttcattattttttttattgagtgattataattttatgaaaaggagatcacatttgattaaattcatgtaaattaaccgcaaaatcatctataatatcttctctgcttttgtcgacatcaaatgatttttattcatagcgtcatcattaattccatatagtgtcatattcatcaaaaagaagtccatttcatttgtcgtcttcatattttatatttctttatttttttcttaaaaaaaatattatggttggtattaaactaagacaaccctcccccaaataaaaattattgtacttaaagaaaaaagatgtatgtacgaattttcttttcaagtgtcaaatataattatgtccctttctagctggcttcttttgtttcttttctttccttttaaaaaaagttacaaatttattttgttaaaaatggcaccactcaattggcatccatgcataatttgatcattctaatttttattagtgttaacaaaaataaaataaaatatcttcatcgcgtatctgtggctatgtatcggaatttttgatttaatttttaatttaatgatacttttaatttttacgttaactttaacagaatattctattaattttttataatattgttatatatatttaaaaataaa

SEQ ID NO: 24811 - DNA, 3008 bp, Cannabis sativa
aatttcttgtagtgtacaatgctctggatgaccgctctcgtagcgcatcatcccaagacaatctgaagttcattttggaaacatcactagtgttgccttcacgatcccgtagtcaggagactataacaagatccaagtcgactaaagttcatgatcagcttagaagaccaaaagacttgcgggatactctaaccagaaaacggttggtggaagcgggagcttccagaggtgaccctaatcgggcaatagaagctccaactgggacgtagaccactatatggtgttaacaaaatagagttcgacaatctaagagtcctagtgaagggaatcaggaccccaaagttgtcaaagttcaaactcgatagattgcgatgatcaccactctctgactgaatcaaagctctataccaattcctcctaaattcaagaatcctcgtatcaatactttaaattatatatgtcaatacttttttttttatttaattatattttttaaatatcacttaatatttaaatttaattataatacatattattatcaaaatattatcaattatcaatttttaaaataaataaataaataaataaataaagcttttacaggtgaaaaattgtgtcggcaaaacttacctaccaacaataaaatatggcgggtaagagttttgttggcacaaaagtgcaccaatatatctatattcccgccatattttattgcttgggtaacaattttatgtgttggtaaaactgttacccatcaattggaaaaaacttgccaacaattaataacaccggcgatctaattttttctaacacataaactcaccggtatagcctaattttattagcacatttgccaattgtgctggtaaaaattattttaccgactaagtattctcgaccaaagtttgccggcacattgtgtttagttttgccgatgcaaatttggacggcaaaaattctcttagtgaatattcgtaaaaacaggatcttcacctacctttattaatcttaataggtaaaagtacatacccacactaacattataaataatcagaaaactattaaaacatgatcgtagttttagatcaatggttggttgcactctatcaaagatattgggagatatatatatacaacaccaaacacattaacatatacgaacaaattgatgagagaaacatcatatgaacaaattgattacagggaagggcatggatcgtaattaaacatgaataaagctatcaattaaatatctaatctagaggttccatgattgacgttgccttgaattgaacttggcactcaacattattttgagtagcttttttgcctatattatgatcacttaataaagcaacattattcaatggatcacaccgggctaggccgatgacgatggatatggtgattatgatcttgatgatccagcttattattaggcaacaacacaagcatccggcggaggctggaccggatgtggtcataatgaaatttggaataataattttgattattctgaataataatgggatggaattaacatgttttgtccatgaataagtttatatatcaaggaggttggttctcgcaatctatatgttttttttaatgaagttgcctgccgtgattagcaagagatgattgtaaagataagtgtttaattttatgcagctaattataaaataattaagggattatatgtgagttaagagccatgtgttattcattataatatgaaattttcagtagagactttctaaataatactatttaatttataggaattaaagaggaataccatatatgtatatgagaaatatactactggtagtgtccaactttcactactacaaattacactatttacgtcggtcaatgctattcttcataataagttctatatagtttaatgtaataatttttaaaaaatattattaatcaaccacatcacaaatgacacgtctagaaaatattaaactattaatagtaatatactatagaattgggcattgaagaaggttgtagtatttacaaattatgatttaatgattcatttgaccaaatatgtttgatatgttgtggtggttgaccattgacaactgattaaatttatatatgttagctagtgtatcgaagcaagcatatatacgtaatcatgagctgcttgctgaaaacttggtatttcctttcattatgaattgtcttattaatatgaatgtcgatgtataaaatatacgtattatatatttttagttataataagtaagaatagttcaaaattacatatttgatttaaatatatatatgaaaaattatcgaaacccacccgtctagatcaaatgaatttgctgtcaatgttttggttaatctaaaccatttacaattatttaatttggtcacgaatttagaattctcactagtaattcaaaccagactaatttatatattctcctatgtattcttattgtataattttttgaatgggatataaatatttgagaacaatttttagaatattttttattgttatttatatattataaatttattaaaaagtaaaaaattatgaataattacataaaaaaataaaacaactacaaaatacaatttatggttataaacaaaaacatttatttttaaatggattagtaattagtttgatttgagcatttaattaattttattttattttaaatatacttttaaaaaaggtttagctcaaaaaacattttaaagcctcatattctattatataaatataagggatattgacggctaaaccaccttaatttttaggtttgtaacagttaatcacaaaaattgaaattttgggggcataactctctgaaccctggttccgttttgctctgtacccctccgtccaaaaatcacagttaagtgtcacggttgaatgtccacgtgtacacccttatacacgtggtaaatttttagtggttcacgtaattttaattttaaaaaataattataaataatttaaaaattaaaaa

SEQ ID NO: 24812 - DNA, 4481 bp, Cannabis sativa
gcaaacgtgaaagagaagatttcagctgccacagaggaggtatgtttggtttaggattaacatttgacacccttagcttttttacttgtagatattttcaattcggaaatacttcaattgtctttcttctttcatcaatcaggttaaaggaactttagggattgggaagcaagagtcttcttcaacttcagaccaacagtcttctgccggaacttcatcgaacagtggtgctgatacaaaagacgaagaaaaagtctctgatggcgaacaaacaaacaaacaatctgggcctaataatacagaagaaacattatttggaaaatttaaatctagaatttcttcatcaactccttcttcggcctttcaaaaaattaaggaagcaaagtttgtagacatggcgaaaaagggatatgacattgtaaaggatgagttgagcagcagtccaaaaaataggaagcgtcttcagcatgagccttcttcttcacctcaaggtgggagaagtacaagaactgacgtaactgttgttcccacaaagcagtccccttggagtaagaagtgggagactttcaaaaataaggttaaatttttagatcaacaatcaacattacattaagcctaaaaagagactcataaattactatgtattgattttgtctgctatatttaggttcaacgtcatcctatgttcaagcgtattggtgtggttgctgatcctgtcgtgacaaagagtcaggaggtatgttgtgatcctttaatatttcattatatccgtctcctattatttacaagcttgcttgagtgaatgaagtccactttttgactgaagttgatttattttgcttccctcgatatcatacctgtgcacatatttagaaatagtgcgagcaaggcctattgtagtaggtttatgtttttcactttctatgtcactttttacttatagccatgactatcaatccaacatcttaattttcatgctctgaagttttcttacagtatttggtttgctgattaacatttagaccttaattaaaatcatgtattgtatttttgaagctatcaaaattcatgtactttgcttttgtggaaaatgagtaaagcatatttggatttcctttgaccgttctccaataaaactggatttaggaggcgtttctaaatatgattctgctatcctatttattttcccccgtcctgactatcattggtacagcttctataatacgaagcatgtagaaaaaacactttcttgatgatgtaataatcttcagccacttgagtgttgctagtcttgtgctttaatgcccctctttattggaatggacagatggcagaggacatgcgagaaagatgggaaacaagtgataacccaattgttcataaaattcaagagtaatctgctcaaacttgcattcttttgcctataaatttcatttgcactttacaccaaagcgatattctgtttagttccttatttattgtattctcttctacagcatcaatgaaactatcttccaggaaacggatgcggctgctacaattaaggagattcgcagtcgagatccgtatgatcatattcccttcggtgtttgcattaaagttcattatgtattagagtcttttcacattacttttgtttaattccacacaacattttcaatacgttaggtcattctcaatgccagagtttgtggccgaagttcaggaagctgttaaaccggttttgcatgcttatattaaggtggagttttaaacttacattacctttgtttcattttattctcctggcacttgaatattattttatcattttggactgtgtgacgaggttattatttgaattccttatttgatggatataaaatttcttatattatagggtgacattgaaactttgaagaagtactgtaccaaagaagtcattgagcggtgtatagcagagcatggtgcttacaaaagtcatggcatatttttcgataacaaggtaaaagtgttcaccttctgaaagtttctattgatctctctttcataatcattatttcatcaaatttatgtgcatgtgttgctttagctagaagggatccttaattaaattgtacatgagagaatattttatgtcaacattgaatcatggacatgtatgagtattatttttcggtgtttctaatatttcgaattcttattgtagattctacatatatctgatgttgaggttagagagacgaaaatgatgggagcctcacctatcatcattgtagcggtatgcctttttcccttcttgggtcatccggaaaatcttacttggttatatttgaaaccaaaattgacattgtgtccttatcaattatattttcacagttccaaacacagcaagtctattgtgtacgtgaccgaaatggtgcaatcactgaaggcggccaggtgagttcatcatatagcttatgttgctcgtcgtagctctttacattgtggggtgttcgaaaactgaaatatttttgtgtgtgaaattaggatacaatccatacggtgtactacgcatgggcaatgcaacaggtggagcccgaagaactaggagagggcgctatatacccgatatggaagctaagagaagtacaacagctcggagttcaaagcctcatctagttcggttaagtacatttgtttcgatccaaaatagatgtagaattgcatacatctctttgtttaattttctcttctgttattattgatttctcattcggtgtcagctcgttaacttctctgggttttgtaaacactgccagggaaaactttggtgagattcctttattcattttaccaaataaagaaaaaattaaagtactctttttctgtataaattaaattacactctaatctttggggtatttaaaaatatcagttaattaagtgattagtgtaaatttatgtctgcttctttgcataattttcttacataaatggcactatgtattgctaataccaacttccatgaagaataggtaccaccataaatatttgatattttgactgttaatattattattctttttttaaaaaataataaaaagaaaatatgagtttgtgtcaattatcatatgctgtgttttttttttcttttctgacatggagaattagggcagttggacaagattattatgtttttcggtgtagtttcaactgtaattattaaatttaaaactgtaagctgaatcgcattgtatggttttgctaaaatgcaaatcacaactgcactataaagattaaagagtttcgaagaattttttatgtggtgtaatgtgggcggtttattctattccatccaacatattattttattaatctctctatgtaatataggtgtatatacctttagtgttcaagaaaaaaaatatatcatgtttgaattagaaactaatttagataagtcaagaaagttagcttcatttccttttcaccatattggataatgatatggcatgagattcttatacatcaataacaacttggggtaagaatattcacatttcattccccattattacaatttacaaaataatacaatttggactcacaggacatttataaaatatcaatttcttataaatattattacttaagtgtaaagtacatttcttatttattttagcattcaagaaaggtttttaatataattttattcataattgtgtatattttaattacgtagaactacttataaatttttagaaaattttgaatagttttaacatcgaaaataaaatttaaatatttctttttgcaacagtatagttcaaatattttattgtgattaagtttttttacactcgtaataaataacatttacagataattttaaataacgtataagatatatgaaaattttttgataaaaaactcttctatatattagcttaaaaactaagctagcaatatataccacctttctcaacaaaagaatattatgtagcaccactatgaactaactcatttgcgtcaaaactaagcaactccataaagttatcattatgtatgaaccattcaaaaactttctacataaaagaatcttgagctacctagcttaccctactataaaaccaactacttcaaccctaaattttagagtaaacttagccatacccattatgtcttgcctaagcctaaaatttccaagagccaataaaaagacatggtggaagagtctcacttcaaaaatccaaaccaaactccacaaactcaacaagccaaaatccattaccaaacacaagtcatcatcatcaaaacacaattccaagcccaagagatttttccttgtagagccaaaacgttttcaatatcataatcatcattatcaggttaaacgacgtcgttttgttttattacctttaataaaacgtagaataagaaacagtgctagtagaattacaactagtactgcacctgtttacgttgacaatctcttcaaagagactgcttctactatc

SEQ ID NO: 24813 - DNA, 2695 bp, Cannabis sativa
aacaactaaaatgcaatccgtctctaaaatgacatttgacttgttattcctctttatccaactaagtgcctctttgaaaattagaatttctgcaatcccgggttggcaactgacagaagaaatagttgaaaacgcctcaactattcgaccatcacaacctcgtgctacaaacccagtaccaatctcatttgtatcttcaaaaaccgccccatccacattaatttttaactgtccagcagccggtttggaccagtgatctcttgtgtcagtgcgatttaacatattttaaattaaaactaaatttaaataaaaaaaaaagtatattaatatcacaagtggtcgttagtctaatggtatagagtttcattaataatatgtggtaacataatttatatttttttattgttaattaattttaaaatagaacatcatacacaagcttggctctaggcattggcagactaggcctgtgcctaaggcccaccagcccagtggtataatttttttttctttttgaaaatacatattttttttactgattttgaaaatactatatattttttttttctaaataaggtccaaaaatattttttttatgacccactaaattttaaggccgaccctgatcatacacctcatcccatcctatttctcaaccagtacactttctacattattttaacaagttcaatgtggagcttgaaggttagcctgatggttgacatgggacttgggcagtggggaagctcgacaataggggattttgcttttgtttgtggtcgatggtctttcaagagccccgggaatgtcgcttaagttttgcaacgtctacaagagtgaggtagcaagctaagggtagtttaaattcctaaaactatcaatgaagatgattaatggctataagatagccaatgaagatggtgatggttcgggtgttaagagtttattgttggttttgttgtagcgaatagatagattcgaaccctaatcatcatatcaattgtttcctgttgaatattgttcgagattatttaatgttttatttttaaaagtagcatttataaatataaataaaattagattttatggttgttaaagataattcaatgttaaaatagcatataagtagtttgttcatactaaaattaacgaaataagcacaactcaataacaaaaatagtaaatttgaaaataatttttacgacaacaaaaatttgaaggcgtcatttaaatgtgataatagttcaaaaacattacgaacacttttatatgagttcaagaaatttctcaattttttctaatcatattattactttagtttttaaaataaaaatcaaaattttaaaaaatatattgtagccatcctaatatatcataatagtatttagtcaaaactaattaaaattccaaaatgatctctttgcttgtgtttcaacccataaattcaattccttttgctcttggcatatttgcaacaaaacataaatagattgtctttacttgacaagtcttatagtctaaactacatagtgagaattggtggaatattattgcatttttgacttttgggaaaagttgttatgataatattttcttattaattaatagctttattattagaattccaagtggtggccctttttataatcattttggtcctatattatatgatcgaaataactacttttgtgtatttctattatatagttgctggaatatactatgcaactagtttgtaatataataaatagcagaaaatccgttgatattctcctcaatttttttttcctttttatactccttcaaatatatatgtttgttatttttaatgtctattcttgggaattttcatttttataaagtttataaaaatagattttttttaaaaaaatatatatttattatatgggaagaattcattaaaaacattgaaaaaatatatataaaaaaataataattttgggtaactagagggctatcttttttaactttttataaaaattctcataaaatattttttcgaaaaaaaaacaaattatatttttacattgtataaaattcataaaaggagtaatttaaggtgaatttttaaaaatactatatttttaatgttctatttacaattttatgacgtaaactttttatatacaaaactatccttaaaagttttaaaattataaaaatataatttttttaacaaaaagtaaaaatataactaaaaaataacgagaaattcacttcacgaaaattataatacaactataaataaactataaaataataaaaaaatggtttattatttttactaaaaaatattttttataaataaaatatttaaaaagtaaaaaataaaaaaatatgttaattttacaaaaaatttctaattttaactagggttaatacatactgaccaatagatgtatagtcaatattgagcagtaaaggcttttcaagatcaaagagtttattttgactgaaagatgaaaaagatatgacaaaactaatggtcataataggaattgaggaatattagttaccctcccttttcttttcttttttctttattcaaattaaattactaaagaaatttattcacattcactacaggggtcaactatatataatttttttttcttaagaagaaaaagcatttgatcactttatataacttgtaaatgttcttactatatttgat

SEQ ID NO: 24814 - DNA, 5558 bp, Cannabis sativa
aagaacaagatccctagtagcatcatcgttgaatttcactatggtaaaccccgcattcatcctcacaatctgaacaattcccaatttaccctaaactctcttgataaaaccttcaaaattcacaaaaggggggttggctccaagaaccatacaaataaaagtagaattctaattagctaattgagatttcacttcctctatatcaactttagcaatcttgtttccatcttgaattaaagattccatataagagagtttagccttacgatatgaaatcttattagttgtgaattgtttccattgttgctattggcctgaaagtcatctttttcaacttcctctgcccaagtccaattactgttcccaaccagtttaggtgcatctttaagaatcgacttcttctcctgtgagttgattaaattcccaacttgaatagcttcagctaggtcaagtcaatcaatcatacgttcataaaaaatctcaacatcctcacttttgtggattgaagggggatttgtatcaatcactcgaattcctagctttcgaacaacacgtttcttcttcgccatggaagaaaaaagttacacacatgtttcaactcgtttctcttatttgtaggttgtttttatttgtgatgttttatcgtttattttgttttttattttcaataatggtgttctaccaccatcctactattgttattgtaataggaattgtaatgtgtatggagatgattaatagctttgtttctgtttggatcattagtgtgtcctcgaatggctcaaaatatttttacgacatggctatatcttttattattccaatctgggggatctccagaattttattgaccccatattttttggatcattcttttactagcacgtttcaaaatatggttggtcttcttgctattttgttttattctaatatgaatacctagtttttattgaagggtctttggtttatagtcattgataggtgtaacttttcacacgttcatttgaattggaaatcttgcgttctttgcacttttttgatgctttactgctggtggtttattggtcttttagttgaaggtgctatttgaatttttttcataattttattgtaaatggcatggtttgcctatttttgtttgattatgctccatgaacaatttcatcatgtaatggactttatccgattcacatattaatggaaatatctagtttaattaattagctagattaatttaagaaaatattttattttctattatttattggatttttttttgagtgaataaatttcaaaattaaaattatttatgaataaagaattaaaggttcaaaggttatggagtgagttacttttggtaagctaaggaggttatgtgactaagggctatgaggcccactggtatgatggccttggactgagatatcaaggtctcaagagctcgaagtggatgtcttcaggatgaactgcgcgactggggcatcttgggaagcccaacctagccatttaaggcccaaggatctcgctccacacaccatgcacttggggcacctaggaggccaaaccaagtttcacacacaccatgcgcctagggcacccaggaggcttgaatgaggcccacacttcactgcgccaggagctccatggggtaccgactgaggcccatgcatcatgcacctaagggctccccagggtattaatggtccgctccatccatagagacctgagccgtcgacgctaccatcagtaggacccgagtaattgggtctaaaaaaaaagagcaaccagtttttgactcactaagtttagggttttctcaatcaaaaccccacaaacacctcttccaattccaattttagaaattttagatcaaaactaaggatttcaaaaatctttcaccatatttatcatgtccatcatattttctcaaaagctaccctaacgagattaaatatgtaattctcaaccatttcctaaatagagagtggatttagattacccatagcctacattgtcaagattcaagcaggaatttcaaagattatcaaccaatctctacaattttagcaaaaatcaagtatggaaagagaggatttcctaagaaagtttgaagaacaagtgaaagcctataatttctatgcttcaaatgaggaaaataggtatgtaatcataaaaatgatatgaagttcaaaaacttgagaattattttaaggttttttttttcaagttcaaaataatgttataacattatgataaacttggaggataaatattattcttaaaaaatccaatataaatacgtatggattttgttcaagatatcaagaggtcgctaagagatgtggtcaacgtaaaaacgtcttgcgggtcctcataaccaacatcccgcaggtcctcaatgtttcatatgtcctcatgaccaatttcctataaatccccatgactaatgttctacgagtaccaaaacgggtcaggagggccgggcccccagggtccattaggagggccgacccttaaggtcaatcaggagggctggccttcaaggttcatttggagggtcgaccctccatcctcaacacctcccttggtgcttcactacgtacaattgtggacttaactctaggcaagatgcactttcgtgttagatacgtgccaacaacgctactccatggacatctacaataaattatcattttttgaagatattttattttagaatgttattttaactctaaaccatgtgatgtaaacttataaaaaagtcataaagtcaattgtaaaaggactcacactcttttatcttaaacaagactcacttgtgaattgaattcttggagaatacaactccagaaaactattcttaaaattgagatcaataaaactacaagtagattagcctattaccgttgaaagagagtgaatcactataaaatattgtgtttgtcattgtttatcttactcgtttacgattttctcaaatccattgacgaaaaatcacatcaacatattaattaattaaattaaaaaaaaacatatataattgtatataataactaataattcacttaattaattaatttataacaaaatgatttacttatgtataaaaatgaatacttaccgctcattgtttgatttattttatataaagagtaatcttacagagaaagatattaatgatgattacaagtgatacattaatgacatcaattttaagtgtacaggtaactacaaataagatactggaataacaattattttaaaaatatttctttatgtgtgtattctttttatagaagaaatcgggtgatgaattttttttagagttttctacatagattttattatttttctaataaatatatatttttttaaaaaaatatatttaaaattatttaatataattttattattcaattaatatattcacatatatataacttaaaatttctataaataaaattaattttacatgaataaataaataattaagttaattttacatgcccaacaaatttataaataacatcaccatatcatttatatgaatcatacattttttttaattattacatacaaaatataaattaaaactttaattacaaaaatacctctataaataataatttgaatgatacattaaaaaacgttttcaagacaaactttcctttggaaataataaaagataaattagggtttcaggtttcagtttaaacacaagcacacaaccactcttctccctctttccctcatttgttcacacaccaagcctcaagtcaagggtcactgcagagccaccgcccgacgcctgacccttcctctttaatcggttgcacaaccactcctcaagttgcaaggtaagtttttgctctttttataaattacaatactataggctagagcctagaatagttctcccgaatttgttccctactccattccaataggtggaaatttcattttttttttcgtcagggtttcattcgcagtgttgtgttgattgatgggtacggagaggaagaggaaggtgagtttgtttgacgtggtggatgagacctctgtctcagcgaagatcacgaaatcgaacggtggtctgatgagtaataacgccgggaatagtctgataaatatgtggaacggcaagccctactcgcagaggtactttgatatacttgagaagaggaagaccttgcctgtctggcagcagaaagaagagttcttgcaggtattgaaggctaatcagactttgattttggttggtgagactggtagtggtaaaacaacccaggttagtatgtttgtcatgtttcattactttactcgaaattacagtataaaataaagctttattatgctttgattgttttgaacttgaagggatggtatgcaatttttatttacttaattttggagactcggtagagttttgacgtattgaaaggaaggtacaaaaaattaggattgtctaagctataaatgttcctgaaataattgtaaccgttccaatgctaatgagttttgatatcttagaaaatgtatgagtttatcttggtccactttttctggtgatgccacgagtagatgtagaaacttaacatattttagttcagtaatgccattcattttggacgtcttatatagtgctatcgtaacccaaaagtcaaattttgatctcatatatttctatgaaagttatataagtatatgtatatgtacaatatatatatatatatatatatatatcatatatgttactgattgtagatgcttgatgtttatagatcccgcaatttgttttggaagctgttgatattgaaactccagataaaagaagaaaaatgatgattgcatgcacccagcctcgtagagtggctgccatgtctgtttctcgacgtgttgctgaagagatggacgtaaccattggagaagaagttggttatagcattcgttttgaggactgcagcagtgcaaagacagttttgaagtaagtttattcttttaaatcttacttctctgtttttcaattttggggtttaacttaggcttgtttatttttttgaatggtctcatcttaagtggcttaacttttctttttgtattgtttctctctgtaggtatcaaactgatggtatgcttttaagagaagcaatgaccgatccactattggagcgctacaaggtaataattcttgatgaggctcatgagagaactttggcaacagatgttctttttggactgctaaaggaagtattgagaaatagacctgacctgaagctggttgtgatgagtgcaactcttgaggctgaaaagtttcagggttattttagtggtgcacctcttatgaaggttcctggtaggcttcaccctgtggaaatattttacacccaagaaccagaaagggactacctggaggctgcaattcggacagttgtccaaatacatatgtgtgagcctcctggtgatattcttgtatttcttactggagaggaggagatagaagatgcatgtcgtaaaataaacaaggaagttgcaaatcttggggatcaggtgggtcctgt

SEQ ID NO: 24815 - DNA, 4847 bp, Cannabis sativa
  modified_base (103)..(107): a, c, t, g, unknown or other
aaaatatatttagtcacaataaattgaaaactttgtttctaatacatttagctacgaactttatagtcacgcaacataggaataatgatttataattagtcannnnnttttttacttttagtcataaactttattgtgactaaaagtaagattttttttgtactgttagtaagtaaattaagcgtaatgtaatttaaaagataattctagactagcattcgataaatgacttttcgccatgttattagcatagaaaatttgaaaattaattattttatatttcagcagctaaatcctcttcactatcatttcagttgcatttaatctttcaaatttaaattttagtggtaagaccttctatcaagattgagttagttatagaaagagtgagtattagtttggatgagtcaatgttagttttatgttagttgttagagtatcattttcaattaatgtttgtaactaacttactaactgtaccgagctatatatatagctccaccattgtaccttttctagtagatcaataacattgtacacaaagcttgcatacgtagtttttctctctttcttttcgcaactaatatggtatcagagcaagatttctgagtaaactccattgcatctcttttcttcttcttctccttttctccatggcccgaggtgggggaactcagactggaagctcataagagagttctaatagatggattcgaatgttcgaccctactttaatgaagctcaaaatccttacttcatgtcaagctgtgatcatcctggagctagtttggtttcaaagattctcacatggtgtgagaactacaattcatggcattgagccatgagagtagctcttgtggccagaaacaagctcaagttcgttaatagaaaacttcctgctcctgaggaagatgatgataattttaagctatggaattgttgtaataacactatgatttcatggatttttcatgcaatttcaagtgaaattgctgaaagtgtgatgtatatggataatgctacacacatctagactaatcttgaggaaagattcaactagaaaaatgctcctcgtgtgtttgaagccatacatacaaagcgatccctgggtcaaggttctaaaactattactaattactttactcgactcaagtccttatgggatctgattcaagagtatcgcccataatctacatgtacttggggtgccatgaaaacagtctaagaataccaggaagaagatcatgttcttgaattcctggttgaattgaatatgagtcatacagtagcagtcaatctcagatcttgatgtagatcctcttcccaacatcaatgaggtctatgcttttgttatacaggaagagagccaaaggtgtttgtcaaatgttcctactgaggatgataaaataagatttggatctagtcctaatcttgaacaatctactggaaatgtccagccacatcacccaaaaatattgtgtactcattgtggcatcacaagtcacacaatgtctaagtgttttagaatccatggctatcctcctagtcgcaaattgcatggaaaattccataacagataatcaaagcagaaataacttaggaaagctttctgcagcaaacttttcagctaattttgagaccaatgggaataatggagatagttctggtagggattaagaccttatttctagtttgtctacattatagtgtcaaaggctcgtggtattgttatcccaaaggaatccataaccctcatccaacccatcaaatgagcctcctttagtgtctcatttctctggtaagaattccaaagtttccaattctaagtggattattgacattggtactactcaccatgtgtgcaataatttttctttactccagaacacatattttgatccctctatatcatttgtaattttccaaataattagtatactaaagtgaattgcaatagaactgtccatcttttacctaatctgtctctattaaatgttctttatgtgccaaattttcttcgcaatctcctttctgtgattactcttactgactctagaaactattttttacctttcattcgtgaaatataggacactttgaagaagcagatgatagggatacataggtgaaagaatatgcaggctttactatctaaaatctgatgttgccagtaacattccttttgttttttctgtttttgattaaaattaaaaaaaaaaaataataacaccagatacagtctggcattacaaattagggcgttcatcttgtattaaaactcattctttgaataaagccttgtaatttaattcaaatatttcttatgacttttattgttctatatgtcattatgctaaacaaagaaagttaccatttgtgtccaatcacaatgttacttctgctattttttacttgatccatgttgatacttggggtcattttaatactcctactattgatggctgcaaatactttataactattattgatgatcatagtagatacacatggatttatttcattagaatcaaatctaaagctcaaaaggttattcttaattttttacaacttatcaaaactcaatttggtgttcaaatcaaaggggtaagatttgataatgttaaagagttacaatttacatattgttttagctctctaggcattattcattatcactcatgtgttcaaagaccccaataaaattctgtagttcaaagaaaatatcaacatctcttgaatgttgaaagagctttattatttcaatcatacatctctttatcttattgagatgaatgtattgctagtgttgcttatctcatcaacagagcaccaactctcattttagagctcaaaacacgttttgatattttgtattccaaatccccatcttatgaataccttagagcttttggatgccttgcatatacttccattctatctcagggcagatcactaagcctttatacttaaatgattatcactgttatctggcttctcacaatctctctgtctcctcaaaggataacatgccaaccactgcacactctttgtccaaggtgcttgactactccaggctatctccaaaattttgagttgatgttctagctatctctagccatcaagaaccactttgcttcaatcaagcaaaaggcattcctgagtgggatcatgcaatagacactgaaattgatgccttggagaaaaaaacacacttggaatgtggttagcctacctattgaacaacatgtaattattggttgtaagtggatttacaagatcaagtacaatgcagatggctcagcagagagattcaaagctaggcttgtggctaaagggtaaaactaacttgaaggtattgatcactcaaacacatttgctccagttacaaaattggtttctgtcaaacttatcttggccttagttgttgttcatggttggtttctatagcaacttgatgtgaataatgcattccttcatgggaaccttcatgaggatgtttatatgtatgactctacctccagggtatagtcctaagggggagaatctattaccacaaaatactatttgcaagcttcagaaatcagtatggtttaaaacaagcctccagatagtggtttgaaatttttttctataactttgacagaggaaggtttgtcacactctacaacagaccattcaatgtttattaagcattctcccaacaacataatcatcttactagtttatgtagatgatgtgattctttctagcagcaatctcaaggagttagaacttctcaaaatcagattgaatgatagattcaaactcaaagatctaggagatttgaaatacttcctaggcttgaggtagcaagatccagcaaaaagatctttatatctcaaagaccatattctcttcaacttcttgaagaacttggatatctggggagcaaaccttacactcgtatggaagaaaatctaaaattgtcacaagatgcaaaggataccttggctgatccaacattgtacagaaaaacaattggaaaattacaatacttagtcataacttgaccagacattgcttctcagttaataaactgaattaatttctcactactcctaagacaaagtttttaattgatgctcaaagaatattgcagtatattaaatcctgtcagggtcaaggcatcttattctttgcaacatttgacatttagttaagagcttacacggatgcagattgggcagcctgcatagacataaggagtttcacaataggattttgcatattccttggagattctatcatctcctggaagagtaaaaagtagcatagtgtctcgagatcttacactgaatttgaatatcgagcaatggcaaatactactagtgagttaatttggctactgtcattgcttagagaattgaaaattgagcacaagagacctgccttgatgtattgtgataacaaggctactcaacatattgcagcaaattctatatttcatcagaggacaaaacacatagaaatcgactaccatcttattagagaaaaggtacaacagggcttgatcaaaactatttatgttagcagtaaggaacaactaacaactatcatgactaaggcactctttcctaaccagtttaaaacacttaaagacaaaattggattggttgatatataccattcatcttgagggggagtatcaagattgagttagttaggaagagtgagtgttagtttggatgagtgaatgttagttttctgttagttgtaaaagtgtcatcttcagttagtgtttgtaactaacttactaattgtatatatagttccaccatgtatcgtttctagttgatcaataatattgt

SEQ ID NO: 24816 - DNA, 1202 bp, Cannabis sativa
tcaatgctctcaatgagaaggagtctaattgggttattgaaaactatgtctccttttgtattaaatcctcaatattaactttttaggtctcttcttttctggagaacctgttttgtaataaccggaagtctaattattttatcttgttaattgaatgataaaaaaaaaaaaaacatggtcttaccatttctctaaattttattcgtaattgaaaaatggcctcaaaaatttaaataataggtgtactgagtattcaggacaccgttacccacttaccttgattgaacgtgtttttttctttttcctctctaaatttcaacggaaaaaatctcgctcttcaactctaagatatttctgccgcttaatccaaccacgcgccgccacagcgcgtcttctctttacttccggttctacttccgatctgcatcgcaaccggagaggagaccgtcgaataacactcggcggaactggaaaccaccgcgatggcggagccgccgggaaattctctcccttcgtctgtgaattctgctgaagttcgtgcggggattgaggaagagactgtcggtgagaatggcggtggtgtaaaagaagtggagagcagagaatttagtgacggtaatagaattgaagttgaaagcggagaagctagtgtaaattcaccaggtttgtttgtttgtttgattaaacttgtgtttggttagtgagaaagagaaagctcaggaaaatgaatttagtttaattttaggtgaattgtgcggagaaatgtattgaaacgtttgaatataactaacggtattgaaattcaaaaaattccaggaacttctggcaggagtggcgttaagataaacacattgccgatggaaatatcaaattctgacaaaatcgaatcgagtgcaggacctcttaagttagaaaggtcgagaactgagaggcataggcataataacaataacctactttctgaagatgcagcacaaatttttgatgacaaactttcagttcagcaaaaggtacaatatagcaaatatgactttcctgtttagtgttcttcttttgaaggtactactagcttacttttgttatattattattattattttggtgaaagatgctatctttttctgtgttctaatgcatgttaattaatgtttttaagcataaggaactggctgaagtttactgtgttgtgctgattatgcatg

SEQ ID NO: 24817 - DNA, 4164 bp, Cannabis sativa
ataaaatgatcatatattttatttgtttaattaattactactagagagagtttcaaagaaggaacataatccatgtgcacatattatctatctttattgtccactcagaagttaatagtagcatttaatgacaatcctattattgattattattattacataacaaatattattaataattaattgacctgactgtcatgaaattgaaaacaatcatttattttgccgatgatttttttttatttatttttatttttgcatgtggttaagatcacagtggtatttcattttatttagtagttccatgaaatcttcaggagaaaaaaaaaggtgtctatcgattatcatattaattatagaaatcaatcctcatggaatgtatatatatatattaatattccatatacattgtttgttatgattataattatatatattaattaattaattggtatataattttcaaattagtaatagtagtcgtggtccttgtggacttatatgatatggaaaatagtgtacgtgttggtgtaattggtaattttggccatttatgactctctgtagtccacaggagtaggcttaaatattttgttgtaataattaataataaagtcattctgtcttccattccaaaatatattgttcttcttctcatcagtttgtatatactaataattagcagtataagagtattgttagtagaaactaatgatggtaccactttaatgtgtataatatagagctttaaatacgagtcgagccttttaacacggtacgaaacttgcatgatgagcccaggagaaacgagtacgatccgacacgaaaaatataaatttaagcacaacacaatatgacaagccgaaacacataagcataaatatagcaacccgaaagcacaacattataatttaataataataataatatatgtatttactaataaatatttaaattttaatcattttaattaattttttatatgattatttgtaaataattatataaaaatgatataattaaaaccaattaaaattataaaaaagtacatataatttagtgattaactcattaattgtaaaataaaaaatagtaaaaaagtaaagtccgactgtgacctatataagattacatgcagactcatttatgaaaaatgggccaatttaagtaaagcacgacacgagtccgattaagacttgaaaatatttacgagtcgtgccagacttactctttaaaacattcacagagcacaacacgatctatatctttttctgagcgggcacaacatgacatggctccggcacaacatgacacggctcattacagttttttcaaaatatggaccagacgaacacgacacgtaagtaattacatgtatccgacagtaaatttagaaaatgtataatctcacataattaaggctaattaatccacgcggtttcaataatatatataatcctagaaaagtataattgcatatatatataatatattatatataaatatatgtacgtactgacactacccctcattaattagctccacaaattagtgtcccaagctatagaagagtccatgcatctctagtttctctacacacatataaataaattatatatttacagctcaataagtttcacaagcatacataaacatatatgatcaagtggtcaacatcttgtgatgttgactcactctcagccctctatttattcctcttcaaaaactccaatttttcttcatcatcatctacttctttcatcaaggttctttcctagctaaaatcttaatttttctcttattcattaagttttacacaaaaacactactaacattacaatattatttttctgtgcagaaaaaaagggaaaaaaatgggattattagtgggcataaatctcctcatcataagctttgtctcagtaatttcatcagccaaaggctcctactatgctggatggaccaacgctcatgccactttctacggtggcggtgatgcttcgggcacaatgggtatgtatacatattttaatagtgatattattcggtcttattaagttgaattaagctcaataagttttgtataggcggggcttgcgggtatgggaacctgtacagccaagggtatgggacaaacacagcagcactaagcacagcattattcaacgagggattaagttgtggtgcatgtttccaaataaggtgcgccaacgaccctcaatggtgcctccccggcaccattgtggtaacggccactaatttctgtccacccggtggttggtgcgaccctcccaacctccacttcgatcttgctcaacccgtctttctccgcattgcgcaatacagagccggaatagtacctgttgtttacagaaggtacaaccaaactactagtagtattttcagtacatgaatatatatttatctatatatatatatatataagttgtaactctattcaattattattaggaaagttataagttacactcaacattataaaattaggttcctactagtaagcatatggcagtttgagcctttgcataaagtctcttgtattaaaagatccattgtttttattaaccttttatatataatattataaatatttttttaataatgtatagtatatatatacataataaataattatggcataattacactcttcagattttatacgcttaaatactttatttttatttttggaggcaaaaatatctaatgttacaattctcttacatctgttactaccactttcgttaactcataaagagatgcaaatctaaattaccataactgagtgaaccagtacagtatatgtgaaaattattataactgtcaaagaactcgaaacaaattgacttgttagggctgtacgtagtagatatttgtagcatatgtgagactttattaatgaaaatattttgttatattacagggttcggtgtagaagaagaggagggattaggttcagcataaatgggcattcgtacttcaatttggtactgataacgaacgtaggtggagctggtgacgtgcatgcagtggctatcaagggatctcgaagtggatggcaaccaatgtcgagaaattggggtcaaaattggcagagcaattcatatcttaacgggcaaagcctttcatttattgttacagctagtgatggtcgatctcttatctcttacaacgttgctcctcctaattggtcttttggtgttacatatactggaagacaatttcgttactagcctacctacctacctttattacataaattaaaatgtgagacaatatatagaaagagagagagagagagagagagagagagagagagttcatatttatatatatttgttttgctgtatactcatgagtttggtatagagttatcttattatgattaattaattaatgtattatgtatgtatgtatagcagaattgaaaaagcagccctttgtctctgctttgttggttttattaagttttgtaatttaattgaatacatgagttatataataataaagttgtagctcatgatcgtatttataatatatttaattatagtgtcagagaatcgaagggggaaatcattaaactgttttattttttatttgtttgatcagggaatctttgaactgtgcgttttaagtatttttagagatcatatatattgtatttagtgctgctttttacactattagaaatttttataatgtactttgttgggtcgtatatatgcaatacttgttgtaaatgagaggtaatggaaatgaataatggttaatatcaaaaataaaaataaaaaagctatgaataaaacatgtgatgatatatttatgtattagtttcctaagtatataaaagaaaaagagaggaaaatccttttatatgtattgttctcatgattgatgacgttaataattaattgtggatcgagtatgttctatgttagaaaaattattgaagctaactcaactttactgacttaagtgattcttaataattatgtggttatgaaaaaaaatatatatatttgaattaaaatattattttggaaaccgaaataaatattctatcaaaataccttaaagggtgtattacataaatttccttaattatttatcttttgtactttactatataaatatatatatata

SEQ ID NO: 24818 - DNA, 1557 bp, Cannabis sativa
ttttttgtaaaaactcctttatatttaatacaatatgactcttatacgatctaccaaacgagcccataaactctttattaatagaatgccacccaaaaaaaaatcctaataataagtgcagaccccatataaatgatgaatccagttaggtaataggtcctcttcgagacaaggtaaatctcctaaaatgcacagttcgagataatgtcaatcttttaatagaacataagttccattttctcaatcaatattcataatagctacacaattatatatttatagactttcacatcatttacaaatcactagtaaacccttacactatctttatagtgtaacactatcctagttttcaaaattaaacaccttgtcctcaaggtggaaaaaaaaaactaaaaacatgcacaaacataaaatggattgaaacatgacaaatctctcaataaaagtacctatatgttaggtcacgaatcttctttgagacaggacaaatctccaaatgcactattcgagacagtgcatatctcacaattgaaccaaatttctattttctcaatttaagggtaaaattcagtcaattagtcaatttttactaattttataactgaccgttgagaaattataaccgtataaaaccgaccgtacggtttttggcagcttttaacggattttgacagttttttatgattttggcagttttgacagttttttggtttaaccaattattttttgaaaaaaattataaccgaccaccatgtcaaaaaaccgtaatcaaaactaaccatcaaattcggtgaggacgtggaaccaaaaaaatcggttacggtttttattttatgaaaatagtaactggtcattgagaaattataagcatataaactggtcgtacaatttttggcggtttttgacaatttttgacgattttggtagttttttagtttaaccagttattttttttttcaaaaaccataatcgaccagggtggacccaagcgtgggcagcttggccattgcacaaggctcctatttttctaatgcccgttttttttttttttgaaaggaaaggcctatctatttttttttttcctattatacatacataaataaaaaatttataactgaaaatttaagaatgaatcttaaaaaaaatactggtaatgaattgttatatgatttttttttttaaaaggctcaattttaaaatttcacaaaaggctctcaaaatgcttggaccaactctaaacggaccaccatatcaaaaaaatgtaattgaaactaattgccaaattcgatgatgatgtggaattggcaaaattcaattgttgtttggtcggtttccatttttgatttttatgaacacccctatttcaattcatatttaccaatagctatacaattatacatttaggccttcacactatttgcaaattactatatattaagccattacactattttcatagtgtgtaacaaatcccctccccattattgattgtcttctttattttgttgaaaaaatgtacatttaagaggactttcttctttttttaaaaaaaaa

SEQ ID NO: 24819 - DNA, 1643 bp, Cannabis sativa
gaaaaaggaagaaatttcatcccaacaatgaaattcctaaatcaatggttcaatgaatgataaaaaactaggaaaattcccagaaatcttgaatagatgatttcaaatagtttctagaaaaataatgggaaaatgctagaaatttaaggactttagatgccttgcgtgtgttaatgtcaagaatttaaaaaccctgaatctacctaatctaaatcattgaagaacaatttcaaggatccaaaatttataggtagttcaaaaatagtgtcacatgcatttgaagaaaataaaaagaggaaagaagatttcaaaaagaaaatgattttaagcttgatttcttttgagactaaatatggctaaaagagtataaaagaatctttgaccctttatataaacgctcagaggagtaattcagtaactaatgttcaaaatttgggttttcccccaaaaaatgtaatcatcaaattttgaggaatgcatatgatagtacgcgatactcaataaccgttaatgcgctaatcgaggtccaaatctcaagaccaggcattaaatgccccaaatactgaagagacagtcgaatctttgcctttttttatttagtcacatcggatcaagatagagtctaaagaccgaacacgtgtcacccatccaaccagcttagtggtcgaataagtccatgtgcgagcaaaaagttcctaagcggacttgaggggcaagtgttattccaatttctgtacaaggtgacatgacatctatttgagtgacacgtagagaatatttcataacctagacgggcaatatattccatgatgtactgactgaagtgatttgttactcgtgaacaattgatttaaagaagctggaatatgcggacaaggtatgttacatcatctgaccagcattcacctcgcagttagctcgcatactccgaacaaaataagtgtggctggaataccttcagaactattccccctaaattttcaagcgaccgcattccttattttgtaagatagattcactccgacagggaaaaagaggaaatcccttaattttcctttttatttctcttaatttaggaaaataattgaatttttttttatttatttattatttgatctcggaaactaaattaatgtaattaatccctatatatagtggagtcatttcattatttagagatccaaatttattcattcaaaagagcactcatgctgctaaattcttcgtaaaagctttcgaggaagattaagaatttcttgcttcttttttcacaagttaatacaagtaaaatgccagtaggctattacactactacaaaatgggtttttttgacgtttttaaacagttgtttaaagtattcccgttaatttctataatcgtcgcagaacgggaaagataggcaacatttaaaaattgtcgctgatgtggacttcccgacggtttaaaactgtagcctataacagggtataggcgatggttttgaatcggtgcctatagtatagggcacggtttaaaatcgtcgcttataccctgttacaggcgaccgttttaaaccttcgggaatgtaaaaaaaaaaagaaaaaaaatacaaacttttctaccattaatggcagaaaattctgtattttctcctattttttttt

SEQ ID NO: 24820 - DNA, 1938 bp, Cannabis sativa
tttttttttcctcttgatcattgtaaaacacttggtaagtctagattggtggatgttctttaaacattatttccttataatgaactttgtataattaacctattattaatgtaattttttttgattttgaattacctaaacctaaaaaaaaaaaaaagaaaaacaaaggttccatcaaagtaaatttctttttttaaaaaagtcataaaggatgaaaagagggggaaagttaaaacaaaataaataaatgtgaaaaagaaatattactatacacgtggcaaaaaatcattccgagttaccttcttattaaaaaaaatcgaatttcaaacattgcgtgcgggtagaggcattggtccacgcctccccacagcaaaataaataaatataaataaataaataataaaaatcaataaataaaaattccacttaaaatgggaaaaataaaaataaaaaaaatattttccatccatttataatttggagaggagaataatttgggggtcttggcctacgcggaattgtagaattgtatttattttttttttgttccaagcatagagacaaagaaagaaacaccattaatggcgagctcttatacaaagaagaagaggaccttgaatgaatgaatgagtgaatatatgtatgtatcgatatccaggtaacaaggtaataggctttgaggttttttgggggtttgcggtccgggtttcgttttgtttttacttttgtttctttttcgagattttaatctataaacccttttgtttttttcttctaatttggagcgaaccccagttttaattgtgtcaattggtggtttctggggacatttcgcttggaaatctcaactgggtatctgtgtttttggtctcttctttctgggtaattttttttcttaaaataaataaattattattgagtattttacttttggtttttggaggctcgatatgagtatttatataattattggttttggtatatccttattatgcttgactttgttgcattgttcattatctaagttgaaaggtttgttttcccacaagacccaatcttgcattgttaggttttgctttgctcttagttgagtgtcatattcccctctcctggcgaatatagctttatatttaattacatgatgagaatttaaagtgggattttctgtctgcaaaacaaaattgggatttgcttgttatattcttatgcttaaatttaatgtttttgtttttttaggggttgtgggggtgaggcaatgaaggttgatgtaatggacaatatgtggttcatcaatcgctaaagggggtttgggttttgtttgtaagtgatttaatttatttatgaggatagttcaattcaaataagaaggctgtatccagtgaaccccgttttgattagatgaacctccgttttccctgatttacttaggtgtgtaggagatttgagccagttcttggtgatgtaagatttgaaatgaaagcttatcttcagtaacatgatcctatctcacaatcttgtaattctagtttacattttgagtatttcagatattggattcacggtcatatgctgcatgatttgtcttgctgtgtcttttttcttcttcttattcttcttttctctatacaatttaatgtttattggaggcaatcagtgcttttcaatgtggaaagcttaacctctgatcattccattaaacactatatttctgatgattaagcaaaatgggattttgattgagaaacccagaaatgctgtggaaaattcaatgaaaggacataggagttacttaaattatagtaataacaacataggaggatcttttgaacattcaagttgtatgttaaagtcaaagcttattacgtctgcatactaaatcattgcttttgaaaatttatttttttctgtttttagagatcctatgcattgccttgatgg

SEQ ID NO: 24821 - DNA, 1539 bp, Cannabis sativa
atataaaaattggtatttttataatatgcggtgcgatgcggtttgaaccgcatattaacaattcaaaaccgcaaactaaatcgcatcgcgcggtttagaaaaaattcaaaccgcgaccgccccgcaaaaaatttcaaaccgtattttttttgcggtctggtgcggtgcgggcagattgagcggtttgatgaacacccctaacatgttccaactataatatgatatttatgaacaatttaatatatctatatgtaataaatataataaatataagagtttacttttaaataagtattgtcttactattttcaagctagacgtctcaactcaaaattacatgtttaataaacgggttagtcgtgttaacttgaaatgacccaaactcgtttaagaaaaatccaaactcgtttattttgtactaatttcaagtcgtgttattgtgtctgacttatttatataccttatttttatcagaattaatcgaccctcttttaatattttggacatttgataataaaaataaataaatatttttaaaaaaaaaaattattataacataaaagatgttcccataatataatttgataaattatgttcacaaaaatatcatgtaccttatattcaattcaattttaaactaaatgtagcaagctacaatatttttaggttttacttttagtgcattgatatagttttttattatctttacaatgtcttttgttgactttcgagtataaaattagatgtatgtaattttttttttgtttgagacataatctttcaaatataatttatcaccataattgtagctctggtacaaaaattagaaaaaaataaatatatatatatatatatttatatcattgaaaatgaaaagtatcataattcttctatagaaaatagttgtaatctctctgagcaaattagtggtcagcagttgtgtacaagggacggtatcgtatgttatatcaatgagcaaccatggtagcaagcttaagctgcttttgtagaggcaagtagtctttcagagataagcaagtatggagcataacacgcaacagaaaaccacccatttcattctcactttcatcaataggctgtacatcactactatattcttctcccctggaaatatgtgtcacccaattgtgaatgcgctccgttgaagccaaaagattgaaaacaacagattcggcgatgtggctccaactggattccgatagaagagaggttagtgtcaatggtaaatcgctcagcactgcctgtttatcaagaatcagaagagccatgtatttgctgcagctaccggatagcagacctacaaactgcagtgcctataggagaataagaaaaaaaaaaacatcacataagtacataactttgaaacagaaaacattaattttaaaagatggcaagcttgtgtggtagtatgagcctataggcgacaatgccaaatgcaacatatttaacaaaatttgattttttttttcaaggcaataggagggttgagacttgagagcagtttatggtactgtcatc

SEQ ID NO: 24822 - DNA, 5349 bp, Cannabis sativa
caaaggataaattcctactagcccaacagttcatagtcttgttgattttatcaaggatcacaccacaatctaagagcttccatgtggttggatgaatcttgactcccaagtatttcagagggaagtttccttcttcgaaatgaactaagtcaagaatcttcaatttggtctcatcattgacccccccccaaaatagatttgagattttgctgtgctggttgataaccctgtagctttgaaaaaaaacatgaaagcttcataaataagcttcaccgtgtttgcattccctttacagaaaataaaaaggtcagctgaaaaatacaagttagtcaagcgcaagtgcttacacaacgggtggtaagcaaaccccttcttctcaacaaactgattacaaagtctggtaagatactctataatcacaacaaagagtaatggggacatggtgtcaccttgacagagaccttttttccctttgaagttgccttcaattctaccatttaataataaatgatagtgagttccttccaggcaagtcaatatcaacatagtaaaccgtgaggggaaacaaaaaggcctcaaaagatcctcaacaaattgccattcgacagtgtcgtaagcctttcttaggtcaatcttcatgatgcacctagctgaaatatttttccttgtataccctttcagaaggtcttaaaatatcatgatattatgagcaagcaatctatttttcataaacgcaccttgattattctaaataatgttggggagcacttctgaaagtctggagcatatcaatttgaaatgcatttaaaaattgtgttgcaacaagcaatcgacctgtagtctttagcagaagtcgggttggcaatttttgggattaaggagataacagtttcattaaagtgtttaggtagtcaaccattagtaaagaaccccaaaactgcatttgaaacttcatctccaatcttgctccatatgtctctgaagaaactcgagccaaaaccatctaacctagggcttttagaagggtgaatactaaacaaagctttcttgacgccccccttgttaaaaggtctaatcaaattgacttgttgttccaagttgagacattttccctccttaatacagttgacatcaatactgccagaagcattactcttgctgcccatgaaggtctcaatgtgcttcacagagtgttttaccacttcctcaaagttatcaaaaactgtatctcctttcatgaaagtggtgattctattctccattcttcttttcctcatagccatatgaaaatagctagaattttcatcattaaaattaatccactttatcttgctttgctgcctacacaactgagtatatctgtctttagctatcataaatccctgctgtaattttaaaacagcaagttgatgctacaaattagtcgaattagtagcagcttcctcttggattaggcgatacctttctttagcaaccttgtactccatagccacatccccaacattgttcctgttaaagatcttcaactcatgcttcaatttgaacattttctgcaccatcccatcaaccccaatacgagcaacaggcttgttccaactttccatgactgtttgatcaaaccccgagtataaagaccaatgattcccataatgaaatggtttcaccctacaattgttaagctcttgattacgtattaaacacaagcagtgatctgagacaacgtcccacttcaagcaagcatctatgttggggaattagtccaagtgtaaaaagaacccaaacttatgaattcctcaacttgacccaatgcaagccaagattgagcatcttaaatttctttactttgaatcgatctccccccatatctgtcttgaaaactaaacataacattgaagtgaccaaagatgataaacggctcattaatcttcctgaaacaagcaagtttatcccaaaaaaatttttggtctccattgagttactcccatacatagcagtgacagagaaggatctcttttgcccataaaacttcactttgcaatgaagaagctggttgtcttcactaatgatattcacctaaacataattcttctaccagagaagcagtattctcccaggaaccacattactagaatagaaattccaagtaggaaaattattctccataatatcaaagattttctaatgtttaatcttggtttcaaataaagctccgaaacaaatttattcaatctaaacacattaagaatagcaattcacttatcctttttattcaaacctctcacattccatcctaacatattacaagcatccatgaaaaaagattagagttaggaaccgaaacctcatctattgtagcagcctgcagcacttcatatccgttattgctgctggcaattataggatctacaaagttttttgaagcttcactctgtcttagcccttttcatttgggggtaatccaattactatcattctcagatctatctttttcttcaccccctgattatatttgcacctcagttggtctcgagtcaatggcaactgtcctgggatcaaccatctcccctggctctttatcttgaatgatatcagctttttgattgtccatcactttttctttctcagcaccttgtttcttcctccatataacttctctttattgcaattagcaacagatgtcctaaattaggacaagccgagcacttattagggagccactcatactcaaatgactgctctaccaactatttcctttcattaatgaaggataaagtctttggtggatcgtctaaaatctcaatttcaataatgacacgagcaaacttcaccatagatcgctctagagtaaccttatcaatcatcattggtttgccaattgtgctcaccaaagcactgagattatttctaccccaatattgaagccccaacccattcaaccgaatccatacatgcacaaaattcaccattcgggtagagtcaatttccgtggaccatggtcagagcaccactagttttttgtcgaagtgaataactccaacttcaaggattagatcacgagttgcttcatccctaaaattgacaagagtgcatcctgagtgcattcttacagtcttctcaacaccaaaattgccccatattattttcacaaatccttcaaaaaccttgaaaggagggttagcacctaagacaatacaaaaaatggcatttctccaataagaagcctctaccttaatctcctctaggtcaagttttgcaataatctaatcacctactcgaataggttcaatatacttgagtctacatggaggagttggtaccaggttagtattgaatttgctccatatctccctttgcccttgactgaacatcagttttctcaacctcctcagcccagctaccagattttggaaaaactcgagtgctctgttcctcaccaccgatttcaattcttgtatctatcattaagttctcgcaggtatcttggaattcttccacctagtcacatttaataactacttcttggattgatgggagctcttcgatggtatcattgctcaccgtgatagtattgatcagctattgggtgatcctcttcttcttcgccatgggacaggcaggggaacctcgcatgccctttactcatatttaggatgctaataaatatacttgttagtaaatctagatcctggtaaaatatatcccagcagaagatgtatcacacccccgtgatcttccacacacgaaaaacttcatgcatgcaagagtaatgtttagtttttatgaagtaagcttcaacttcggtgagggaaggctgaagttgcataaaaattcaagggatgacttctcttgaagagatcaaagggtgaaagcatcatggggagtaagacagacttcaagtagtccttccgttccaggaaggagggttgaagacatatcacacccctagagatcttccatgcacaaaaaacatcgtgcatgcgagagtcatgttgaatttttatgaagcaagctttggcttcctcgagggaaggctgaagttacataaaaattcaagtgatgacttttcttgaagagatcaaagggtgaaagcatcacgaggagtaagacagacttcaagtagtccttttattctaggaaggagggttgaagacgtatcacacccctagtgatcttccatatgcacaaaaaacattgtgcatgcgagagtcatgttgaattttcatgaagcacatttcggcttccgcgagggaagattgaaggttcataaaaattcaagtgatgacttcgcttgaagagatcaaaggttgaaagcatcatggggagtaagatagacttcaagcagtccttccattcctggaaggagggttgaagacgttgtcgtacgcccagtaacctttcacactcagaaaatgatgcgaatgcatttctcaagctccgagaagctctaagagatgcgtgcatgcgccccggatctcttggaaattctatttcctccagcagatggcaaggtgcttagatgcttttttggcaaagactcagacccccagtaggatgaatgttgctccggtagagattccttatctggtttttgacagcacaagttactttctttgatgttactccagggctgtagttacaccgtaatgacagagatccctatcagcaaattttgccaaaaagggtttgccttagcaacaccctttaaccaataatgctacaccatgctttgctggaaacccagtgggcactaataagactcatggtctcctctcagctactgtcacgacatgatcttgcaatgtcgatctttgatcagcttcgtgacgcagtgaaaaggcagggggggtagccattggtaatggatctcgtcctcacatcagcaccggcaccgaattcgtgagatggatagagttgtaatatctgatgacccttcatgagttagtcatcgtaactacatcgagtcttagcctctctgcctggcagcaacacctcttgcacctcgttgtgtctgcgtagttttgtcttagtggacgacgggaggtacgagcctgagaatatcagtagttggtcatccctacatggagttggctggccaaatctgagattttagggtgagcgtgagtacggtgagtgtttcaagaccgtatgtgttcatcctctgccttcttcgggcgatcgaggatgtaggtcttccgacaaagaccatcttgacgtttggccagaccctgacaggctgtcaggcaactttccttcttttttgtttgcacaggctcttctctttacaggattgcattggcggccactgtgcatggttctttctttcctcagctctcaatgaaagcaccaaaa

SEQ ID NO: 24823 - DNA, 2253 bp, Cannabis sativa
  modified_base (1410)..(1415): a, c, t, g, unknown or other
aacaacactttacatcttaattatccaagaaggttattacctttttaaaggattttccattctatgaatcacggtgcaggtgttttgatattttcactcctgcacagcaaaaaatactaaagaagtatcgggacgataatttcgcaccaaaaaagctgatatacaatgaaagaagggccataggtaaatgcccattgactccagaagaggtaattctttcatgtatcgttttggatgacggtttagctgttgagccaagttcatgtttcaaaatcaaagtcatctctttaccttgggtcttttttatctgcaggttggccttattttacgtgcattgggcttcgacaattcgaccaggatatacctagcagccggtgaactattcggcggtgagaagttcatgaaaccatttcgctctctattccctcaccttgagaaccacaattcggtggaacaaacagacgagctagcaggaaacacccaaggattattaggatctgccgtggattacatggtatgtctcttatcagacattttcatgcctacatatgatggtccaagcaacttcgccaacaacctccttggacaccgtttgtactatggtttccgaaccaccctcagacccgacaggaaaggtcttgctccaatctttatcgatcgggaaaatgggaagacagcaggttttgaagaagctgttaagaaagtcatgctccaaacaaactttggcgggccacacaaacggatcccacccgaatctttctacaccaatccctggccagaatgtttctgtcagatgtcaccaaagaatccagctgataaatgtcccccaaacaatgtcctcgagattcttaacgaccagcttgaaagtcagaacgagaaagaattgaggaatgatacagaatcctcgaacgtattaaattcttcggtatctgctgaagaaagatgaacactttgcaatcgaaattattgggtgattaaaatattatgatacttctgaacccttgaaccaaactgaaaaggaatgggttttgaaaagcttgctcagcattcaggtaaacttttttctctgaagaatgtcttaaaagttagttaggctatatttggaagttgtaatttggtgggaaagaaaaatgtggtaaataaaaataacaaagtaaatattttttcgtgtttggtatggaaaattttattgaattaattcttttttctatatattttttctttaagtaatgtgcggggtaaacatctaaggttaattctcggttgcagattaatacttaaatttaatttttgacagtaataatatgtaagttatatttctagaacttccgtaggtacctaatcgttatgtgtcaagtcattatcaacgtgtcattttcttgtttgtatgtttaaattaatttttaaatnnnnnntaaaaatttaatgacttggaccagttagagactgtcacttggccattgacttcacgtaacggctaagtacttatggaaattctaaaaatataatttaagtattattactgttaaaaattaaattaagtttttatctgcaaccggaagttaaatttcagtatttatgtcgcaaattactttttttctttcatcactaaatataagatttttttatgccgtttttttttccttatattttttaaaccctattaaaatccaacttccaaacatagttttacataattttgtggtgtaattaagcgaatttgtgcttgaaaaatctgttacttttgtacaggtaatgagggatgtgaagtattattattatagaggaatatagtacatgattaggcagatactaactgaagaagaagtgcagaagaactatatttgattattactgcaaatttgttgtgtttgtttttttgtgtattacatttagtttaccaaatctcttgtcattgttaaattagagtctcttaaaccacactattttgtagctttgtattttagtacactatttgttgtgttccttatataacacggttgaattacttgtacttagtatgtttcaagtcccatgagaatgtatgagaatagtttgatagagattgctataaggcaacatgtggctatagtggcatttggcttccaatttcaatgtttgttgttctttttaccttaattgtttggataatatggcagctaataagattgagagtcctgtataattttttgttataatttttatggaatattgttaaccaatcaaaatgtgtcactttcagatggtgttaaa

SEQ ID NO: 24824 - DNA, 3996 bp, Cannabis sativa
taatttttaacggtaaagataacagaacttaacagaaggggtataattatgtaaatgttatattttagggagaatttttaacaagacatatattttaaagggcaaaactaagtagtgtcgaaagttcagggagcaaatatgctaattattctaatttttaaaacatgatatttatgttatgaaaaaaaaaaatatatcacacaaaacatcaatccaacccaactgcatagcttgcaacaataatgaagtcttataatgtctcagcaaatgaaactgtagacaataacaataataacaatgtgatacttaaaaaaaaatctttttaatttgaaaatatatgtaaaataacatagtaaaataatgataataataatagagaatatggttcatttttctgttattttgagtgttgcagataaatggggaagaaaatgatagtaataaaattacacaatgttgcattgattcaaatgttatgttatgggtttgagttgctcttatacttttcccatagatattctatctccctcctctcccttttctttccctaacacaagtgacccttttattttctttacttatcacagtcataattatacttatcaatgaagctaaagaaaaacaaaaaaaagatgaaaacacaaaattttgcagtaaaagttagttacattaacataaattgcaaaacaagtagtggggagaactcaaaggaaataaaaacaccaacatcatagaggtttaacaacaaagcagcaacagaaccaaaagtacagtagtagtgatcaataaagcacataaccaaaccgacactttcaactcaaatcactttaggagtgtcttcactattgacttcacattgagctttttcagatctgtgtaggactgcccgcacccgacaaacatcaccggagctccagagatgtaaaccattgacagtgcagctccaacctgcaaaagtatcacctctgttattatctgaattattcagatgattcaattgttcgaagagaaaaatcgttttaccttatcatcaattgtatcaaacttggtgagcaaaattccatctatcaattgggagttaggcgaagtcgacaggtctgctagtttctgcaaagaacagcaaagaagaattgtttcaacattgtaagtattttgaaagggccacaatttgagtagacccgagaaaataacgaaagaatgtttacaaattcaaacctgattgaacttggaaagctgatcaactgcatcatttccaaccagtgcctccccaacaaacaagactaggtctggattgttaaggttaatgagttttgacagcgccctcattagcggttcattatcctataaaaataatataacaaattaatcagattaaaactggcagcaacaatgcatatgaagtaacaatcaccaacttgaatcatgttatggctatcatgatattttaaactacagtacctgcattctaccagctgtatcaacaagaaccacatcagaaccattgcgtgtagcttcttggatagcttcctttgcaacaactgcaggatctttttcataccccttctcaaaaatagggatctgatcacagaagttaattacaagttcatcaatgtccacactaaaaacatggtgcacgcatgatgagacaaaagcatcctgtaaaatgccaacaatcgtgtaaacattattacctgaagtctgcgtgcatgagttcgcagctgctcaacagctccagaacggaatgtatcacaggcagccatcataacgctcacattatgctgttggagccaataagcaacctgaaaagttcaacaatgccaatcagattaagaaggcatgcctttaatcataaagctaagtaggcaaaagaaaaaacaaattagcagccaaaccttggctaagttggtagattttccaactccattgacaccaacaaaaacaacaacatatggcctcctttgttccttagcagcatgaacatctcttagtatatcaattgaacgcttaggagttagaatacgaacaagagcatcttccattgctgcctgtagtcagtatcaaacttaacattagtcacacatgtaacaacaattgaaagaaaagaaaaaacaagtaacatcattcgatgaagaaaattcacaaacctgcacggttgaagatatcctcgtgaaagaggccaactttttaccaacaagacttgcagcaactgattcacaaagcttctcagctatctcctcagcctagacataccacatcacataatagattatacctcacatcatcatcaagaacatgtagtcataaactatatattatacctccattaataatggctacaagaacagagagaacataccacattcttggtcatcagcctatccttgagagctttcaaagcaggttccaagtctgacttgtccaaattcgccttgccagcaatactgacatcaagaaccaaatttagatgagaagctaaacatgataaggaaccccaaatttactttggggtattagcaaaactgtgttgtgcccttttagaaagatatcatgctctatggataaattaaaagctaaatcaaacatcatataaatcacataaagaaatatcagaaaagaaatctacctctggaacatagatgaaaaccaccccttcttcttagcatcaggcttgctaacttttccctcatcttcctcctcttcactctcactttcactactaaattcctcttctttatccatcatactttcaccttgatctgctgccacaacctctacaatattgtcctcattctcacccacaggatcagtatagtccaatttttcctgacgaggtgaatcatcccaaactctatttttctttgttgcctttttcttgggctcagccttagggaccttgttagaaacattatctatttttttcacacctttacttttaagcttctgtagcttatttacatcaaaagccccaatattagagctcgtattttctttaccattaacatgaccattcaccttggtctcttctgtgtcaacatgattaccattggagataccattctccaatctacgaccttttgaaccatttccatcttccccaccattagctgaaccatcacttgttttcttacttcctccatcagatttttgcacctgcccttgctttttattattaatcaaaggcttgcctactggcttagatttcttcatttcttcagctcgagcttcagcttcctttctaagctgcctaaaagtttcatcaaagtcattgtagactgttcgtttaggatcataaatctctgcaaactcacgcttcaccattgaaagcaattcgtccacatacaagaggtggaggatccgttgatacacagcaacaaagacaaggtcaagctcattatggaaagtccatttaagtgtataagcagctcctggaccatcatagttgtaagatgcagcacctgaacgttcctccaaaagacatgaccgaatcaaagtgtcaattggagacccttttagtgcattgccaagctccttacatgtccagaggattagccctcctctggtaaatatcaacagctgctctaacatcttactattaccgaataccctgtaaaatcatatacaatcaacagtcaaacccaaatcacaattaactaaatatatatttaaaaattatgatttcgaatacccatcaaaattagcggttctaaattagcgattccaattcaaacagatgaaaataacccttcttgcaaatcaattgaaatcgatcaaatgtgaaaattaaactaagctaagatttctttcgcactttaacaaagttatatataaaaaaaaaaccctttgatcaagcatctcacgaaagttagattatgttagatcaaagctaaaaaaacaataaaaaatcaaattgggaaaccaaacaattacatatgaaaataaatatcaatcaacgaaagagattattataattatatatattgattgatgatttacgaa

SEQ ID NO: 24825 - DNA, 4764 bp, Cannabis sativa
  modified_base (2932)..(2943): a, c, t, g, unknown or other
  modified_base (4446)..(4457): a, c, t, g, unknown or other
  modified_base (4696)..(4702): a, c, t, g, unknown or other
tttacactaggggtgaacattcaggcaggtattgagtttcaagaatgtttgggtttaggtcaggcccagtcctgggttaaggcgtgttaagcccgtgtttagggcccactcaaacccaatattcaaaatttttatacagtatatttttttgtattgaaaaaaatagtattttttataattttttgtaaaaagaggctcaataatactctcattttactttagataaaacatacactcaacaaattttttgagcccattattactcaaggtcggccctggttcaggtatttgatttcaggcatgggaaaagcattatcgaatcctgcggatggaacttgaacatgcggaactcggatgggtatggagcacgcccagacatggcctaaattcaacactcaaactcgatcatatatgtaaccaattacacccaaacctacccttttattttgcctttgttttttttctctgagtttctcgaagcgggtgctagggttaggcagatataacgagtttcgggcaatatgtgtagtcctattttacatttcatcaagaaaagaattaaaacattttgtttagaatacatatcacgaattattgtaaattccacatttattttactatattgttaatgccgattttgaaaaatagtgggtcataagagaaaagatatttgtagactcttatttagagaaaaatatagtatttttcaaaattaataaaaaaaaatgtataattttaaaagaaaattttttataggcccctgaattaggtgggctctagacacaagcctaactcgcctaaacattgccattgccataattgtacttatcatttagtataatttatttatattaaatgaatattaataaatattagagttaggcacaagcctagttcgtctatcatttaatattaataaatattaaatgaatattataattgttattaacttttgattttgtacttatatatacattggagcacaaattcaactacaatttacaccattgattgaaaataatcttactctatatatgtcacttggcaaaacgtatacaaaatctcaactgaaaaaataaccacttcatttccaataccttattttactcaacaaacacaaagcatgaaacattacattcacggaaggttatacacaaaacatgtcacataattattattttctcttcaaaattttcaaatttaaatctatatataataagatcaataaccaaaccaaaatttaagtaccatataaaccattctagctatcaaattaatgaagatgacaatgaaaaaagtttcacaaacactacacttagcattgctcattttggccataaccaacattatggcctcattagagggcatcaagagttgtgacatgacaagtttccaaccatgtgccctagagattatgggcatgatactctctaatgcaccaataagctcatcttgttgtgaagccatgattggcatggttaataccacttgtgataccattgttccttctaattggtttgctcaagccctacaattttgctctagcgccccaatagtgccaccgttcccaccgttgccaccatcctcacaccatccttctggcgattgtcgtagaggaatagttcatctctttccttgttataggcaaatcgaggctaattttcatggattaggtcagataagctcgagttgttgtcatactattgttcgagtgtctcaagcatgtaacactacaataacttcatcttcatcatcttcgtcttcacattcttatgttgatcgtcttgttaagtattgtaagacttaatagtaactattatgttataatttttaggttggtaattttttagtatggaataaactgtccacaatgctagtgaggttgttttttgttttttttttttataaatttttcttttattaatgatgtttctaattattattatcttcaatcaattactcattatgctaatatatatatctataatattttttaatattccaaataattgatacttaagaattatttggtattattgtcacaaatagaaaataattacttaagcttgaaaattttgcactccaaaaatttttagcatttttttttaatttagtgaaatatttatgcttttttgataacaaaatagttatggttttttttttttttacactcatattatatttatgagaattgttattgggtatcagctcagcagcactttttataaatagcttcttacgattagttagtgattttttttaaaagttattttaataatttatatatgactgaatatttaattataccaatagcaatataacacagatgaaagtattaagtaccagtagtatcttttagcatttctcttattgagcattattattagacaataaacactaatagtactcaacattttttataagtagcaattattcacgattaattatgaaatgatattcactagaactctaatagagttattgattatagtaaatagttatgttttaacttattaattttctgataataagatgccacatggcaaaatgtacataaaagctaatatataagtccttgatctatgatcatttttaagtttacatgtaataaaactaaaactttttaagtttaattattaatcatcatgcactaaaagactccctttaccacgtaacatttttcatatatatagacgattctagaaaattatagagatgattttggtttagattgttttttctttattgatttatttatcctttattatttttattcctattttactttataatattctttataagataccctcaaaattcaaacttttatgtaatactatacttttaagtgggcacaacctaaactttgtttctctgatcaacaacaaaccataaaaaaactcttaacacaatcaaaaaaaaaaaaaaaaannnnnnnnnnnnatttctttttcatattctttttttctttccaaataagaaataatattcttcttttaactctcttttgaacaaacaattgctcatcaccaaataaataaaagaaaagagaaaaaatataacaacaataacggttattaatttgcggcaattaatccccatatattttaatttttatatttaatctcttatttttttagtggcaaaactcctttgtatttacctttttctacaaatttgaattgttagcttattattacttttaaatataaattaaattattattatcttgacttcgaaattttactttaactcatgtacaaactacacaatcggtatctattttgatattcaatatttaaatatataaaaataaaaacataaaaaaatttaccgtcaattactcaaacaataataataattatttgaattttcagattgttgaagtagttccaagtccaaccatatatattgataaaaattatttataaaaaataaaataaaaaaaaagtctaaaaggatgcttgaaaattaaataaagcacaaagattaataaattgtatatatatatataaaaaattataattaaatgaaaaaaataaaataaaatagaaatcatataaacaaaaaatctagaagaaaaaacttattagaataacttttattttatttattctaataaacaagagtaatacatgcataattacatgcttaaagaagattattagtgacaaagtaactaattaattaaaattgatgtggccataagaaagctcccatagcaaagtttctcttatcatcaagagaacccttaagagtgataccatattcttttaagagcaaatccaatctccattcttccattttctcataatcttctttcttgtaatttggatagtgaagaggcaattggaacccatttgggtattcttctttactatttaataccacttctggactttttcccatcacttgtgtaaatccaaaattcaataaccactttagtggcattttttctaaagaaagaaaagaagaagaagaagaagaagaagaagaaatgaattttttttattttgtataaggaaagctattgtggtatacaagtatatttatagggtttcaatatgtgtaatttaatgttgtatgaaaatatctttgtagcatgttggttggggagttttaaatgttgtttgttgttagtcattttttgatagttgaaatataactagtttgcattaaattaagttggatagttggatcatcctcatttgtttggctcttaattgaacacttgttctttcaaaaacaaaacaaaaaagaaagttagttggagttggagagatttttgtttttgttttctttccatcgagtaattagaattgagtttaagaatcattaagtttagggatttttacaaaaatactagattttgggtaaaaatttacaattttactgtcatacagaatttttataaaaatactatctttttataaaacaaccgtaaannnnnnnnnnnnaacaattaaaacaacagtagaacaactaaaacataaccgtgaaacaaccgtaaaaacttaacatagtacacagcataaaacttgcacaaatatttttgaaaacaaatttactccacagtaaaaaaataaaaagattaaaaatttcagtatgtaatgtaaaaaccccttaaatttaatgtgtttgtttaactaatgtggcgttcgataatacttttgtttttaaattttttaatcacaannnnnnnagtaaaatttttgtttttaataaaattttatttttgaaaaacaaaaatgtattctatgacca

SEQ ID NO: 24826 - DNA, 2706 bp, Cannabis sativa
  modified_base (1384)..(1389): a, c, t, g, unknown or other
gcctttgtatggagcaaagaggtgaacgcctcacacaggtgaggcgcctcttaatctgactgaggcgtaaaaatcaccgaataaaaaattcatttgtgagcttcttttatataggcccaaaatgatgttagtttggtttttcagcttaagttacttaatccctccagttaaataacttagcaagcccaataaaactcaaaactaattttaaaaaaataagaaaagccaactaaaaaccctaaaaatagattgcagtcgatcccctctcctccctcctccctcaatagtgactttcagacttcatagaacataacaaaaaatgaaaaatataagtctgttgccttccatagctgaaggctgaagcttcttcttctttccagcatagctgaagcttcattctatagaaggagagttaaactttattttggtttgaattttatgagatattttatggtttgtttgagttttatgagacactttatggtacgattgagttttataatatctcatccttgatatttttaagtgctctaaaaatatttttcaattaaatatttgaggcttacgcctcgtctcacaaaaagagaacactttaaagcttaaatacattattttaaacattgatcctcccttcatcaacttactccctctcccccatcctttaaccactttctcaatcctctacactcatcttcatagtgtatcctccctttctcaactcactccctctccccccactctctattcactttcccaacctctacactcattatcaaactgatatttatatcagttgatgaaaagcccagtgggaaagaaaaaaaaacatgttggttcagtgtctatatcctcactctctctctttcacgctctcttccatagttcacattctccctattttaccctcctcactatttatattctctatcctccctctctccatactatctcctcacttctcactcattctctccctccctctcttcactttctctcattgctcactccacttactttcatccatgctttcccttccctttctctcaatcactcttcactcctttcccactctctctccctctcctttaccactagcattttcatgtctccctctctccattttttattttcaataccgttagaggcttatctttttctaaatttcactattcctctctccttccctcacaagtttctcttattctttatttcactcctccctccctcaagagtttctcttattatctattttactactcccacccatcatccctcctccctcaaaactttctattgttttttctatttcactactccctcactcctccctccctacttatcttcatagtttctctatcatcgccctttctctttcacgttctcnnnnnnaccctcaccctcaccctcaccctcaccctcaccctctcgctccctctccctctccctctccctctccctctccctctccctctctctctctctctccacttctacaatctgtacaagtttcttttattctttatttcactactccttccctccctcactcacaagtttctcctattctttatttcactactccctccctcacacatttctcttaaatttttatttcactattcctccctccctcacaaatctctcttattctttatttctgtccctgggctccccccctctcttttttaaaaaacaaaatggccccactcattcaaggcatttgtcacaatctttaaaattgcgaatttaagcctcgaggcttctttctttttctttcgtgaggcacgcattgaagtgtaaacctcaaatatttaattataataatattttaaaagcatctaacaatatcattgataattaatgtctaataaatatcaaacatagaaatatctcaaactcaaacataacatcaaacgtctaataaaacttagacattctgctaccctagaacaaatttcttttcagcaatgatggcatgatgaagcttcagctagaaaaaaggaaagagctggaaccgaagaaagcttcagcaggggaggaagcttcgacgctttttctttattttttccattttcttctctaatgatgccactgaaggttgagggtaatggctcaatttatttcaaaccctagctgatatgttttgagcgtttttaaaaaaaatatttatgttttatgcttttattgggctttatttaagttaaaacttcagggggccttctatgttaaaaacattaggggctgtttggcttcataacttaaaactgttttcagtttttaaaaacagaaaatagtttttaaaaactaataggggttgtttggcaaaattttttaaaaacaattttttttgtctaacatattatattttaaatttttactcacatactcggatcctagacccggacccgaatgggttaaaattatagtatggtgttaaaatattgatttttttagtaagaaaaaaattaaaaatagttttaaaaaacttgtgccaaacaccattaagagcttgtttggctgtttttcagttttcagtttttaaaagtcagaatagaaaatagttttttgtaattttataaatttaatggtgtttgccacaagttatttaaaactatttttaatttttttcttacgaaaaaaaaattaatattttagcaccataccatgacattaacccatccgggtctaggtttgggtatggtttcg

SEQ ID NO: 24827 - DNA, 1362 bp, Cannabis sativa
atggatcaatcaggtacacatacctaattattatatcttattattgtgttctatgttatatacaaattgatcttggggtttatattaatttttctaacatatacttcacaactgaaatgtggagaaagacttacgaaccaatgatacatccaatacctgatgaatctatgtggattagaaatgattatgattatgagcctttgttgcccccaataattaaaaaccaaccaggtaggccaaaaaaataccgcagaaagagagtggctggagaagaaagggttgtaaagccagtttctagtacaaagaggtgcaaaaaatgtaaccaacttggtcataacagtcgttcatgcagcatgacaccgctcatgaaagagccaacaactccaacttcacctacaagacgaggcaacggaagaggaagtgaacaaggcaagggactaagcaaggatcaagctacaacttttgatgcaccaccaatgacaagttctgaaccggttaacaaaaagagaggcaggggagaccacgtggtagaggtcatggaagaatacattatacaacaaatcaggtaatcttttttaaaatctacgtcaatgtttataaaatatacaagatgagtgtttttaattactttcttattttaggaaaattatcaacctcaagaaagtattgaagaacatactttaaagaatgcagaggagcttaatatacatggagcaccctcggatcttttccagtcacaacctacccaatgaagtttgtggagttgccaaatttagtgtcttttgatttatatgtttgtagtgaaaaatgtaggtttattaggattacatgtttgattagtgcgttggacgctaaaaattagcaagcttacgtgttttggttagtgcttttgacactaaaagttagcaaacttacatgttttggttagtactttaaacactaaaatgtagcagatttatgtgttttttttaaaggtttatgtagcaggtttatgtgttttgagcaagaatacccaaaaggtaaaaaaatatatttggtttttaagttatttttatttatttgtttaaaatatagaaaatatattagctattaaaaaaatttagttaaaattaatagttggactaaaattgggttataatattatttaaaacaaaatatagagtttaattgatcatttttataaaatataagattcaaaatggtaattttaattttttattttatttttataagttatataaaatatatatttaaaaaattaaataaaaatgaaaatgaaaatctggggtcattttggtcatattcaaaaaaaagtttgaccataattgagctgagggtccaattatgtgttatttataaaaa

SEQ ID NO: 24828 - DNA, 6731 bp, Cannabis sativa
gtggggtgtgaaagaaacaagaaataaactttatctttcttcataggagcatgtgtgtttgcctcagatatttggagccgtaggcttttgtaaggaaggtaaatggaatatagctcttatgaaaaagtatattttggctctcacttcgaagcaagataatctttgggttaagtggatcaatgccattgatctcaaggagaatgatttttgggagttcactcccaaggtggacctaagttggtacttcaaaaagcttactaagttgagaagtactatagaagaagcatggtgactgaggctgggattagtgggaagtttatggtaaaaaaagttacaatttacttttgcattgtgaaaagattaacaactacaaggctaattggagaaaacaaatttttccaaataactgttttattttattgcaagccttcaatgagtatcttctaactagagactagctaattaaatttatgcccctaatttcctcttgttgtcctatttgttttcaaggagaagattcataatcaccttttctttgagtgtgtttactctcagattttgattgaactagtttggtcagttttactggcctttaatcaatgcaaattgggtagagtggttttctaaacctatcactagtttcgtgtggaaattgattgtattgactattgcagtagcggtgtattttatctggtataacatgagtctttgttactttgatactaaatatgtcaagtttgctagcaacttgatttgtcaaattgttcaagatagaattgatctatgtacgaaaactagcctgtgtagtagagaatgaaaagtgattgagtctataaagttcaatgtattagcttagtaatgctgttgttttgttgtagcttgtttggtaattttttttaatgcactgcaacaagagaagagaagaaaaacacaggctgtagttacacaaagatagagagaaatcatactctcatggtgaagtccttatcacgctgaagtgcatccctagcattttggtgagcttctctgttatcagttctagggatatgctgtagggaggcattagggaaataggataaggactcacggatcaactccacaaggattgaaagagcagatttatccttccatttgcttcgaacattggttactagttgagagcaattagacataatcaaacttggttgaagatcaattgcagcacaccaattgaggccttccaggagggcttgagcttcagcaaagaggggtgttgaagcacctagttttggaatggagaagtctgcaatcgcttggttgtggcaatttttaatagttgctccaaggcctgtttataagcttcgtaatccaaagcaacttccacacttaagctaaaacttccaggggaaagggcatggtgagggtggtgtttccaggggatccatgcttattccttgtgtcctgtgttcttgggtctgcatttaattgccgagcttccttgtaatcctgcattaagctaataacaaaatccccacatcaattttattagtatgatgattaataaatagagcattattccttctattccaaatatgccagagaatactgattagtaatgtgaaactttctttgttaaggtgatctagtccttgaagaaaaaagtccttggtgttacaattttgattattggcataaaatattttaagagaagagttcttccaaacagtcttagcctttggacattctagtagagcgtgggagacggtttcaaccttactcttacaatgatggcagtggggatcattgagggattttttatggaatagattaagggaaaaggggaggatgtgatggaaagctttccaagaaaagtgttttatctttaggagaattcgcaggttccaaacaaatttctaccaatgctttaagctgtttgagtttgaggttgagggagaaacaatgttactagcagtataagctagatgataggtcaaatcaacagttaggataccagaatggtgatacccccaaataaggctatcttaaagtgaagggtcgctgggggtcttgaggatggcattggcttggtattcaggaaaataatgtaaaagtttatctttattccaagtgttatcaaggtttatgaaaaagaaacagtgtaatcagaggggttaaggccatgtaagaaagtaagcgagtacaggggaggaacccagttacaagcattcagagggatgaagctgcctttgcccacattccaaataaggttcattaaatctcttccccaaaggagacttctctaggtaatagaagagttatgtcccttgggagtagtaaggaagtcattgtttttaaaatatctagctctaaggatggaatgaagaagtgaagcaggatttgtccaaatcctccacgattgcttagcaagaagcgcttaattatggctagttaaagttcaaaatcccagaccaccgaagaatttagaaacagaaagggcagaccacttcttccaataatttttttcttatcatttgaagcagacccccaccagaattcggatatcatttgttgcatggtatgacaagttgctttgaggaagtttaaaacaggacatggcataagacgagattgcttgaatcacaactttaatgagaatttccttgcctgccttagagaagaatttaccattccaaacattcatcttagaagaaaaactttgaataaggtagtgaaagactgaattatgcattctttccacacaatggggaacccccaaatatttgcttatgaactcctcactgtttagccccaaaagatgttctgcagtgattttgagactcagtttgagtgtttggggagaaaaggatagaagattggccaggttaacatgctgaccagtagctttacgataagtattgatgatgtccataatagccacactagatcgcttggtaacagaggtgaaaagaatattgtcatcagcaaaaagaagatgggaaacaatgggagctcccctacaaattcgaataccagagtaatcattgttgagctcactcttacaaatcgcagcagagagtccctcagccactaaaagtaaaaaataaagagacaaagggtcttcctatttaattctcctaaaggaggagaaggtgtcagaaatgttcccaccaatcgagatgcgatagttaacaaaagagatacatttcatgacaagggagatgaacctaggggggaagccaatatataaataatatcttttagaaagctcaactcaaccctatcaaaagcattttccatgtcaagcttaagggtagcctaacaaattttacctttcttctttaaatgaacaacatggattagctcattggcaatcaggatattatcaaaaatgagtctaccagtaggaaaagcactttgattgcaagaaatgatggtgcggagaacaaatttgatcctatttgccaaaacctattagacaactttatacatagtagtgcacatgctaataggttaaaaatcacggagggttgaggctttcttcttttttggaattaacactaggatagtttcatttataagagagatttccatattattattgagaacatccaggatggctctactaaaatcatgccctagagtgttccaattcttctactagaagaaagcattgagcccataagttcctggtgctttgtcccctgataggctaaacagggcatgcctaacctcctcttgggtaaaaggggtttccaaaaataggacttaggaatgtgagaggtgactacagattctccagagaatattggcggttgcatccgtatcaacaccctgggaacaaaaaagttaagaatagaaagtcacaaaatgggaaaggatggtgggagttcccttagcaggggatccattctcaagggtaatagttctaatgaaggctattttcctacgggtagaagctttgtggttgaagaatttagtattcttaccgccagatttaagccaatcaacatgagatctttgttttcaataaatcttattttgtagagaaggttgtccagggtagattggagagctttagtttgggacataatgctctcattcagttgattgatgctgggcaggatgtctaattcgttttgagttttagaaattctgtcttttagggggtcttgagacaaactccatctgtgaatcgcattgatatatgaagtttgtttagagataaagaaattgagtgaagggagatttgaagcaggagtagagtcagacccagaggaatcaagaataaagaaaaagtctttatttgtgagccagtggttctcgaaaacaaagttattccttttctcgcagtcccttaaatggtcctccaggatgacttgaagggccctatggtcagagccataaaaaccaagatgggagagggatgcgaaaggaaaaagagaatttcagtggctattcacaatgcaccagtcaaagcgttcaaggagatttccatgcttccaagtaaatttattaccagagtgtgatagtggcaataaatcatacttgtgcaagaaagagtgaaaatcaagcattgaatgggaagggggaggggtagccgagttcctatcactgatagataaataatcattaaaatcacctataataaaccagggcatgaagggagcagtgtcatgaattctatctatgaaagtccaagtaataaatttggaagaagaataaggagacccataataataactaagagagaaagttaaaacatgaacatcaataatattgttccaaaataacaaaaggcctcccgtaaacctctcattggcacttcaaaaatattatcaaaaattaaacagttcttaaaacgagttccatggccagactggagcttagtttccatgataaaaagcaaaatgggtcgatactgtttgttcggtgattgttttcgaaaattaatttttcttttaatcttaattttttttctttggctcaaattctttccttccataattccattaatttttcactcagcttttgtttttttttttttttgaaagcactcagcttttgttatttatcccgttaagtcagtgtctgattgctttgtttgtttgtagataatcattcatagaatttaaatttaaaataataaaagcttatgatagagacttgtatcttcaaacatcttaggtggaagagacaggtcttgtcatttgtcaagctcccttggtgccatcttatatttgagctgctaaagtctaaactatgtaacatgaatgatgatgtgtacgaagctgctattttttttttttttttccttattcttgcattcaattactttgctaaaaaagaaaaaaaaaattataaataaatgtgaagaaaaaaaatgttacatttaatgcgatatttatagttattataattttgctctaccacataatcacacttaatgctatttaataaattatatattttaaaaaatatttagtagatatattggattattaaatgattcctggtgatgtgtgtgttcttttatacattcatgactctattattttattttagtgtgtttgtctcaagtttttgtgtattttttccataacataacatgaatcaactcattatatattcattcaatctttaatattcatctttacaatctttttcagcaccaatcttcgcctgaccattaactaattacaaaattatagagcatcaaaagttgtaataagttctggaactctcactactataaaaagtacattttgcgtcggtcaacgcgtctcaacaaaatggttaaccgaggtagaaaataaagagagcttttatgcttcagagtgtgcctgaagctaaaaaataacaattagcgtcggctggtaccccgattaaaaaatataaccgaggtaaaatgtgacaatttaaaaaattatcttttgcattttgcatcagtggaaaattgaagccaatctcttttgattcgattaaaaattgaggttaatatatttgtcacggttgtgcaccgaagcaaaaagggtaatgcatttgtaaaactcaaattttacaatgtgtaattttattttcacgcatcccccaattcaaaaccctagcagaccaacagacccatccccaaaacctagtcgtgccagccactgtccgccgccgcccaccgtcattccccactgtcggtatgcacctctgaaattctctctctcagacccatcctcactttccaatacgcgcactgtccagcagacgcatccccgaaaccatagccatgatgatgagatttcatctttagagttctcattttcaaagccacaaaatctccagtacataatgaaaaaaaaaaagaaaaaaaaaaagagaagatattagagcagagtgcgtgagagagaaagaggaaaagttgaaagaattggagagagattgtcactactacaaatataaaaattcacgacggtcctaaaaacgattttttttttcggggaccatcgctaaaaaattacgtaactatttaaaaccgtcgggaaaaatttagtatccccgacggtttaaaatcatagtaaacaaaataggcgacgttttttaatagaatacgaatttataatgggacccttatacccgacgatttaaatctgtcgggtacagtataggcgacggtttaaaaccatcacctatagtataggcgacgatggttttaaaccgtcacctataagggtccattaaaaaattatcacctacttctcgccacattt

SEQ ID NO: 24829 - DNA, 2995 bp, Cannabis sativa
  modified_base (284)..(287): a, c, t, g, unknown or other
atgaataggtatatctcttacccttctattctcaaaatcttgatttatctcatcttctattgaaaaagaattacaactctattgcaatataatattagagctaaaatattaattaaataaatgttacaacgtatatatatatacattatatatcgtatgttatatatatagaagaaaaatagaagaagaatatgcataaaatacattatctaacaaatatgtataacaagagaagaatatatgtatactctcactcacaaccttgagtgtagattagtagggannnncatgacttgaacaaggtattatcacatttttctaaaagtttatttccccttatctctaagcactaagggaactctaaaagaaatagctttagaaattaccaagccttaggattttctagtaaatttttttttttttttttggatagaaaattaggtcatctcaatatgagcaccttagacttctttgtttagtagtgtttagttaggatatcaccattccatttaaaattctaactcataacctcccatggaggttaaggactcaataaatgagtataaagctcattctcctaaaactataactcctatagcttttaagagtttcaaattatgatgtgtaacaccttttacactcttaatattagtgatgattgcctagcttggtgagaagcttggagagaaggaaggtagttatggcagcaacgcttgctgccttggtgtatctaatttggaaggctagaaacatgaagttttggcagcaaaaggaggagaatttgaatgtccttatacaacaattaaaaattacttgtaaaaataaaatacatagtgtatggcctgacaaagtaactctagaagatttatcaatggtttaacacattgtgaatttgtgaattgtatagaaactttttcaggctcttgattaaagagtgttgtttaggatgtaaaaatacaaagtttattggaataatgaagaatacttgctgatttctcaaaaaaatattagtgatgattgtgaatgtgttattcatagtatcaagtaactcctcatatattacaaaataatgacaatttttcatacactcacttattagtatgttacaaatatttaatctatataatattaacattgtaatgacctcagacctatgcataccagctaactttctctcccattgaatttaatccaccataaccaaatcggatagtgtatcgacattgtagcaggctagcagctgatgttctatcataaatctcttcatcacctcttttactcttaacaatttgtcgccaatacaaacttccttgacttgtggattcatacatccaccaattgttgatttttatatagacattgtgtactcatttcactcaaagattattttatttctaagccacaatccgcatatacttttctaaattcgtttgattctattgaaccagtttcctgaagcctaagcctccctcactcttgggtttgcaaagattaatccaagagacatagctcgggcctccatgttcagcctcactttgccaaaaaaaacacaacaaattgcatttactttcttcaaaacttgtttggacaacaacatatttgaacccagtatacatatatgaaaccaagacacaattgaaagattacgtctctatttttagttcttaaagaaattataactaatattttcttatatgattgtgtattatgtagttatagtaaacattcaacctgcttctaaaaaacttagaataatttataaagtgttcgtatataatgtttaaacattcggtttgcacgcatgtaactgaatatatgaattatgtttattatttaaaaaaattcaaaaacaaataaaatacctattataaatataatataaactgtcatataaaaaataaattatattttcttaaaataataaaaacatgaataactaagaacaaaattattatctctattataatctttatatatacacaacaataaaagcaataatatacaataatagcagtaatatactagatatacatgaatatgctttcatataagatatacaacaatatatataaattgagttgttttttaaagaacaaaatcaacaaaaataaaatggaaaagcaatactacctcatcttatcgcaatccattgtcaaccaccatatccatctcgaccggtctcacagccctttagaccacctcactgcatgtgaagtctcactacagtatatatcttataaatttataatataacaaacataagcttacattacaatatacaacatatagaaatcagttagaaccaaactataggaataaaatataattaaggcgaagagagtaacaataccgatgtggaaatggggagaaacgagcgagtatatggatcactgtaaagagatagttcacgacgatttagggtttacattgatgaaaatgaaatgtcatgaacgaactcattatttatagtgatctaaaagcgttattggatcaccgtcgtgataaagctcaaaatccacgctaatttctccttagtgacagtgcttaatcaaggcaaaagagcaatgtgtatgtaattgcacaaatttaagttattcagcgtcgatttctctatcagcagtggttatagcaccaacaactttcttcagagttattgtcaattatatatcgttgttatagctcggtccaactcaatagtgtcggttttaacatacagctagtgttgtgacgctaaaacccatttttctagtactaaacctaatttgagccttatcgaggcaaattggaaaccaactatattacaacaatattgaaccatatgaagtgatgtcaagccgattaagctgcttatcgagcttttacccaaacaaaatcaaaattttcatacagagcaacctaaacaaaaagttccaaaaaacacattcaaaaagtaaaatcgcatacaacacaatgaacaaaaatcaaatcaaagaataaaattacaaaaaaaaaaaaa

SEQ ID NO: 24830 - DNA, 5865 bp, Cannabis sativa
  modified_base (1710)..(1731): a, c, t, g, unknown or other
  modified_base (1815)..(1816): a, c, t, g, unknown or other
  modified_base (3547)..(3547): a, c, t, g, unknown or other
taaaaatataaaataaaaaactttaaatgaaagaaatataaattttttacaaaaattagtatttatgtaattatctctaatatttattttttttacacttacaattaaataaaatacatataaaaataataaaaaaaaaattatagctaagcactaaaacaaagataactcttagttacatttagttaatcattattcatgaggtaaatatttgagctatgttagttcatctattagatgtactttttttaactttttttaactcttaggtattttttaccctttgtagctattttacattagctattgtaagtgctcttagtttgtattttaaaatttatgaactcaaattaggtccagaatcgtgatcagggacatggatagggttggggtttgggattgagatcagggtcgatgtctagggctagaattcgagtttgagtttggattcaagatgagggtctagttcctttgtctaggtctagattcggggttcaaggttagaatctatgtacaagacttaggtctaggctcgaagtcaatgtttaatttgataaaagttgttgatataagtttatacccaatgtaaaattatattaaaataatactatataatataatataataccaaacggcccaaaatattatatcaaattagtacatacatgtgatggataagataattttaatacattattaattatttttcatgaaacgtttttcattaaaaaaaaaaaaagaagtttttttaatagctattaattttgtgctatggtagaggactctaaaatgttttccaaattataattattttttaaaaaattgaaaataatcaattggagaatttttattattatttttttggcaaaatttacaaaattatgacttttttaagaaaaaaattattttatgagaaaacatcaaaaataaaacaaacaaatgagaaaacaatgtggagtaattggtaactggtaatcaattactttatactattttccccatattttttattttttatttttttattttttctataaaataactttttttaaaaaatatatatatttttacacaaattgtataaaaacccatgtgtaattttttaccatcatcatatattcttttttcttttgtagttgtcactcattagtaattagaaacaaagtgagaacaaaatgactcctcaatcaaatatttttccaataattttgtttcaaaataaattaatttttttatcatttgtttaatgctgttaactaattatattatgttgttttcactttgtttaatgttttttattttgttatcatttatttaatgttatttaatattttatcattgtttaatgttatttaattattatattatgttgctgtcatttttgtttatttctatattattttagttttttttttttatcaaatgtaacttttaagatggtaataaatgctacgtttgattttatatataaaaaaaattgtaacttttaaggtttttgttagaaagaaaatatagaaataataacaggtttttctttttaatattcaacttatatacattataaaataaggtaaatactattttggattactggattacgtaatttacaaaagatatgaattggattctctgttttgttaaatgacaaaatatatcctatatttttcaaaatagtaaaaataagaccatgagcttaattttcaataattnnnnnnnnnnnnnnnnnnnnnnttaagataatttttaacacgaatagatactgaaaatgtaactagttttgtcataacatctctagattagattattattaagttnnattttgataaaaaatcagttcatgatcttatttgtacaattttagaaaatacagaatcaattttgtcctttaataaaatagaaggtccatttagtaacttttacaaaatacagaatctaaaatgatatttacccttataaatacagtcttgaattttagtgaattatagaaaaaaaaaattaatctctattcaaaaaatagtattttttaaaatcaataaaaaaaaaatatttgtatttttaaaagtaaatttttttaaatttgtaagttataaccacagatccaacccacccatacgagccaacttgaatagacactattgtgagatagccaaataattgagaggtaaaaagtaaaaggataatattacacgagttgaaacttcaaatcttatcttgggtaggaatgacaacttatatgatacgaaaaatgacttgaaaatataattaaaaaataataataaaaaaatctaaggaaaataactctttgtgataatgaaaggacaccatgttattgaactcaaaaaaaaaaaaaaaaaaaaagacaccatgtcattcagatatatttttggaattttttattttttttttgaaattatattttttggaaagttggacccatagtataataatgaatattcaggtgaccactagaattgaagaagatgacgtggcacttagatctggatgtgtttcaatctttattatagtccttggatttttcattattgccaatttgtttgtggtccatcttatctaaatatctaatttaaccccttcttcttacattccaatcaaaacattttcgctacatttttccaaaacccattaccaaattgagaattattgcttgtgtttggttagtggtaatgatataaagacaaatgaaaagaaattaatttagatttcatttattaatttatttgtattttaggtatgtttacttgtgagattaaaaaagggaaataagaaaggaattcatttgcttgtttatttctctaatttagttaaagaaatatgtgaatctcccactaatttggattaaaaaataagattggtaatcccataagattgatggattgtcactctcattctttttaaaataatgaaatatcatttttctaattactttttcaactaaagaaaattaaaaaaaaaatccaaatgaaactttaataaataatatttttgtaacctaaataatatattacgattccaacaatccatcattggaatatgcttattttgattccgattcctgtaattcaagtaaacgacatattataattctgactcatcaatttaattgagagtgaattcgattcttaatcattctgattacatgtaagtaaacgcactaatgcaagatgaaaaaaaaatgatttttttttattaatccttattatagaaagagggagaaagaaaatgaaaggaaaaaaggtgagagaatgaaagttgttgtaatttgtgatttttcttatttcctctttgatttttttatgttagattttttattattattattatttgaatctttgttggctggaagatgaactcgagaataatttatttttattcataattttctatttaaaatcaaatttgtactcaaggaaatactctttttttagtgtaacgtaatgatattttacaatcatatattagcttgatagcttaaaggtcttgggttcgaacccatgacctctcttttttcccatccctccctcaccantaagctagccttagtggcttaactcaaggaaattctttggataagccctacatagtttgttaagttctaccaagttttaatttatgataggattttaataatttaataaatgctatgttgagtgtgattatataaaaataaaaagaaaatcaagagttttggtattttttttattagattaaaggctcatttgtcacctttttttatggatgttaataactttggatagaattattatattttgccttaaaggctccttaatatgttactaatttttattataaggaatttattatttttttgatgtacttgttgtgtaactagattagccatgaacgaagctatggatggtcctctgaaagactttgaagataaagaaactagtcccatacaaagtgatcactatgagtcatggatgtgtgccctgagggctcgaggccagcgctttgtcaacagtgaaccacctatcatgaatatgagataggtgggaaggattgtggatgttgttaaacgatcccggattagaaggaatattgatgaagacttcgctacgacctccttattagaaggtcgggagaaggatgaggaactatgttaggaaaataacttagctaactcgaaagctaatgtcacaccaacggagttgccttcaatccaaactgccactgtcgatttgtcattgccacgagatatgccctatgatatgttgcggacaccccactactgcaagtaacccgtgcagtggaggtagactcgagtactgccactctcccaattgtggtggaaagtcaatcaaaatctcttgctttggtaactaaatcattggtgcgtgttggaattaaacctattgacaagggaaaggtcattgtacaatctgaactggaagttggtaaactactcaagaagacttttgaacctattgtcaaagcttaacataagaagacttggaagtggcacaaatcaacaccagttatgctgagtactagcagtaaacctcctagtctgtcacatacgactcaattaactaaagattcaactctcggtcgtttatttgccagattgaagcggacacgtgataataatatttgtgtggaggttagaagagtaaaattgaactctggttcgggtgtgtctcctatggtgtttaatgaattgatggcgtagtctgtagtccccatgagtatcctatgttggaatgtttgggttttgggaaactctagtgcattaacggctctgtgagctattgttcgtaagtcttctcccagtttagtctttctgaccaagactaaactgtgtggtgtatgggtagaaggtgttcgatgacaaatacattttaggaatagttttcatgttgattgctctggtagtagtggtgggttattgttaatttggaatgatgattgggatgttgagattaagtcttactcgattggtcgtattgatgctctagtaacgtctctgggtcttccacaatggaggtttttactggcgtttatggtaatttgaaaattcatctttagaaagattcctagcagctcctacaaataattaaggtatttttttcaagtttcttagatttgtggggggaatttcaatgaaattttatctcttattgagaagaatgagggagtggatcgtaatattggtgctatgaatgaatttcaaaaagttcttgatcactatggcttcgatgacttgggttatgagtgtcctagttttgcatggttgaataaataaaatggcctggctcatgtagaggaaaggttagactagtttgtctgtaaccaagcttggcatgaattattctaaattgttttagttatttatggtgagtttactaattctgatcatcgtcctattagggccaagttagataatgtgattgcacgacaagtcggccccaaaaaaaataagttcagatttgaagctcattagctaaaagatgatgagtgtcgtcatattattgctcaaacttggcaacataatagggctgagttggatagtgtgtcaggccttattgataatttgacaagatgtgccacgaatctgacatattggagtaatcaaaaatttgggtctctccatagacaggtcaacaaacccaaaaaaagcttaagaagttagttagtgttgtggcttcgactgttgatatggaagaggtgaggcgtgtggagattaagcttgaagaccttatcgatcgtagaattatactagaaacaacactcacattctaagtggatgataactggtgatgggagcactaagtatttccataacagggcatctacaagaaagaaaatgtaaagaccgcttagttt

SEQ ID NO: 24831 - DNA, 3754 bp, Cannabis sativa
  modified_base (1613)..(1622): a, c, t, g, unknown or other
tatttatttatttcttatatatttgatactaattaatttttttattttttttattttttttattttgtagttttctatcatggtaagatggaaacaagttaaatatattttttcttgtgatgtttataacgttttattgtttagatatctctctatgcacttaggatatataaacaatataaacttttttaaatataagaaaatcctccaatttttaagtattttaatcttttatacccttacaatatacatatacataatctcataattaatgataaatatatggattcataaaaaataaaataaaaactaactattacatatgcattattataggccatcttttactaaaattccaccacaaagaatattctttattattattttataacacaaattaataaaatattatgtattttcgatgtttttttagatttgttagttcttgcaaagttattttgcgctctgtgaatggtattgcacatggcacttcttctattactagtttcatatgagattgtatttagacaaatgtccgtctatatttcattaatttttctgtaacagttgatttaatttaatgaaattttacttcctttaaaaaaataataataaatgctagggtgccattatagcaccacttaattttgttacaatgttgttcggtttgagagaattttaacacaatttttattgtttaattttgcagttccataaatggagttgcccttatatataggactatatggctcttggttttcaacaataataagaataataaagggatgtatataaataatataagtccagtgttttggtagatctcctatttgttttgtcatcaaaaaaaaaaaaattagtttaattttactgctgaaaataagatttatatattttgttgtacgtacaattattttttttttatactcatgataaataattgtttaaattttattttcgacattataaattattcagaattatttaaaaaattataagtgatcttaaataattacaactatgcgatcataatacaaaaatagactaaaaatattttttaaatacaaaaatagatagaaagtttacataacacaatccttcaaagggtctaaaattttcaataatataattaaataataacctttcaataaatcaatgatcactaatccatttcaaaaagagaaataaaaaaaatcaactaataaatggatcaatcttctcatgttaagagtgaacatgcaaagtggtcccttatccctactactctttttatttttcattttttaattttttatttttaaggttcacattgccatattactaaaagtcaacttaagagaggcacattcaacattgccatacaaaaattgctagtgaaaaaaaaaatagaaataaatagtaaaggtattggaaaaagaaagacataaattaggcattattatataattgttaattataacatatataattaaaataagagtgttgtcattttttttcataataaagtgcttaaatgtaacggaatttttaatttatcggtattttttaatctttattttaattttaacaaaatatactattatttaacataatattttttattaattttatannnnnnnnnnatatatttaaaaataaaaattatccagatattttatataaaaaaatttaaatttaaaatacttaaatattatagatatttttaatcacatttttaattattttggtttaactttgaataaaataagaaataattctactcaattggttcaccgtgatatctcacttgatttttattttacatataaaatacgtatatatataatcacatctaaatgatataccaatgaaaaaaattctcaaatatcacattacttaattaaaaaaaaaaaaaaaaatcatgtattacattaacatcatctaattaaacctaattaaaaaaaaaacgaattatactttagtgtattgtattgtacgtaacatcaacctaatatacataaatattctaatcacaagagaacaaacaaaaagttgttctttttttttttttttgacgtgacaagaaattcacattttaacaacaatgataccattttttcaccttatattaattattttttctataatatattttatttggttgatgtcaccatagtatgtcttatatgttaaattcaaatcaatatagaaaagtcataaataaatgagaaaatttggggaaattatgttgaatcagcagacaaaaattaattaattactataacattatactttgattaattacatataataaattttttaatgtatttaattatgtattatatacaaaaattaatgaaatttccaatgaaggggaccatattaaacaggactgtttaaagattggatttggaatttgatgcaatcaatgaagattattgacttaactatttaattataaatttttaatatatgattgatataaacaaagtatatatatatatattcttttaaatgagtttaattgactttttaagataaatttagtagcaaatgaatggttcttgcaaaattatatattaatttaaaggctttgtttagattgtattcttatttgtaacgaataattgagatgtacaatgttgttgtaaaacaggccatttaaaataaatgaataaataaaaataaatgggagctagactcggacttgagtacaggtcgcacttgtacttgaagtccacctagtttagtggctcaaaataagtctttaccttttaaaattatacatttcttactgtttttaaaaaataccacagtttgttttgaataagggctcgaaaataatttttttcttatatcccactaaatttcaagactggccttgatggaagcgtagcttaatcgaaaaatttgaaacgataatttgagtaaaaccctaagagcactctcaatggctcttttaaaatagagaaaaaataccttctaacaaataatgtaaactctttctctattttaaagcatctcaattttctttaaatgcttcttgcctctacatgtagataagctttattcatcctttaaacatatttcaataatattttattctattttttattatatatattaaaaaatatattatttaaatgatgtgaagaagatataaaaaaaaaatagagaagctgatatatgatgtattgtaaaagtgtgatataaaataaaaaaaagtggtgttttagtgatttgtttaaaaaataaagtaaataagttgtttggaatgctttagggtgtgtttggaaattataattaaaggtagttatgtatataatttaacatgtttgtacgaccatataattataagtataattagtggtaatcaaagaattctggttacactctttaattcttgaatgaaagaaaaccccccacgaattgtgctacatttgttatctttgcaattttaatattttatcggttctctctaaaataatatgaattctcagaaaaatattaaacaattgtaaaacaacaaaacagaacaattaaaacaagagtgtaacaactaaaaaataaccgtaaaaatttaacacattacacaatataaaacttacataatagtgtttttaagaaaatacagtatttttgaagaaaaaaaattctgccccacaatcaaagaataaaaaagttagaaatttcgtgtaaaaatccttagagataagttgaaaaatgccttttttttttttgtattcattagtcaaaaataccctcatattatttt

SEQ ID NO: 24832 - DNA, 1259 bp, Cannabis sativa
tgcgggaacccgcccttattggggcggggacgatggttattttttgtctttaaatgttaaattgggcggagacgggaatgacactccctgccccgacagggatccgtttatttattaattatcttcttattaatattttatattttataatgtgtttgtatttttgtagtatattatgtcatttttataactttttaagttgtatttttgtataataattaatatattaaataataaataatgtgtaatatattttaatttttatataattttatacatttcatttttaaataaactttattttatattagggaattctttgccccatttccgatgggaaataagcgaggataaaaattaaatccttaacaggaatgggaacggaagagtactccttgcaaatttctcgcctcatgtatattcctaatagtaaaagagagataagagagaaataatgaaaaaatttcatattgagcatcaatgctctttcatattttttattagaaaaataaaagaaaacttgtgattgactaaaaataaaagtgggtcaagtgaggtcaattggacaactatttttaattgacctcattaaaaatactcttaagatgtctaatactatattggcgcgagtagttaatggatttctatattatttattagatcaaaaattgtgaaccctatattaatgtacactaataataatatatcattttttgtgatgcttgacatcataaggcactcctagtatttcttttttttttttaattgcgaaagttgatttaactataaaaaatggaaccaatttattatgatattaaaagtattatttctttggtgggttttcattttatttctagtattattagatttctttttacaaaattttacaaaaatacaattttttttcaatacaaaaaagtttactgtataaaaagttccacgtggaccttaataagtacgggtctagcccaccttagcgtagagtctgagcttgcgtacggggcccgatatattttattatttggtaataattaaagacataggaggtccgaagtttaaaattcaaaaggaggataattcttatgtcttcgtttattttagaataattaaatatgatatatttgtagtagtgaaaaaatatattgttataaacaattcaaatatcttactattataaaagtgtcataataatgtgataattgtaatgacaagtttctccttggtgaaatcaataaaatgtgatagaaagacaattttgc

SEQ ID NO: 24833 - DNA, 3470 bp, Cannabis sativa
  modified_base (42)..(49): a, c, t, g, unknown or other
taattaataaataagttaaatggcaattttatttaataattnnnnnnnnttattaaataaatagatttgacatttaaatgtttaaaattataatatagtatttatgaaagaaaagataaattgttaaaataaaatagtaaaattataactagtggggtccaactattcataagtctattctgtcaaaaaattgaaaagagaggctcctctctaatttttgagttctctcctctctctaaatttcgtccttatagtgataagagtacattctcactcttatcaaatcaatcatagtagggaagattatgaaaaatttcaacacctgaaagagatacaggtttagatcttgttattactctccggctgaaaggaataaggattagagctctgaatggaaaaaaaaaactataatatttcgttgctaccaatgtaaagttttctagaattttatatgtgtttatttcattattttaaaaaatttatatttagggtgttagattataaaatgtaatcaaacatacttgttaataaatttaaattttaataaaacaacttccaacactaaacaccaatggtgcattgtaataatgctataaaaaataatagtttaacaaaatatgaaaataggcttaccattcaaaaaatttataacaaaggaacaaatacccttaaaattaataaaattaatgacacttaatttttaaaataaatataagatttaccaaacctaatccttaatgttaaatataaaatcacataatctcattggataaatacatatatatgtagcatgatgcaaaaacatataatgttcaatttttacatatataaaagataatattgcaaaattagatctttgcttatttttctcttccggattatttattcaagttgtcaatttggttggaagctttaaaagagcgttaaagttaaaagtgaaggaaaaatagaagtgatgttttctgtgtacgtaacagtgtaatgcatgtattgtatagtggaaagcaatacggcaaataatagtttgatgcaaagaaataaatactttccaagtttggtttttctggttatgaaatagtcccgtgtctgaatctccatttgatcagatctttattgtataatccttctccccttggattagccatattggcacattttgggaggcacctcacaagtgaccacaaataatatttctactccgctctaatttctcacaaattccatgttacaatttagcaatgaaaagtaataccagaagaatattaaataatagtacataaacacaaatgtgtagtgctgagctgaacaagctcctcgactgcaactgcaaaggctagttaaaagcttaaatcttaataaaagagttcagtggtgcacatttcttaaaccataatcctatttagttaagtacttacattgcataatcgattgtattatattgtgtcaaaatatcaataatagttcaattcaaagaatgtagtcacacattacaaatttgaaagcctgcctggatatcaaccacagttatttatgctaccaaaacaactgatagagattattgagtgaagaaatgaatgataaagaataaaaaagtaatcattcaatggaaaataataatgtataaaaattggcatcatatatacaattctaaatgattcaaaagaaagataaaaagaacctggtgtatcaaaattcagtcggagaccccaaaacatcttgtagagtgaaaccctgaattgggcatccgaacccatcgagaaggccctcgaaaagctcatcgtcatccctgaaactcattccatcatccatatcctcatccacttccctaccattcaatattggcgtcttccccttctcgcttcgatcaccatcgtccattaccgccggcatgtgcccctcgaacagagccatgtgaccgaagagcttgtccttccgcgagaaggtggtcccgcacgtgcatcgccaccgaacctctccgcaattctttatatggcttttcaagtccgccagaactgagaatttcttcttgttgcaacgattacaggagtacatcttcgggcaatggctccgccggaagtgattcttggcacagatagctgattttagaggccggaacttcttgtgagtcttgttccgattgcagccgacgtgagggcaggagaaccggaccggacctttccgatccggttcggtgattcgttcagccggtttgctcaaagcctctggagtcttgtactggttaccgtgcgccctcatgtgcatcctcaaattcgcatctcgcttaaatcctttcccacagatctcacaaaaatggatatgttcggcgagcaattcgactgaatcgagctcgacgacctcgaagtctccgtcaccaccgtcaatttcttcttccttcttcgtttccccctcgaaggactctgctttcacatctacgattggcttggaaacatcggaagcagcggcagcggcgattgggacctgagataaagcaataagcgccgaaccgtcgttgattacctgttgaatggcggagaagatctctgtggataccatagtcatctggccaaagctgagagaagcgttggcgttgaccgattccgataagaatcgatgtacagattccattctctcttggaccgagaaaagattcgcaagatggagttgaggattcgaattcacaaacggaacctggtgagtaaaatcgcctgaaaattcgtccggaatatgaatgggttcgccgggaaatgacatgattattcccaagcggttgtaagagaacagtacagtatacgagtgtggttaaaacgactgcgtattgtgtcacgtgtatggatatagaatgagagtgagaagttaaccttatcatatagggagagagaagttaatatataaggagactgagataactagtaactacactagttaaacctcccatggtgtttcggacgacgaggtctttgtctttacttttaacaaatattttattataaaatgtggtttccaacaaaaacagaggcttgttttttttatttaaataatagtaataacatttttcatggggcagagagagacagcagggaaaaagagtagtagcttccatggatatgaaatccgagaaagagtacttactcaattttgattacttctttaattatttttactgtgaatagtacatatggttgaaagatgagtgttcttgttgtataacaagacatggacagtctaaagatcgaccaacattcatgtatttaccaaaaacaaaacaaacattcgtgtatttaggggctgcgcgcgcggacagttaaattgagcgcgttgaaatttaaatggcaatgacatcatattaaatttaaagcataatacgtaagtgtgttaaaaatatttatcaccaaaatataaatattttattttatttaatttttttaagcaacttttgacatattctattttaaaatattgtaaagtaagta

SEQ ID NO: 24834 - DNA, 4937 bp, Cannabis sativa
tgcaattttatttggtcttgttgactgggaagaacagttgcctagatcaagcggcagagattgctttactccctttatttgatggatgtcttggtgaaatagagattccaggtatgtaatgtttgctttttcatgttttgataaatgtcatagcttgaataaatgatgatttattggtccaaaaagcatttctagttgttggtagaatttgatatttaaatggcatcttaaagattcaataactcatatgatagttcagcaggtgctaggatatgccacgtggcagtttttttcctctgtctttgtcaaagttaatcggactagtgtaaattagatatcgactaaagaaaattgtaaatgagaaatttctcttctgagttctgacctcgctgtagtattctttgtaatggagttgtgttgccatagggcttaagtttatggctatgtgatgtgaatggtttggtgacatcctccctttcatatgcagatactatattgaaacaaattggttatgagaattacatgaaggttgccacttgtgactattcaaaactatatttccattgccaagagtttggacgctttgctaggtgagttttttgttatcccatgcttgaattgatatgattatgtaaacattgttctttttctgcaggtgtctaagaattcaaaataatatatgtggtagagaaatttctgtaagttacttatcccatatatgtatagtcatgaatctatactaggcaaatattgtttaatttttattttgttgaaaaatagtacgttgtagataaagccctttcttaaatcaaagaagctcaaggagtgtggaacttttcttcaaaacatcttgtgaacatcattgaatgcattttgtctttcaaaacattttcttcatttcgagtgtagtgtcttccatattataccatagcataagttcatgcaggagtagaatcaggatgtgtgtgtgtagttgtgtgtttcttctgtacttattctcttgagtttttaaaattatggtagtcaatcttacaccccttattttaaatatgctacagcatttattgagaaactgtaagttgcagagcttggtactttggtggatcagatccaaagagcaagtaagttcaattctttctttttctttactttaataacaaaggtcaaaacaaatatgcattgtatgcatacctggtctgtaatgaggccatgtgtaattttaatgcagatataaagtcatgttatgaaatttctgcagtagtaagtaggatactatttaatcgagaaatgaaacagttcattcattcattcattcatgatgcagccaatattaaacacttgtgtcactatcctatgtatcgcctttgaatttatgaaaatcatgttgagttttcatgtactatggaaagtgctgattcaatcaaatggcctgcactataggttggtggattatgtgaacttctaaaccagaatagtgaaagtttatcttcacttgagtttgctcactgcaagctctcttcagcttccattgatgaaatttttgttctttagcggtgaacaacgtgccaacacatgtgttacagagcttctcaattactacatcgacttttcttgaaaaaaatctcgattctttacctcttggacttgtatcgtttctgtcatcacggtacataagttattccctgtatgatatttgaaaataggtagtccttatgatacataatatttccttaaaatattaactgtgtcacctatcttgttttataaatgtataatatatatgcatcggatttgagcgggcatgtcttcagcttatcaagctctatctctttccaactttccaggaatgcatataattattgtaaagtgttagctttatataactatgggagttgagctacattggcacatatataactatgtgtaaaatttactacttttcttctcaggtctttgtattcattaaaattaccttataattacctaggccggaacttcgccaaaatgatttttaacactcttcgtgatgcttcatctggtctctctgttctcgacctttctgagaacaatgtgagatttgcctttcaatgaaattcgagatttagtattgtgtccttgtacaattgaataacatgaggctttacaattatgcagataagcggttggctttctgagtttattccaagattctcgagcagtggtccgatgttgttaggatttggcaagtccttgcaatcattacgcgagctcaatataaggtacctttttgtgtgtgtgtgtttgcttgtgtaacattaattaatacaacgtcactcatctgattttaggggaaacgatctagacgaagatgatgcacttgggcttagatatgctatggttcacatgccccacttggagagtcttgatataagcgataatccaatcgaggatggcggaattaggtcagttggaatttcgatttcctttaaaattttgagctttgtgggtgcagagtctcacaagttattaaatgttcagaaatttacttccctatttcgtcgaagcttctgaaaaatgctctccattcaaggatttatatttagagaattgtgatatttccaatggtggagttcttgagctcatcaatacactttcaaccctcaagaaaccactggagtgtctatctattgctgacaatgtcctcggcaggtatgtcaaacattttgcttaaaaattgcaccttttttttatttcctaaaggcaagttcggtttacagtttctatttgccagccaagtggcagcagcattgggaaatttgttgtccacatcaattcaaacacttcacattagtggcattggattgggttcacctgggtttgaggacctagagaaaagcataacacaaacacaggagctgaagctagtggagattagcataaggttcaaacattttctgttattctatttcaattggttatgtagttcatggcataaaattgattcttataatttttttccattgcatcatggatagcaaaaaccgtggtgggattgcaacagcgaattttttgtctacactcatgttacgggctccaaaactcgaatctgtcaatgcagcgtataattggatgccagttgaagcctcttatatcgtatgctctgccattaaagctgcaaaaggtaaatatttactaccgtgaaacttttagctgcgactatgttagtgaacatttagtttttctgtgaccgaaaatctttctactgcacttgcaccgagttgaactcatttcacattacttcaacaaaagaaaatcttctatttctttcaaaactttccagctgagctcgtgtagactcgcttttattatgaactcgacccttggaaatttaagcatttgcactggctatctaacaggcaatcttggatttttaaatttgaggggaaataatttggacggtctgacaactcacgggcttactgaaattcaacaggctggaagacctgttttgaatatttcatcattacccatcttaagtgcacgccatgacgatgatccatagatggcctctccctcagatacacatacgaacatattgtaaaattagtctgtgtatactctgttcactaaattgacatcgcgatatactgaaatcataggttttggtgtgtcatttttgtttttcgatactcgttttactccattagcgccttagtttatccagcagcatacatcatccatgtaagtgtgttttcaacaagatcaaaactcgcactggattgaactcatgttagatgattgatcgttaagtaaccacttttggctataaaatataatttatatgtattccatgctctacttgtctctgttgttatcacttagtcttatttgaagctcacttttacttgttgattttaagttgatcatgcaaaatccattgttgcccttatgctgtgtatgatcctaattttttgtggggattttttccttttttatttaattaaaaaataataatagtaaaagttttgtcagtattaacttatcaatcaattataagggggaagtaaattttgatgcctgccctctgagctgtcatggtgcttccaggtacaggccaattctttttcttcagaaattactgatctctgcaaatccttatagccctttagatcactctttctctctctctttttactttgttattttctggaaactgaaaagggtcatcatgatttggctgactggttctgcacttttacagctagaatctacactttcccacatgttatggtgtttaaactagcctaaaacaggtaaagaaaatggcatccatcttcatcaattgtggcatgtctgtgtttatattcatgtattatttgatttgattaggataataagtaggcaaaaagcccaaaaggggttttcttcttttttcacttcatgttttctctttttttatacacatgctgaggctgaaaggttagattttgccactaatggcctacttaatctgccttgctgtaaagattaagactagttttattttctcatgtaaattcctaagggtgatactttgatgagtaatactactattggtgtaatttagtatcagatttcacatattttaatttaagagtaatttacggcataaatatttaagttaaactctcagttgtagactagatatatacttgagttatatttctagaatttctgtaagtacctagcgattaagtgtcaactattattcacgtgtcatttttttatgatatatttaaattaatttttaaataaaagataaaaatttaatgactttgaccaatcagggactaccacgtggtcattgacttgataggtcaaatacgtataaaagttttgaaatataacttagatattattattgtcaaaaattaaacttaaagtatttatagtataaattactcttaatttaataatta

SEQ ID NO: 24835 - DNA, 2481 bp, Cannabis sativa
caattatacttctatgaattaactctttttctcaaaacaaaaacaaattacttagaagaatagtcttcatgaagtgaggctaaaatttaagacaattgcctataacttgatccaaagaagaataggccagaagccatgcatatatacatagtcaaaaacaagtacaaaatcagcagattacatattttaacaatagcataagcagagaatctctattacagttccaacctaactgaaaataatttctaatgcaatacatttcagtataattactaatttgggcaaaaaataatacatatatgcaataggttaataattattttgggcaatacatttcagtataattacttgagcaaaaaaatacaggtatgcttatgatgctcaatgcccatgcaactttcccaacactattattaaggtaacaccattaataaataattttatcatctctatctatatcatatcaaatattattatgtgaaaattacctattatcattattattattattattgacttatttttactactagaaacaaaatgtggttatagtagaagtagtagaagcttagccaataccttacaagaattggctcggttcaaggaggcaagagacccttttgtggaagagttctttctgttatatcaatttgtgtttaagtagcatgtgacaatgttgaaaaagttgaagaaaaaaagagaaaacttgataagaaactgaaatctctctagacttggaggaaggtatcgaatgttattttcaaggtatcattgttttggtgttgattttcacagttgtggcagctgctattgatgcaccagctgttgatacaaccatgtttggtgcattggctgtcttgataggctcggttgggaaatggtgtaatgtgctttaaaatcggtatgagaatactattaaaggacaggagagcattaactagctcaatgcaagttaaaaattttgctacaatcaaagatttggagaacaataggttacttgttaacaagttggaaattgtgattgagtaactgatgcttaatttactttcacttaagacgatgctttaaagatcattatagacgagatcaagaagaagctgaaagtgtttactgaaaccactgagagcttaacttaacaaaatgagaagtgtattaaagaaataacaatggcaatggagagtgcccatacaaagaataataaatcaatcatcaaactgaatgtttctttgcaaatcgaattttgcaaatttaatacacttgtaaggtaaaaatttcaaatctaatacaaaatattagagacaaactaagcctaaattttttcaatgaatttaggatacaaaataatgttttggtgttaacaagatatttccaaattcagaaactcatcactctgatcagcttcacaaaacatattgaatgaaaaatatttgagttttctatttaagttgaattttagctttagatttttgattttggccatctggattatttcttagcatctgagtttttaagatcttaacgaattaactaccacactcatttcatatgatcactacaagacaattatacttctatgaattaatttttttccaaaacaaaaacaaaacacttagaagaatagacttgaagtgaggctagtctaagacaatagcctataacttgatccaaagaagaataggccagaagccatacatacatataggggtgttcataaaaactgaaaaactgaaatcaaccatcaaattgaccgtaccgtaactgaattttcggttccacatcatcaccgaatttggcggtcaatttcggttacagtttttttgacatggcggtcagttttggtttttaaaataaaaaatggttaaactaaaaaactgtcaaaaattgcaataaattgccaaaaactgtccaaaactgccaaaaaccgtctaaaattgcccaatcgaaaaaccactaaaaactgccaaaaattgtaccatcggttttatacggttataatttctaaacagttggttactattttcgtaaaataaaaaccgtaacttagcggtcgattataaaaaccactaactgaccgattttcacccctacatacatacagagtcaaaaacaagtacgaaaccagttgattacataattttaaaataacataagcagagagtctcagttaaaattacaacctaatagaaaataatttccaatgcaatatatttcaacacatattaactctacaaattaaaattaatcgattatgctatttaaaaaaacatatgtttatagaatatatataatacctgtcaagagaagggaagatcaatgattggagactgtggaggaagaggaagcgaaggggagagagagtccgacaaagaaaagacatagagaaggaggcgaaggactagtttgaaatcatagaaggaaggaggtagagtgttagaatagaaagttagttagtgatgcaactgatttctgttatttctgttt

SEQ ID NO: 24836 - DNA, 1348 bp, Cannabis sativa
gtctataagatttgagcaaagttgcgctcattaaaaacaaagaaaaaatcccagatatacatatatattgtccagatcttagtttgaaagtcaagtacacatggcttgcactgcagtagtagtgggtggtaatttggtatatttgaatcctccaactcagaaagttcacagcatcaaaccaatattcattctatcatgataggtagaacattttcaagaaattagatgcctcattccttggtcataatacttttccatcttcagcaatttgtcactgcaactacacccacttatattttgtcttcttccaaattgtaatgtctttggattttaataaccaaagggtttctctctatttttgttttgcaaaagaaagttaaattatggaagaatatttctcgtacaagaaagtctgtataccattgcatagtagctctttgaatggactaaaatttggtccttgaactaaaattgaccaaattgttatataactcagacagatgaaaaataatatgctaaaaaacaccaatgaacacccttctacgtgtaaatatcgttattggtccaaataagtatatagtttaatacaataacttttaaagaatatcactagccaatcgcaagacaatacatctaaaaggtgctaggcaccactagtacccaatagcaatgctcacacatatatatcatactaggctgaagttacgtgcaattgtatacttaattttttttttttaataatatattattaacttttaattattataataaacgatgtcatacataatttaattaataaacatgtcaataagaaaaatgtttaatataaattataaacataaaatataattgttgtgatgcttctaatctttgttacacctcaatttgaattcttaaatttctaagagtttagctaatttataaataaaattttcacgtcattgtgtagcatgcaaaagtaaaaatgtgtttgaagtagtcctcaacctcatctcacttgctcgcatgagccttctctagttagtgttagaattattataatggactaatacaattataagtttaattctataataattatgtgttagaggcacatgagagcacccttaatattatagttggcccattaaattatagtacaccataaaagaccccataagcccaattggttaataaccccttaggattataagggcaataacatgtatatatatagatggttatgtatggtaaagcggtgagatggttttgtgtagtaaaaggcaaaagggttgctccacaagtgttctctccaaaacttttgctcaaagatcttggcggtgatggctctcatggatggcatatgagg

SEQ ID NO: 24837 - DNA, 8294 bp, Cannabis sativa
  modified_base (8120)..(8136): a, c, t, g, unknown or other
  modified_base (8234)..(8251): a, c, t, g, unknown or other
tatatttttgtgttttaattttttttcttatataactctatttagttattatttagaatataacttttcaattaaaatataatttatttagttttaagtgtattgttatattattgcatttgtaaactgctatcgctgtttcaaaagaaaaaatttgctatcggtgagtttatatttttagtagaaaaaaatgccatttcaagatgataatgtgacattattgggcgttagacaaacatatagaataagactatggtaggacttaggaaaagtttcttatcagtaggggacttttttttaccattaattttaaatcttatagttattatgatataaggtgtatactcttattatataactatttgtttacaattaaaattttatacatattataataatatttaatgatattaattttaaaaaataaaatgatattaataattaaaaaattcattaatttttaattttaattattactattatttttttaaaaagttaatttgaattgtttttatataagtatttatttttaaaataaaatgaggagaaatatagtaacatgtaaattttaaatttaaatatagagctaataaggctaatattttttataaaaagtacactcacgactaactcaagtggccataagagattgcgtgtgtgttggaattagtatatctactattttagttggtgagagagaagaccaccaccaacccattcaaacttcaaaccttgtgctaatatagataatatatgcatgttctttacttgaacttcccagctgcttctcccaaatattcaaacccaacatgttgaattcccttcccctctctctacttcaaacatgcattgaaataattgtggtttcttagtaaagcttactctagctgactacaacttaattttcaaaatacatataattaattgacactaccattagacaatgagctattctggctcgttttgagattttagcagtccacatggcttgacaaagcatgctctaccgttagacgatgagctattctggttcgaggaggttcgagcgccggtggcggacatttgcgtcgtaaattcgtgagtgattctaatcactttgtcaaaaaaaattaacactacattttcaaaaataaaaaattaacactagctagtaataattctttcagagatgttagagaatgatgcacaaaataaaaaataataataaataaactttctctccccacatttagtcaaaattgcatagactagaaacagttgaatggtacattttccacatgcattgaatctcttataaatcacaattacacacacataatatatatataaatatatttgaccaaaacataacatgcatatatttcaaaacatgtctgctaagaaatgtaagaagaaaatcttttaagcagccccgtgaaaatgatcaagaagtaaacttttgcacacgatgtacacgcatgcatatacgtacgtacacagaatatatacagtaacatatatacaaactaggagacaaagaacatttccaaaaaaaaaaaaaaactaggagacaaagcgagggtgtacatgaattcaatgtgaatattaatataaaatagataattgttcaaaaacaaatactctagataagaaagcaaaagagttcttgcaaacacgtgtagttttgaccaattagatagaaaataaatcggttttgtcacgtatatataaggatagggccggtcttgaatttaaataggctataggaaaaaaaaaaaaataaacctttaataaatattatttttaaaaattattaaaaaaatatatatttttaaaagataattgtttatttgggccctttaaaatgcaaacttaggccggacgttgtataaacattactaggcagtacgcgagtatttattatcgtaaccttttatatttagatagcgatttaatttttattaaaataaaataaatgaatcttgatgttaaattacactaatattaatattttacaaaatattataagtattgtaggtattttttttaatatttttctatatatatatatgaatttataaatatatatataagttagtatatatgtggctccatatatatgaatgtactatatttcagataaaaaaaaataggaatgtattataaagacttcaaaattatttttttaaaattaaactaagaaccataattcaaccattgaagaaaagtataccagcaggaaaactgaagtttggtcaaaaccaaccaagaataattataatagtagtaataatagtaatataatggattagattgtccaattactttaagatttgccgaaacttcctctagttacctcaaaattattgtaattttattacccataaatacacttaataatatatatttaattatttataatatatcactaaattacgtgccgtttacgacatcgagtgtaggataaggaatatataggtcccatggtttagccatcgctctattaagccgccgccttattgtctttaatttcaatcaaaaatctcccccaccttattatactcacctatcatatatatacatttgtgcacattttttattattattatttaaaataaatattttttttaaggaaaataaatataattatatacagtgtatataaaaactactatatcacaccctttcttaagctaccgccacaaatatatctctctttctctctctctagctatagttttagattatggaaaacaattacctatctaaatttcttccatttccaacaaattcttcatcaccatcttcttcttcgtccttgtcattaagtacagctgtggatattaatctccataacaatagtaataatcaagctggttacaataatattaagtcttcttcatcaaatgatgataataataatattggattcttggggctgatgtcagagatggagatcccagctacctccaataatgatcatcatgatcagtttcagattcagagctctaataatattaatgctcaccatggtcaggttatgaaattggagaagagaaaaggagatcaaaatagtaataagaaagcaagaaagcctaggtatgcttttcagaccagaagccaagttgatattcttgatgatggctatagatggaggaagtacggtcaaaaggccgtcaagaacaacaaattcccaaggtatattcatatttttctgaatttattttaaaaaaatatatatagacatattgcaatagatttgggaatatatattaggtgggaaaaaaaaaagaattcgattaggacgtatgtaatttatgttttcagatatatactatactctcgaatgaagcaataataatttcataccacaaataaattttgattcatttttttttttcaataatgaactttgattaattttgtgataatataatatctatattttttattattattaattaattaaatttgattatataactagcgccagtagtcatggcggagggatcgatcaatatatatataaaatctttatgctttgcgatgcctaattcttattcttaagattttcattacaaaatatgttgttatgattaattatatatatacaaccatgataatataattgataaagataagaatggaaaactgtttttgttaataattgtattaagctactgttttagatatagttttagctactatacactccattgatcgtacagatattctgtaaagaaattaagattttaaaaagaggacaattaaaatggtgtaatatagtattaattaatggcctaattaaagtaggatcaattgttatattttgaagtataaatataaatattactttagctgtgcgatgggagagtattatattagatttcaacattgtctatgtttgtacgaacattaaatattttctttaattttccatgcgcctagttgcatatgtgtatgtatattatggcgccacacagcaaaataaatatatgacataaattaagtacacatgagcaaatattttatactatattattattggacattgagagagatatttacaagtgaaaacgcaggattagatttcaggttttagatatatggctagactataaaagtacggtatgtaaaaaaatcaatataatgaggtgtatgataagatttatatatgaggctctaccttaaaatgactcactgcattttaccaatatcaatcgactatacatgtgaaaatatggtatggttggaaaagtaaaacgaaatataagataagtttcatctcaataaattagtaactaaaaataagtaaagtataactcatataaattttatatattgtattaagttctaattatacattatgtattttgtgaaattctctagtatgtactgttaactgttatagttgagaatacattttgtaaaaaaaataagaaaagaatattaattatcatcatttaatatccctactcttacttaaatttaacttaagagctatagctagagcttaaatttaatttctacccaattcatatataattatattaagactattatattgagaggttaattaattatttaggagtggtattttatagataattactaatgatattaattttatatatattattatgtatataatgcagaagctactataggtgcacgcatcaaggttgtaacgtgaagaaacaagtgcagaggttaacgaaagacgaagggattgtggtgactacttacgaaggcatgcattcccataccattgacaagtcaactgataactttgagcatatcttgagtcagatgcaaatctacactacttccttttagttatatacatatattattcacaattagtttaattaatcatacacatatatatactactagataaattaatgctacctagtatgtaaattattatgattattacttcttttaatttactttctttctaatacacaaaccaaataaaataatatatggctgctaactgggtttagtgctatatatatattgaattcttttgttatgtatgtacgtacaatcacaaaataattatgaacagcacgtacgtacctattaattgtatttttgtaccaattattttgttcttaattttactcctatattttgttacaaattattaattattaatttcagtttgttatgcatgatttttcctacgtaattaaaatctgtgtaccattaatatatattcttgagaaatgttaagagtatctctatgggagctagcaaccatttcctatcaaattggtgtgaagttttcacaacattctactctaaggttacactaaaatttacatgtatcaaatttcacatcattaatagtgttgaattattaatttatccgaattaattagtgcatgacttttcttttttttcattttaaccatttttttaatttgtacttttaagaaatcatcataaaatatttgttgacaatatatataaatagttatatcataaattcattattattagttgttagtttaaaaatagtataaaatgtgaggggttttttattattttttaagcaaaatatatttatttggtattaattattagaattgttgcatttaaaagtaatatattctacactaaagtgataaaaaagatatgccaaaatggtacaaccattagagaggattcaaaagataccttaaattgtcaagcaccacaaaaggtggtataccactaatggtacattttaatatcaagtctcacacattttgatttaataaataattaatatgaaaaatcactaacccattattgaatgacacagtatatatatatatatatatatatattgttgaacactttaagatgtcaaatagtaattttcttaactagtgacagatctaaaattttactctgtgagagtttacttattataaaaatatttgtgcctactttaaacaaaattataatcgtttttaaaattttttggaaaacttttttactattttagtgtataattatcaaactaaaaattgtatattcaattttgtaggactttttttatttattcatttatatacaatctcaaaaatacttaaataatcattatttataatcagagatttaaataataaaataataaaaaagaaaatataaataagaacattcagtcaaaaaaataactttatttctaccttttttttttttttttttttttgataagtatctctacctttttttccttgtttcttttatgttcctgccaaataaaagctctctaaattaggtatgaactataccaggcggttgagtgtttctttttcatgttattcgtgcatatcaaaaagagaaacaaatatcaacagatattattgcaaaaaaaaaaaaaaaaaaaacagatattccatcaaaaaaaataaataaatatactggtaattattaatctatatatggagatgacatttgtacatatctaaaaatgtacttatatatcttaccaaacaaaaaaaaaaataattccttactcactaagtaatttgattatatcttaaaaaaaatatatttttacaagtttttttttatgaaaatctatgtaaaaattctaataggaacttaagtcgtaattaaaatttatataacaactcacataaaaactattgaagaaactaccagaacaactcaaactgtaaacttaaaaaactaataataaaaaaaactaataaataagataattcccaagaaaatatacatttacttactcacggacttcctttatcaattaccaccgttcgataaacttacatatattatcaggataagttgaaaaatactcttatattatattttattaaaatataccaacttttatgagtgagttgccttatataccttcactctttacttaaatctagcatataatttacattgacataaggagtttaatggggacatcatctataaaagttggtatatcttaaagaatatgaaaataaaggtaaaaattaaaataaataaagtaaagtggatatacaatgtaatttcctctatattatctatgttataatgggcccaattattccacactttaaccaagcataatagcgtgacttaaattttctccatcaacaaagctttgtccaatttatctcgttactattttgagaatctttgtccagtatatatctcatgcacaaaaatgtcatttttttaaatacacaaaaatatcattttagcttaaagaataattattcaccataaatatatgactatcgcaaattagaagaaaataatcaagggtttcttcaattgttcttggaaactctagcaggaattgaaggttttgaactaaagggcctctgtttagtgcataaatttctattcaggttgaccgacacacttgaatcaggaaatgagataagattagtataaaatatgtatatgtatatgtgtatgtaagttgcatgttgtattatgtgatttgtatactaccaacactagtatggttgcagtacagagtacattgatacagtatatgatgctcaaagagtatggcatagtgttaccaacactagtacaagacgaggacgtagtacatgtggaacaacactcaatggtactcgggatacggttcaaccctaccaacactagtacgggacgagtacttagtgcatgtggtacagaggtcatacttttgttaagaacattcttgatgcatctgaagccttgtaaataggtgtatgggcgtgtagctacaagttagtattatgttatgtgttttgtgcttttgtgcttttcttattgagtctgtcgactcacagttattgtttgaatgtgtaggtaaagaaaagacgaaggctgagcatcagtgagtccaaagctcaaagatggttgtacatatcaagattgttagacctagagagtttggtctccagacgacttggggtttcctttttaagaactatggtaactactgtcggtcgctcaactaatggtgctaaaattgttggttaagaaatctgattatttcttatttccttgataaccacttggatgcgtggcttgtgccttttcatatagtcattgttatcccaaattttgcactctgatgtggcatcacgagaatggtcacacgtggagtccacttggagcannnnnnnnnnnnnnnnngaccgagcaggatgcctcgctagtacatccagaataggatattcagcgatccgtgcagagtactcagcacttagtgaattcagctttcgcatcatgannnnnnnnnnnnnnnnnnataactcagggatcaacttacgtggatatggcatacacacgat

SEQ ID NO: 24838 - DNA, 6279 bp, Cannabis sativa
  modified_base (3425)..(3433): a, c, t, g, unknown or other
  modified_base (6230)..(6249): a, c, t, g, unknown or other
attaatatgtggtagtttggataattgataaattaggtaggccttgagaaaaatatgaaataaggtttggaaccttgttacctagtagagaattagttatctccaaaatgtagtttcggtctatgccgattagagttgaggatagaaagttgaacactaatcttgtagctttgagtatagtataatttgagatattacttggaatgggagtagtgtcctagtaagccgcttgtattgagagcaaataagaaatggtaacttttcaactaaaggtgaaggaccatttgtgttatggtattggctcaaggtacttgaactccaagtatcatgatgataaaatttggaaacctattgcagaatggatgcatagaattctttaaagtggtattacattccacctagttgaggttgttcagcccgtggatattagagtagtacaatagttcttagatgtatttctagaagaacttgcaggattaccactacagcaaagatatactttgttgttattttggcatttggagcagaggtggcttctagggaaccttacaaaatagttccaacaaaatttaaggaattaagttatgatttcaagggatgcttgatttagggtttacccgaccctgtgtatcgccctagaaagttctgatgttgtgttaggaagaaatatggctcacttcatttgtatatttgttattgggaactaaaaaagttaataataaagaatagctaccctctacttaggatcgatggttggtttgatttacttcaaagaaagatggtcttctccaagactgatcttcgctcgggctatcattagttgagaatctgagtggagaacatcttaagggctgcttatcatactaggtatggtcattatgaatttctggttaagtctttggggactaaccaatgctccagtagctcttatagatttggtgatcagggtactcaaggattttctcgatagacgtgctatactaaatatcgatgatatcattgtgtactttcaattagaagtagagtatgagcgacatctacatatggttttgtatcgactatggcagcataaactgtatatatcaaattaagaagtatggattttggttattctgagtgtctttcctagggcacgttataggtaaagatgggatcacaatttattcaagaaagaattaatctgagaaggattggctaaggccaaagatagtcatcaaggttagaagttttctggattcagttagttgtgaccattaccttgtgtaaggatttccaaatctctatgcccatatcaaagttaaccaagaagaatcagcggttagcgtggatagatgggtgtgaaattaatttcaagggctgaagcaagtgttaattacaattctagtgttagcttgacttctaatcaagaagaattttggtctattgtaaggcatccagaaaaaatatggagtgtgttctgatgcaagctgataaggttattgcttatttctgtcgttaattgaaggagtataaataacattacccaatttattacctagaacttgcgacaatgattttacttttggatttggaaaaactatctctgtggagaaaaatgtagaatattttattacccagaagagattgaatacaaaacaaaggcagtggttggagttagttaaagattaagactgcaaaactctttattacccagagaaggccaatctagtggcgagaaccctaggtaggaaatgtctcaagcaggtttgaccatgatttctcctcaattaatgattgtcatggttaggttaagtttggagtttgtatgggtaaactcaataagttaacacttcaaccagatttattagacaaaaatagaagtgctcaattggtggatacaatttagtgaaaacttgacaataagttttaagctggctaagtcagagaattcttagtgtcaaatcacaggatgttacgttattaaactcaagttagtgtcccaagcagtgttaagctcataagagagactctaggaaaagcttataccattccttaaatcgttatatcttggtactattaagatgtaccaagacttgaaattctacttactaatgaggtagaatacaaagtaatgtggtagattatgtattcagatgcttaatttgacagtgaattaggtttaaccataaaaaactgggaaggttattatgatttactaaattttctcaagtgaaacaggaagaggttactagaaatagatcgcaagcatgtttgctttcatatgattgaatatgaattagagtactattttgggtataagagctagtatggtaaattatttaagggagatagtatgaccttatgcgactttaaagtctattaaatctgataggaaactgaagttcacctttaggttttaacaaagtctatagagattcatgagtacggagtggaagtttagtataacttttaacccttagacagatggccagcccgaagggacaattttaatactgaatgatatgttgcaagcttacatgatgaattaaaagaactcatagaacatctatctattttcaaaagaaaacatgcaacaagcagttatcaaagtatgatagggatggttccctataagatgctgaataatatgaagttttattttcaaaacctaaggcagaaaatacttagtttcggagtcaggttagccgactagtaaggctttagagaagattatggccaaggtgcttgcttctaaaaataaatagtagaagatatgcaggcctgaagctcataaacataaaaatccaagtaggggaaaatcatgtctttttgtgaatattatcggtgaaaggaatgaattactttggggacaagggtaaaaatatgtctaggttcctacgacttttagagcttctcgagacaattagattaataatttcttgtctagccttatgattagcattgctatcacacatgatatttccatgttatattctaagaaagtatgattgagaatttactcatatcaaaagttatgaaattttagaacttcaggctgagttatcttgtgcagagaagcaatttgagattctcgataagaaagataaagttctttggaacaaaattatagtattgatctaggtacttaaaaaaatagcagggtggaaaagccaccataaggactcattgtctgaagttatccaaattagatttcgaggacgaaatccttttaacagagggataattgtaatgattgcatagttaaatcatggtaattagtagataaataatagaatcaatcattttatgatttatttgcttcttgatagaaagttatggcttattgtaagaaataggtcttaggaaaatatttctcaattacggagatatattcaaatgctagatgtattatatatactatgtaattttcaaaatatatatatatnnnnnnnnntatatatatatatatactatgtatggattttacaattttcatgttttgtgctttgtaacactgaaatgtaatgatttggccaatggagttacttagatatggttaagtatcttaaaattagcggggctagatagttagaaatttaaaatgtaagttataggcggagttatagtttttgatcattttactcctaagcctggagaaacttaagcttgaagaaagggtaatttttggaaatttgcccaagaggttaattttgtccttttatggactttggtggaattaattaattaattaattctatgttgatcccttttaactataataaaggcatattttatttacggataaattagaaaaatcattagaaaacaaaacttaaattcatccaaactctctctctttctctctctccactttggctccaaggaaagcagaagaaaccaggatttctccatcattttttagtgagttctagctgaaatcctaggggtattatcaaaggtaagatcctaatcctttttcttaagttatttggaagttttctttaggttggacatataattttgagatttgttctgtctgagttggataagtgtggaattgattttctaggttaattttgtgttgtttgaagtgtagctatgatgaatttaaggtcagattgtagtttggagcaagtttgagttcaagaactcaaaattggctcaataagggtgatttttgaatttttgtgtattttgtggttctgttgcttgaaacttgtctcttatgatgtgattaggtgatttggagattggttttatgtttagaattgttttggccaagatttggggttttgttgttttctgtagcaaaaaaatggtaggttgtttatgtggaaacggtctaccatttttctggcaaagaacttgaaaaaacaacttgccatttttatagaaacgacctgccgttttcaggcagttttctcgtagtattgctttttcagcactttctcgatacgtagggattagtcatgctatttatcaataggaaaacttttagtttcaagtttaagtttgaatttcaaacataaaatcaattatatttatttaatttaaatatgaatttgaaaaataaatatcccaacaaaactctattattttggtttagttattaaaaataataaaactattttattatttattaattaataactaggatagttattatttgaatttggaattgttgacctcagatttggctaacgaacagcgaagtcgaatgtaatactgatgcttgccacgtgttacacaatcaaaacaataaagtgaatgaacacatgatttatagaggttcgaccccctttgttgtccagtaatgtcctactctacttttagttgtattgataccgagagataatactatttagattactatagagatgggatctgaagtagctctctaaaggttacaatgtgggaatcagaattgaaaattctcaagtaagagtacaacaagtgggcgtgtgagagaaagagagagatgagttatcaaacttagagttagggtttgcacttgcccttaatgacttagagcttagagttttagtttgagtttatataggagagcttacaccctttaaatccctaagaaataagtaaaacaagttataatttacatattaaattagtaaaatacaaatgactaaaatgcctaaaatgcccttcaggattagatattttccctctatttttgtgggctgttaaggctcaatttgcagtgtggcttgctatccacgtgtaaagttgtgcaccaaacttctgtcaggccaatgtctggctagccatgcacctacaggatgcatgctggctagccctatgatgtctagaagttggctggcctatgctggccatagggctggccaagggtggttggctagcccccttgaggtggctggttcgtcattcgttgtcctgcttgagtcctcagactcctcgtgggttgaagtgctaagtagatgacttgaccttcttgttggcaagttgtactgccacgtggcactgatattggtcccgtagacatgccacatcaagtggacagaaattgggataacatttgccccacaagtccatgtgcagacgtctttgcagataggatctttctagcttggatgggattgatgtagccttaactggttaaatctttctacacatttagtctttgaaataactactcttgactgtctgatctcacttgttgcaataagttaacaacattgctcattagttgaacacttgcacgataagtaaaaaggtggtcccacagaagctatataagcttatggagggaaaccattcttcactttccatttttcatttcctctctagaaaaatcaacttttaaaagctcctccttctctctagaggctgacgccccacattgctttaactcccaagatttttgcactatttcaaccatccaagcttcccactctcttcaccaaagttttctcgttatttacttgatttacttgattttgccatgattacatgaagcttttcttcgctttgaatgtttttcgattcccacgttagattgtaatctttttgatattatgatctgcatgatagttttaggatgtataatgtgtgattttttgacaaaaaaagatttgatttcgagcttcgttgtgaatcttggctttttgagtcaccaagaacacgttcaagttcttgaaaaccatgcatttagatccaacatacaccctgcccggccatgggtctggttgttggaattaatttaccaggatcttagnnnnnnnnnnnnnnnnnnnnatttaacaacctaaatatgagcttctaaaa

SEQ ID NO: 24839 - DNA, 1735 bp, Cannabis sativa
aaattttttgattttctaagtatagaaaatcaaatttcccatttgaaatgagtcttataggggatcttagtgtgaagaccgcttaattttattatgataaattagtagataattagggtttaattaagatattagattattaattatgatttatgaatttatggagatttatttaaattctatgtgtgttatttatactatatataaaaattcatgttttttatgttttatgcccgacaatattagaatgtggtgtttggccaatagaatcacattttagtattttagtagtagcaaggtaacttagatagaaattgggaatgtaaggaatatttaaagttttagaaatgatcaaagtacccctaagtgacaatgtgacttatggtgtgtgcaaggggcaaaataatctttttgccattggacttttgatccgttagtggttttatataaggttagacatatgatttttggttaagttaatattagataataccaagatttatacatgttattcaaaaaaaaattagaaaacacataatcatctctcttcaactcactctctctcgaactctcaagaagccagcaagggtttggttttttctacttcaattctgaggattctagcaggttttagttgtttcaatttaaggtataatctcttagcacctttctctttttttttttttttttttctaagttcaagttaggttctattgcatgtttttatgaattagggttctgtggttatgatagttatttgattttgtattctgattttatgttgatgttatttaagctcttttatgttggatttgtgggttattgtggtgtttgagcaaggtttgagtttatgaactcaagctttgctctctaatggtggattttgttctggatgttttggttagttttattgcatggattcagtttgttgtactgtaaataggtgtttgtgaagtttgagatcgaattgaggtgtttaggaggtttttggtgtttcttgcactgaactaatcgaccggttcagtagacctgtaggaactagaattccagttggtcccgaggaaccccatagaattaaaattccagttggggaaccagtctgtcagttggggcaatttaggaaatcctagttttttccgtttttgtaatatttagggtatttccaggtaatccatcgatagggaaacttttagtttcaattttaagtccccgaaaaatgatttagcgtttcactcatcaatattatgaataatgtgatttaggggcctgtaaatcatcaagcagcagtttcactcaggttgaccggccggcacacttaaattcagaaacgaggtaagattagtataaagatatgcatatgcatttacatatttagcgtgcatgtttatggagcctgttaaattacattgataacaatatctgtatacatggagttatactggatgccgatagatatatgtttggctcaagtacaagatcgacgctatcacatcggtatgattagagtatgactagagtactgagtataggctaatattatggtcgatagtactgtcgtaggaacattctagactcagtaccgtgttggacacggggataggattatagttgggtgtatgggtgcctgattataatttgggttacaattatgttattaattatacttttcttactgagtctgtcgactcacagatattatttacatgtgtagattattggaaattattttaccagg

SEQ ID NO: 24840 - DNA, 2783 bp, Cannabis sativa
  modified_base (2709)..(2735): a, c, t, g, unknown or other
tggaggcttgaagcggggacgttacagtagctctccaggaaaagtaggaggtctttgatgggaaacacacgattagggatgagtatttagacttgtccatggaggtcaatttgaagtacatggaatttccccttcgtgaaagttggcttgctcaaggtaggaagctgtatgagagtagtccacagacaaacagggctggccagagtgatgaggaggtactggctgaccatactcttaagctacctatcgaccagcctgctggagcactggccagccaacctattggaacattggccagccaacctatagatgaggttccatctgaccaaccttccatggactaaactacaaagcctgccccagaagctccatctgtccagggcttagtttacttgaacccacatattcatgtgattattccggcggatgtttagagacttatgttttttttttttttttgtattttatgcttttattttgtatattttattttttgttcttgtatggcctatatgccctttacttttaaacaatgttcgtgtatggcttgagggcctttatttttgaatagatgattgatcaggcggtctttaattctagctttaacttcttttgttagacatgtaggtgtcgggacttacgctttttatgtctaatctgaaggatgccatttgcacttacttaactttcaattttttgcttatcaaagctttaaattttgcttaagtttagatgcacttgtttcatgttgtacgatgcgggtgtgccccaagtgatcgagtagacttatggtctcttggtcacttacaattcaccaagtactatagacctttgcctgtgtattttttggaggaacttgtttgcacacatgtggaattaaaaaataaagattaactttaagaagttatcttgttagaaagttgcttaacacaacattgaaatgaaacaacatttttatccattaattggtcttacatatgtgtttttgttgtgcaacataaatttttttggttctaaaagcttgcaaatataaagtttacttctaaaaataattctatggctacccctgcacgacatgtcagataggggccatcactgaatagtgatgaaaacttaactcttttacactaattcctatacagtgagccgcacgcgaactactactaaagagtagtatttttaaaaggttgtcattggtagtagtttctgagatgttctccattccagtaccttggtaggagaactaattccatgttctcattgtacctgctaagcttgtatgcaccttaacctattatctttctaacttggtacgaacctttccagcttagtccaaacactcttgctgcaaaatctttggtattcagcaattaatactcttcgaaacactaagtctcctacaaagtatttcctttccttgacttgttgattgaagtacctggcaaccttttgctggaaggcatgcagatttaggtcggtttggtctcttcgttcttctattttgttaagggattattccagtaaggtgtggtttacttcttggtcataggatatccttctatgggatggtggttccagttcaacggacaacattgatttatagataggctaatgcaaagggtgtctatctggtggccatcttctcggtggtcctgtgtgatcagagtacctctgggagtaaataaggccaattgccttttggctggatatatgcccttggctggctagccccccacagctggacagatgcccttggtcggccagccccccttccttgaccggccaaattagccagactcccttggccggccaggccaatctatgggttgacatgcggttggtcataccattagcttggttttggtgggtccacctacctaaaattatagttcaaaggtggaacaaaataattctagttctcgctccttgagttattattgtcttatgggttttcacttatcctaggatccagcctatcaaaaataaggtccctaggccttagagcaatatattcacaagtattttggaggagacaattactatgttggccagtaagggcttgatcagttggtaatgtcccctctttggagttgttttttttgtcctccaacacctcccactgctaggaaatggctattcctgccatatgacctgtctggcaagatttggccgtctttaagtagaggaaggtctgtcctcgtgttcaagtgacctggttggactatatgtccattgtctacctgcctgtagaccatggctggcctgtcgatgaccctttcttacaaaggatctctttttagatcctgacctcttcctgcagttctctcattgaactgccatattaggtcactggcctccctattacagcagtttagctttgcttgatgggcttggacgatggcctcctaatcgtccatgcaccctaggaattcatgtctttggtgggtaaaagcatcacaactagtagcgcatagatcttcttatattgtcttagtgacctgccctacaacttctctgatattaaccagctcaacatcatccccaaggtccaagtgaggctcactaatagatggttcaccaattcttggccttgtctctcctgcttagtaccatggagcagacctagttgtgttctatggaggttgttccatgctaataaggctttctattcgaggcgctgctagtggattttgttgggttttatgcccnnnnnnnnnnnnnnnnnnnnnnnnnnngatttacttattaataaagatcagcaataatattttatgttgcatggt

SEQ ID NO: 24841 - DNA, 2510 bp, Cannabis sativa
aaaaacaaaaacaaattcccaattaatagttgatgagatgtcttagtgaaaatgaccacacattcacagttgataatatgttgttgtacaaagaaaagaattcctataatcagtttcattttatttttattttaaaaacttattaaaacccttttcagaaaaagaaaagaaaaaagaacttattaaaacaggggcaaaggttgttatcaatgggacaaaagtagatgaactttttgatagatacttggacaaattgatacccaccaaatcagtctcaatcatattataaatatgtatatagtgtataacttttttctgaggatggttttatctctttttcttttctttttgagtgatcttttaggattttgtaaatcatgatcatggattcatgatcgtgtcattgaatttgctgcattatcattttaagacctttgcttaaatgcactaaggtcgatgcatgcatgatttttatattaccttttttcttcttcctacttcgacctattgtctagcttctacctttattattcccttctcatccactatattttaatcatagtaacaagacgcatcatagtcggtgagataattaaagtaaccaaaattagaatgtcattgctaaggccatctccaaagcactacaaatatagtagcaattgtatactttttcaatccaatcgtgagactattagtctatacctgtactaaatatagtgctctattaccgttcgtttatttttatattattatattatatttaataacttttaggatttttttattttcacatttaaaaagtatttttttatttatacagaaatataagaattaattaacggatcaacataaattacaatccacgccgtaactaccgaaacaattcaaactgtaaaaataaaaaaaattaaaaaataacatatgaagtgatttccttaatgatgcataacgaaagaatgcatcaatgtatcgatatttgttttgatattaaggagaatattttagtctattttttttttctttatggttgtattgtagttatttaagatatcttgtaaaaattcgaaaattaaaaaaaaaaaaaataacaccctgaaaataatgtgactcttttattttataggcatgttaaatagacttttaaacactgttaaaaaataaaaaggatatttaattttatttaaaaaataatattaatagagaataattgttttggtgtaacttttagtattatggttggaatgaatgactttaacactatatttgatattagtgcaacaccaaatttaatatatatggttggagatggcctaataggtaatatgattctcaataccattttgagatgacacaataattagtgaatttttataataactattaaattaaaatatataagacatgatacttcagcaatatgacaccttggtattagacactaagtgtgccatttagcattttgaatgagctctttttgatttattatccttaatttataagtgtattttttaaattacaagagacccttttaactatcttattttggatcgactattagacttggatcgattaccttaggattttctttagttgtatagtaagaagtatgtgattttatcttaaaactaattaataatgagtaaactaattcataatcttataaatgatattaagttttcatacattattaatatgaaactctataatattttagatcaatttacaataatacggtgtaaaggaaatatttttcaaaacataccctctaaacaaaataaaacactacaagaaaaaggatttttgtcggcacagttaactaacctcgctggcaaaatatggccaatttattccatcagatattacttatgtcggcaacttatttcgctggcataagtcacttttgactgcgaccttagttttgctagcaaaaggtggaaacttttgacggttcaattctacttttatcggtgaaactaagtgtgcccataaaagtgaattaattactggcggtttaattttacttttaccggcaaataaatgcactggtaaaagtagtgaaaattttggcagttcaattcccgcatattaaaaatatgcgcagaaattaagtgaaaacttttgtcgtcgagcttaagtgtgctggcaaaagtttttacaattaatgaaacgatgcatttcatttgtttatttagggtaaaccttttgctggcgagcttaagtgggctgacaaatgtttttttcaccattgacttttgccagtgcgcctaagtacgctggcaaaagttgatgctgaataaaaccgagtaccgaattccctttccccattttctttctttttttcttcttcttctcttcttcttctatgcgttttccccattttttagtcaccaccaccaccatcatgaccaccattttcaccactatcatctctctctctctctctcacccatttcactcaatctctctatcctgctattttttctaaaaaaaaaaaaaattgaaacgtaact

SEQ ID NO: 24842 - DNA, 2191 bp, Cannabis sativa
atttctcaactgtgatggaggtatatgtatctatggtatttacaagttcatttttctcaatgatataacattatattaacgcagagtacccaatgttggagtgagaagacgattacttggagtagtaacattattgagctgtacaatcaatccaacatttggatcatgagtttgccagcagttggaaaggctagcttcataactacaaacctaagtctgcctctgactctgtcatggtgggctcttgcctcttagctaggtcccaacaagagatattgaagccctccttcgatattaaaggctctataaattcagctctggtcgtgctttgttttctggcttaccctcttgaacaagtaatttattcctattctattctcttctaagtaattgctttaatttgttattgtttagaaaatgaaaaatagttacataaaaaccccgttgtaaatattttttctttttttggctttctgtatgtataatgtcattgattcgatctgaagaaaatttgctatgaacaaagatcatcaataagttatcttttcacttttttttctttcttttctctctttctttagagaaacattttccttttgtaaaatacagaggtatgaattcatattacacgaagtcattaaaaacccaaatcgtttttctgggtttataaggagggagactagtcataattacccaaacacaatgtctaagtataacccaattataacataaataaactacttgggatctaccatcttcgatggttttaagtcctttcttttctctgtaggcttggactttttcttcgattctacactgacctgtatgtatatatatcataatattaaaatataatatagccaaaaaagacagtcagtattctcagttactagtaagtccattcctaaacaaatttcacttattatatatatatatatatatacacatatcatatgtgccacctaagaactcaatttgcttattatagtattatataataagatccaaacatgtttctctcaaaaagaaaatataaaataaaataaaaaaatccaaaaatgtttgttaagaacaaaagcttttcaaacatttatactgaacacttctccgaataaagccattcagtggaaattatattattgatctacagagttctactagctgagctgattagatacagagatcataatttcactaattcattttgtttaatccaagtcaactcaaccaaagcatcacgcgaaattcaacgccaaaaaaaaggtcaacgaggtttctttatccatatcaaattttaatcaagttaatctgtacttttaaatcactcaatttcataatcaaattattaaagtcaataaaatgagagaattgcatagcgtaaatatcagtcttaagagtttaaatttaactacctaaaatcagaatatccaaaaacgaagaaaaaacttgttcaaaattgaaaaatcaaattaactaaccgttgatttaagatggaaaggatcaagattattggtgaggatggagatcttggcaatctcagagaaggcagagtctcggagagcagggacatcactgaccaaattttcgtaagcagcttcgaaagcctcttgccaaaatcgaggcaattgagttcttctactctgagtatacaaatcccacatgtgcctcactaccttaactcgctcctccacttcctattaattgaaattaaatataaacccacacaacaaacaattaatcaaactcccaaacaccaaaaccagagagaggtaagaggggaaaacgaaccagaatgtctagatcgtcgtcgtaagtaggtgagttaaagtcatcatagatcctagagaggttaccggttgaccacttgagagtaacggaaccagtaaacatggaccaaaaagctagtagaagaaccgcagctataacccagaacttgtacgaactcttaccgaagaaacgggtaacgggtggtctagggctttctctcctagtaaccatgggcagtgattgtgaatcagtatctttcatggttgatcgaagagaaagagatgatcttgcctgagagacttgagagatcaagtatgtatggtaataattaagtgaagtgagtgagtgagtgggtttggtgggcaatcaattattatggcaataaattaaatgtatgtaatatttttgggttttgagaaattga

SEQ ID NO: 24843 - DNA, 3794 bp, Cannabis sativa
  modified_base (1981)..(1995): a, c, t, g, unknown or other
cacaacaccaatatcaacctgttaacacaagcacccatagcagatttaccacccaccacctctcttaataccctgtccactcaaacaactataccatatcaatcacccaccctgccaccccgttaccaactcaggtttcaccactacccatccgagaaccgttactcccatcccctagtcccaacctacagaacacagacacttctgtgtctatttcacctatgccttcacaaaactcagaaacatacctacctatatccaacaccaatactccacccatagtaataatccaatttttttccggtgtgcccccaaccacatcaccaacatctgctcctcatcctcatactaaaaatacatcacaacagcctatgcaatttgatgtaccagctcagcaactacatgctactaatcataatacctcaagctctggtgtgcagcctgttcatacaacacatgactcaagaattcacaaaatgaaaacaaggtctcaaagtgggatttataaacctaaggcctacctatcaacaagacatccacttgttgaatctctctttcctactaaaccaaggtttgtttagcaagctctcacggatccaaagtgctttcaatcaatgcaaaaagaaaatactgccttgagtaaataaaaaacttggacgcttgtaccctatcagccacatatgcatgttattgataataagtgggtctctcggtttaaacttaatgttgatggttctctaaatacgtataaatccaggttagttgcaaaaggttacttacaaacacctggtattgactatgaagaaacctttagtcttgtggtaaaactggttattgttagaactgttctaaccttagctgtcacttcagcttggcctgtcaagcaattggatgttagtaatgcagttttaaatggtgatttggatgaaacaatttacttgaggccaccaagaggctttgaggatccaagcaaaccaactcatgtctgtcaattgcataaaactctctatggattaaagcaagctccacgagcttggaatgagaaactaaagcaaacactgttgcagttgggttttcaagcttcaagatcaaatacatcgttgtttgtctatggttcagaatctagtttaataatcctcttagtctatgtaaatgacatactagtaactggacctgattcacagtttatttccaaattgatagctggtctaaatggatcattttctttaaaagacttggtaactatacactactttcttggtattgagatttatagagatgatgcaggtatgtatctttctcaaagcaaatatgtcactgatttacttgttcgattttagctagatggtatcaaaagatgtccgaatcccaccagctctactaaaaaattatccctatcttatggggaaccatatcaggacatcacactttctcgaagcacggcctgcagttcagtacctcacattaacacgacctgatgttacattcattatcaataaacttagtcagtttattcatgccccaactatcacccattgggaagcctacaaacgactacttcaatatctaaaaggcactatctcacacagcttgcttcttagaccagtagcttcaatggacatctgtgcctactctgatgcagattgggccagttgtatagatgatcaaaggtaaactaggggttatgtggtctttcttggaagaaatttggtcttctggtctacaaagaagcagaatgttgttgctagatcaagcactgagagtgaattttgaagcctagccaacactgctgcagaactcatatggcttgttaatcagttatctgactcttgattacataaaatactctatatacaaaatatagatatgctatgaattaatcattattaaagtctaaataatcattgatcctctgtagatggtctacattgaatagggattaaattaccgttttagacttcaatgtattttatccttaaannnnnnnnnnnnnnnaaatgatatttcgagaaactaatataattaccaaaatgaagcctcattcatttaaacgcatttagccaagctctaaggaaaccatcatttcacttcaatgtgcttatataagctatagattctatatctatgattagcgccccctctcaattgaactactcagttctcaggatgtaagtattaggccgatcctactggtcagctttaacgaacaagtcaaacaacccatatagtacaattaagatagaacataaccatctccagactaagatcaattgacctaagatcaactaagtgacattgacataaaaaagacataacgttaattttatgatttccgctgtcaatatcggtctagtctgatgtatagccaatacattcgatacttgcttacttaactaatgacctacaaagaacattccatttatacaagtgtaagtaattctttatcgttgattatcatgtctgtgaaaattcagtgcactgataaatcataagactaaatattttgaagcatataatcacaattactttccaatgtgatgacatcactgtaattgtgaataactatatgttcgggatttaataaagctcatatattaaacctataatcatgtataaattgtgtgacaaagcatatgacatggttaagatatgattttttatccttattgaaagtaaaaaagattacaataaaattgggttttatttagggcagaaaatcccaacactattcccttctcgctaggagaatgcatagtgaggaggtttcttgtcctctttgtggagagggagaggaaacaatggagcacctcttcctctattgtaactttactttcacctttggaggtcatccccttgggggttatgctagtttttaattcgagaactcgtgtttgggattgggttaaatttctttggagtttgaagtctaagggggttgatattgagaagttgttcctctatgctttgattgtggtagatatgatcaggaggtcccacaacgataagatatacaataattctttgagtaacattaaacattatattgactctatctctatttgtaacgcagattatgtgtcttgtttgtttgcctcgtcgaaggctattgagtctcctatttggtcccctcctccagaagattagatcaaacttaactgtgatgttaaagttggcggcagctccatgtgtgtggtggctttggctagggatcagacagggtctattttgtgggtggtgacagaccttctcattagagaagttgcggccaatttgttagctatggagacagccattttgttgaaacatccttttgtgatgatagagagtgactctgaaatgactataaaaaaagtgataaataaatggctaaattcaccttaagtggttggccataggatgtgggccccactaatttcaattttaccattttatacaactatttatctttttctttcacaaatgccatatttttcaatttaaatcctttaaatgttaaaactatttatttaataattaatatcaattatcaaataaaattgtcaattaaatttatttattaataagatttaataaagtctcttaattaacaaatattaattaacaaataaaccatacaatctcttttctacaatctcttttctttcttcacaattaagcccttgtttagtgaaaattcataaataagacataatgtaattttagaattatagtagattaattaaaactaattaacggagtcttacaagtagcattgtctcaactagtgtgggcaccatgggcctatataatcgagc

SEQ ID NO: 24844 - DNA, 1753 bp, Cannabis sativa
tgtgacaggaaagttggcaaaggactcaaggcctgtgaaagacttataaaatcgataaaagcattgcttgaccaagtgaccaaatttgtgaagaaattgccatgttgagtattgggaccacctccgttagatgcaggaccaccaccacgagccataggatttcctgtgaaaccatcagaatgagggggaccacaacagttgaatcctggtggaatagtaggtgcagagtagggtccacggttatatggattataaccattgaatcttgaatgagagagattagcttcagctttcaggatatcaagattcttagtgtgtttgtcaattcgagccgattgagccattaataaggcttctatctctgcaacagtctacacatcctttcttgtagtgaccaaagtgacaaacacattgtactcagctggtaatccgttgaatatggcttcaatgtcatcttgaggcatctgtttgtggccaatagtagcaaaaagatcaactatccctttgatcttgagaagatagtcatttaatgaacctgtcatcttaattttgcgtagttgagtcttgtataaccctatattagcagcattaagagctgtatagtactcatttagagcatgccatatttgagcagtggtgtcacatcctatcattctgtttgtggtcttttcagaccatggatgagagtaacccaagaaaccaagaagattgtcttgcttgctcccaatcttcaaattctgggttgactgtgtgatttctttcatcagttgcagagagatactttggtcgagctttatcaggatcaatatatttttgaagtcgactccctttaatcgaagccaaaacttgatgacgccatggaagatagttgtgctcatcgagcttaattgagagagaatgagtgaatgaaacagggtacgatttaggtagcattgcttgatgattgttctctgtctgagcattgttcaatcttgatgctccaccattagaagtacaagggatctccattaacgaatgagagagagctctgataccatgtgatgtttaagagcagagagaagaaaagagaaaagaaggtaatctgttattgattaaagaaagattacaagaggagtttatatacagatacaactgaagcaaaacagagtcaaccaacaaataacagaaataccttactaactaactgtcctaactaacctatatctgtaacaatatatatatatataaaacttaaccttaattctacacaaaaaaaaaaaaaaaaaatagaatgatataccttagcttttaatcaaatatagttgaacattaaaacttgaatataaatgatagtgatggtgacgccaaaataatgaaagaaatatatatatatatatatatatatgagagaatgaaggttgtttatggtaatggcttcaacaaaagagatgaaagaattaataaaagaagacttgatggacgttaataacggtgtaaggtggtgaaaatgacttgaggttttgttgtttatatatgaatctggcttagatgttgacaagatgagagagtgatgtaattatggttatgtatgatggatagggtgataagtatgagggattgagagatgacagttcagaatgaagagagagatttttgagtctaggtcttatgagtgttgagatgaatgaataattaaggttctatttataggcttctcataccccacccccacttacttatgtcgtatccattagttaaggtttgaattttgaat

SEQ ID NO: 24845 - DNA, 3552 bp, Cannabis sativa
gtttatgaaattttaatacaatcctacctatcagcctctgaatctgagtctgaacgggaaatggatttgatagtaggggagatatggtaatgccatgtagcctaactacaccaatgcatattccttttattttcttcggggagggggagtatcttactgatagtcatttttattgtttcgggcagatgaacttggtgattttactggagagcttaaattgtcccttttccagcttggtgttggtcctcaaatcatagcatcaatcatcatgcaggttcactagttttctacttttccttagtcatttcacgtattcatgctaacgaaattgatatgtgtgattgaagaaggaaatcatttggctttctctaatatatgtttacttttttccctctctttcttttccctttctggtatctgcatgcttctttaggatctttgtaatgtttatttgtatgtatacgtttatttattttatgtaactagacttgtattaggcattgaaaagtattaagtgtggaaaaggaaaccacactggcacactgtaaaaccagaggaaaataagactacaacataacactcaagtttcttactagattagaggacaaaacacctttaaaatctttacgttaattaattagcaaaaggcaattaaatttaactttatcccaaacacagtttacattgtcttcaaaagcttcgtaacttctcttattcttctggaaccatatagtttttagcaggtagccatgccagcttcacctaaagagtttgaattgtcttgtctaaaggaaaactatatctcaaaacctgcaattcgatttagtgttatggaatagtctatacttgtggttaaactctttcaaatttgtgttccgtaagtgaaacaatgcaatgcaaaaataaattatttatggattcaccaatctttttgtataaaacataccatctagaagataaagcttgcatatactttcttttctaaagtgagcaacaaacattaagatgctcaaatactaataaccacacacactaaactctagagggagctaaggatttactgataagcttcacaaagaaacccctaaatggaatcattagcagttttgctaatgaatgttgctgatttcctaatcagatactttcatcatcaatgctactacaaatttaaagttactaacaattagttttcctggaatacatcctatccaacagaggtaaatttgttgccaaggattcaaattcctacctaaacatctttttaaaaatcctccttgcttcccattctagtcagtattattttgctttggttttctagttagaagtttagatctctgacctttgttatatacgcgattcccatgccttatgtattgagaagcaatgctatatacatatatatatatatatgtcttcatttctgccttgtttatgctttaattccacaaatttgatgcacaggtgctttgtcacgttgttccttcgttggtaaagctacgcaaggaaggcttagacgctcaagagaagattaagagttatatgtatgtctagttttcatctcaagcagtgagtcaaaattctcgcttcacaattttatgatgaattttatttgagtattaaaacaccacaactatttgacaccataattaatacaaataggaggttcgcatgtgaatttatcattatggtatccatatgtattagtgtgaggcataccaatgtctttagcattttccatgatttttttttgtagttgatgctttgtctagattgccaaatcaacacttatctatttatttatttattttagatggtggatgtcacttggatttgcaatagtggaggctttgatagtttcttgttattcacttccatattcaatctatgtagccagccacaggtaatgtttcatgagcattctcttgtcctcaaattatttgtatgatttgtctatttgaattgcaaatgttttattggaactaatgttatgattctctcttcttaagatgatttgacccttgaggaaccaacaaacttccttcaaacagtaactataaaatgccattggccatgatggagatagcataaatttgtttctttattcaaagttgtattttttcattgttataagagtagtttattggttattgattagtctttgtgtgtaatgaggtggcttctcttttaaacttatgcctacatattctcattaacacaagtttcgttaaaaaagaaaatgaaatggcttctttttttctttttggctagaggatgttgcttctatattttgatttttctttttcacttgtttcttgatcctgcagagtcaaacatgtggtcataacttcgcttttcttggtttgtggtgcgatgacaataacatggatttgtgataccatctcagaatctggatttggtactggttttgacattttggatgcattatatgcacttttaatattggttttattattatttcagtcaacttcatatctgtgtatgttgatgcatatgtttttatttcaggtcaaggatcaagtctaattatatgtgttggaatactgacgggctacacagaaatgctgcacaatatgttgtctcggcactcaggcatgtgactttgttgctaagattatttactcttgattgtatgatgaaaattaatataatagattcataagactatcaaaattaatcattcaaaaatagaaacctcaggacccaatccaggttaaactataactctaacaagcaggtgaagctcctttccaaatggattagattctaagctaattacgccatttcagaattattttaagcctttaattttagaagaaggcaatggaaaagaaatagatagtaagataatcatctcaaagttgtgagctaatcattatttaattcattattaatatccacatatgtgcggttgttcatcaaacatgaaataaacccgttagatttcaagatagtgtagtgagcacggacacatgtaaagtagtaaaatgtagtaagctatttgatacaacttcatgtttgtgtgctgctgtatttgtcatatttataaaactcagggaccagtgaacttgttgattgaacatttcaatatttattgcaggaagtataatgagttggggcccatatgtactaggtttgttgggcgtttttactctggtcactatgtgggcagttgttgtaactgaaggctgcaggaaagtaaagctgcaatactatggttttaaactcgcatcggctgctaggtaatactcattcactacataaacttttcctccttcgtatatttagcaagtatgcatgtgtcaacttgggtttcaattgctttttccaaaatacctaaaaatagtatgctgctgctattttgaaataattcaagatcaccgaagtaatgtctaaacccaatgatttaaggcgaagatcaaggatcccataacaaggaaataccatttcaattgtctcaacaactagaactcgatttaaatgaaaaattaaaatagatttgaattgagacagacaaaaggaggattagagacc

SEQ ID NO: 24846 - DNA, 2891 bp, Cannabis sativa
tcaaaatgttcaactcttattaattaataatcagaaatatctttataggcttttcaaggaataaatcccaacagagggatggtatgcagatagtgaagtaatggtaatcacaacactaaaaatgctgacaacatggcttaaaaacaaccatggaggtaatgaaaaattaattgttggtaatggtaatcagttgctaatttcccatataggaactggaagttggaatttaaaaatggtaaatcactgatcttaaaagacatgttgcatgttcctcaaatcactaagaatttaatcagtgtatccaaattaacatctgacaataaagtttttgtggaattctatgctaatttgtgttttgtgaaggacatggcaacaaaacaggtagtgttgcaggggaggcttaaggatggtgtaccaactccaatgtccaaacacaatccacaacaaagcttccaaagtttccaacataaatcccaatgtgttttcagcctcaccaagtcattcacaattcaatgacggttcttttttattgtctagttttattttattatttttttttttcgatgtagctgagtctagtactcctttatttgtttaatcttgtatttccctaaaagatgtgtggcataggaggcttggccacccatcatctaaaattttaactgaagtgttacacaatgctcatgtaaaactttcagtgaatgaacagcacaaattttgtgaagcttgtcaatatgtaaaatctcactccttaacttcaaactatctaatattagagttaaagcaccacttgatttaatctatatagatatttaaggtccctcccctattatgtcaaacataaaatttagattttatattcacttgattgatgatcacaacacatacacttggatttaccttttgaaaataaaagcatatgctttgcctacatttacacaattcaaagctcttgtgaaaaatcaatttgaaagaaaaattaaaagcctaagaattgattggggaagtgaatatctatccttcactcaggtagtcaatcaaagtggcatagattttaaccatccttgtcctcatacttctgcacaaaatggtcgtgcagaaaggaagcacaaacacattgttgaaatgggactcacactcctagctcaagataacaagtcactcaagtattgggtggatgctttccaagcatttgtgtacctcattaatcggcttccaacacctatactcaatggcaaaacaccttttttgaagttttgttaattatctacgacatcagactatgaattcttaaaaacctttggtatggcttgttatccttgtctacaaccttatcaaaggcacaagtttcaattttactcaaccaagtgtgttataacctaagctacagtgaatctcttaagggatacaggtgtttgagttctacagggagcctctacatatccaggaatatagattttaatgaaaaaaaaattcccttcaagtctggtttcctcaacattcatcaaaaggaacaaaatgtatccattgatacctctaacacttggttttcacttccaatttttcaaaatatttccaatgtcactaacttttcaaattccgcatatactcttcactcagaaagcacatcaagtacaagcacttcaaaagccactccaacagcaccatcagctatctcactaggttcaacaccataggatcaggtagacatttctaaacttatttttttatttagatttcaatgctactgatgtgtcaaacttcagggttcaagattcacaagacactcctgaacttcctttagattcaccaagttctgcaccagctcacacaactctaagaccatctcatcccattgtaaccagatctaaagcagacatttttaaacccaaagtctacctcagtaaagctcagtggagagtcgttcaagaagagccaagcacagtggaggaagccttgagacacatagactggaatattacaatgacagatgaatttaaggctcaggtgagaaacaaaacatggacacttgttccaccctcactagattacaatgtagttgggaacaagtgggtgcttaaaatcaagtacaatgttgatggaagcttctaaagttataaggctcggctagtggcaaaagggttccattagagaccagtgcttgattttagagaaactttcaatccagtaattaaagcttacattattcaaattctgttaacaattgtagtatcaaagaactagatagtgaggaaattagatatacaatgtctttctcaatggaaagcttgaggaagtagtatacatgtctcaaccacaaggctttgaagacaaagacagacctgattttgtttgtaaattagacaagtcactccatggtttgaagcaggcaccatgttcctgggttgacaagttgaaaaaaattcttttcaaatggaacttccaaaataccaagggagatacctcattctttatactcaagacaacataatgtgtgataatggctcttatttatgtggatgacatagtgatcacatgaaacaactccacagaactcaataaattcatcagcaagctgaacaggaagttttcactcaaagacttgggagtgttgaactatttcttggaaacagatgtctacagagactccacatgaatgtacttatctcaacgaaagtacataattgatctccttcttaagcttagcatgaagaatatcaaatcctatcctactcctatggttggacgaaaacctctatcttttgataatggcattgtgcttgaaaatccttcaaactatatgagcattaaaagagctatgcaatatctcactcatataaggccagatgtagcctttgcagtgaactaattgagtcaattcctcaaagctc

SEQ ID NO: 24847 - DNA, 2159 bp, Cannabis sativa
taaaatttcacctcaattttttttatatttttaaatcattgaatctaaaattaaaaaaatatatcacacattctcttttgttttttaatttataaacattaaatagcattacaaacaattcttaaaaatatcttttactttcaaaatttaaattttaatttctaaatcactaattaaaaaaataaaaaaaacacataactttttaatcacaaaccaattaacccttaaccgacgatatcctctcttctcactctccctttcacccattgttttcttcctcttccagctctcacatcctctcatttcctactttttttttaagcgtttatatattacattgcataatttgggacttgaacccaggacctcgaacacacacgcaccctcctatgaccacttgagctagcctcaagtggttctctcatctcctactcaatctcatagtttctttccttgttttttttttttaaatgaatatgtcttattttgtgcaaatcattaataaacaaattaataaaaaagactcattatatatgtatatattagagcgggtataggacggtatataatacccgctctatacccatatatatatgtgtggtgcgattattttttgttccaattatttttcccatttgaacaattttttccttcatcattcaaattaaataactatgagtattcgtaagcattcattatattattattaatatatataatacatttaatttactaaagtccaattaattttggcaaattatgatgacctaattgtatcaatataaaagaaaatttagacaaaccaaaatggttttgacaaatttgattcatcaatgctttgtagttttaaaccgatctctaaatcaaccataaacaccaatgtatacacttttcatagtaatatattattggcctttgattttgtgtgttgaatgttctttttataagtattttttattttttatttttgaatataagatcttatttgtgaaacaccatatcacaaaattaatattctttatagtgatattattcaatattattttttttctaaaaaaaccataaacttatgaactaccaattaagctcatgtgttttgtcctaatattgtattttacaaaaatcaaatcaaaaaatatatgatttgttttgtgagtacatatcccaaattattattattattttttctataaatatttatgaaacatatttttttttctcttttcattgaattgggagtcttttattaaggaaatagaaagattaaaacacaactaccatgtttgccccaatggtaacacaatcaacaaaaaggttataatttggctaaaaaacaattaatgagctaaaatgttagcctcctaaaacaaaacctaagaaattattattatggctatgaatcatgtttttaatgccctagacaatatcatcaatatctccccaatagctattaaatattgaagaaataatttttgtacaaactcattcaatgtagaaattatcaaacttttagatttttttttttttcaaaaatccccccttaatatttatgctatgattattagtatgattttatatggagtaaatgtaatttcttttgtaagaggataaatgtaaattaaaatatgtaaaagacaaaacctactaacaaccacaggtctaagtaaaatatgtaccaaatattttaagatgtgacatattattattagtataatttaatattaggtaaatttaaatttaaatatgtgaaacttgataattattaaagccaaaataaattaattattttttttttttgaaaaaatgtaaacacaaaatactttttaattgtaatcatatagtatctatcaataggagtataatatatatttcttttttagagaaaatcactagaataatattgacattaacaaatttaaacttcttttgaaaaaaaaaatcaactattttttgaaggagattgtggtttaaactaataccataaaaatttgctcataatctctacaaacacagcaataataataatttatataatttattacacatttacatagcacaatattggcattgacaaatttcaacctttatttaaaaaaaaaaaaatgcttttttaaggagattgtggtttaaaactcataccataaaaatttgcacataat

SEQ ID NO: 24848 - DNA, 6722 bp, Cannabis sativa
taaaaacaaacataatatattatttaatgataaaattagtttttatgaataattaatgtaaagatggtttgttcttttttcttataaaacagattcatgcacaaacactagaatcgaagactcctacatagtctccggcgacgattgcatagccgtgaagagcggttgggatcagtacggaatcaaaatggcaatgccaacccaacacctcgtcatccgacgtgtcacctgcatatcacctgacagcgccgccatcgcactgggcagcgaaatgtccggcggaatccaagacgtaagagtcgaagacatcacggccctcaacactcaatccgccgtgagaatcaaaactgcgctgggtcgcggtggctacgtcaaggacatcttcgtacaaagatacatcatcgacaccatgaagtacgtgttttggatgaccggcgcatacaactcacaccccaagggtttcgacccgaaagcaatgccggtgataagcaacataaactaccgcgattgggtggccaaaaacgtgacttttccggcgaaactcgacggaataaatggagacacatttaaggggatttgtatttcgaatgtgaatatgacattggctgaaccggtacagaaattgttgtggaattgtaccaatgttgagggtcataccagtaatgttatacctaaggcgtgtgatttgttgcctgagaagccagccaagtttgattgtccttttcctcaggataagttgcccattgaagatgttgctttaaagacttgtgcttaattaaatcttaactattatcattagtttgctttttcattagtgatattataaagaaaaaagcattttgtatttatataaatataatatatattgatccaaatgaagaaaacaaatatacatgctttgttggcatggctattcattgctttcttcaacaattgtattcatttatcattattttttttttttgttttattattatttatttatttatttttgagaaaaatgttgttatataattatattgattactcaaaagaaatttaatttaactgacaaaattgaaggtagacaatccttcaatcatagaaatttatatcaccaatggagcaaattatgcgaaagtgaaaaggtaatcttacaacaatattttcttttttgtcatttttaccattttcagggtcattttttttaatatatttttactgtatcaagtttttcaaaaataatttattaaagtttcaaaattataaaaaatattgttttatgagtaaaacaaaacaacaacaataacttaaaaacaactaagagagctaaaaaataattttaaaataacttaacaaacaacataaaaacaattataaaacaaaaagataactacaaacaacataaaaataacaaaacattaattacaaaatgcttaacaatatcaactcttcaatataatatgtttttgtattacgatttttttacttagttttgacaactttatttatcttttttgtttattaaattatttttttttataaaatatttattgttacaacttcatacttttaataatttttttcattttttctgtttgagttagtgatagttagaatgatactttttaaaaaagttaaataaataattacattaataatagaaataataaatcttcttatttcaaatggggttaggatagtgtcccgcccttacttttgatgaacggttttgccaataggttccaatgattatattatttatttattgtttgcaactagttgtgctaggtaagagaaatcagttaatttttttaattaaaaagaaacattcaaattatacttgtacactttttgatagtaatagtaccaatttttaacagtaaagtgtttagaaatgtcaaattttaaggggtcctaaggagagataaggattattactgtaaaatgttacgtgaaattataggtggaaaagttgtcttagatcaaacaacatcacttgaacgttatacaataaagttgcacactcaacgatctaagttgcacataaaatatgaagagccctatgatcatgcaacgattcagttatatcattaattttaagggaggcgacttttctattgctacaataaatgtattattagattcttaatgcatatatgggctgcagttatatcattgtaaggaaagtgattattccattattaataaagagccttattatcatgccctataaattgaactaattttcccacacaataccaaactgaccacatccccattcattttttcactcattatacactattttgtatgtctattagtttttcataagcaaccaccatgtttgaaaatatttgcttcgtagtttttaaaggtgaaggagctggtgtgtataaatcatatcatagagcagctctggtgtttagcaagtttcgtcataacataatcgtttgtcatcattgtaaggtggtggtaaaggttattttagagttgttcagaaagggttggtttgacccccacattaaacaaattatcaactgcggatgtagggaagatcatcgctaccgcgaagtttcacatcgtgtgacccccacatccatgatgacagtgacctacaaaacggaagcaccactgaggaggactagggaacaataatattataatgtgtttagattatcttatgcttaatatctcttatcccctattctaacctatttattaatgattatagtactttgtgttagttttgtaaaattttttaatcaagcactaatttaaaataagttaagtactactttataatattagtacatgatgaaagaaagcaacgtcaaccaatatatagtctgaaacaatgtaacagttgcagtcataccaaaactatgcataatcaagtaattagtagtggcactataatatattataaatcattgtctcaaagtaaatcatctatatatataaatatatatagataaaaggtaacaatatcacaaataaaatgaatattttccaaactaatacaaaaaaaaaattattgctagtcttgtatttattcagttgaagtagatgattttataattaagtaaaatcaaaatcattatcaggatcactaaggtggaagtggaacgtctgatcatcttgtgttacctgtggtacatagcatgcaataattaaaatcagttgttggattggcttgagatgcatccgtgttagtacgattttggcaagtacgtgcattatggctagtgcccctcatcccacacgtgtcgtatttcctttccctagtattttttttctccattggttccttccctagtggtgttaggattacatgtacttttagttcgaacaactttggggtctcttgttatgttagtgttgttacatatccacaatttttgggagattgattattagaacttgaatgtaattggaaatcctccttgaactgttttgtgaggctagctatttattcctttgtcgtgtggtaagaggcttgccatttggaggcatagtaaatcattgtgttggtatctaatataagtgatccatgtctatccatctaaacgagtgcttccgattgattatttgtagtagattggatattgttatttgtctttgcaagcttactccaatgaggattgagtagggaatctaagattgtggtgatgttcattcttttcataactgcccatatatgtctacatggatatccatcactcttaatcagttggcaggtacatttgatactaccttcgtgggaggagtacaagactctttctcgtattggaccgcgttagaatttttctaatgtgaatatctcacactcaccatctacataattagtagtgacaaagtagaatctttcctcggatatctccttggaaactttatgataaatgttgtgtgaagtgtaaagaactttctatattgttcatagtatatcttcatacaattggcccttggtgtttctggtagtgaattttggactcgaaatctttagagagatgcacatatttagtcttggagttacacaagtgatgaaaaactcatgcaacgaatagtctttatcgaggaatctttttcaggattgcattgatgaattcacattgttgtgttgtattcatcccagccaaaaatactcctctcaagaaagtgttacagattttttttacgcaagtatacgtaacgtttacaagtaatagactcacaagagactaacattgaaagtttagagtttcattatgcgggtcactaaaaatcactcccaactttttagtgactcgcaattttgtgcaggtcactaaagagtgtcactaaacggccaaattatagtggtgacagctatatcaacaaaagaacatgatacaaggcatgtccgccccaaagttgtttgacctagagcttgacaggactaaaggatcacctttctatgcacgtttcaatgcgttacccctgctaactaagttcaaaatgtccatgtggaagatgtatacaggaaaagagaatcccttggctcagataaaatattttgagatccagatggatttgcaaaatgtggaaactgatacctgttgtaggattttcccgtcaacagtggttcttcaaactagctgctgggaagttcgattcgtggaaatctttcacaaaagagttctacacctgattctcgtcttctagacaaacaccttgtaggctggaagacttagttgaagtcgaacagagacctgggaaacctatgaaagattacctctaaaggttcatgactaaaactacaaaagtcaagaatctaacaaaggaagaaagatatacaaccatcatgagtggcatactacctttggtgatctatggaaagatatttgtccacactcaacttaaaacatggtcgattatctcgatcgaccagaaggctttattaagcttaaagaagctatccgacaaacacaaactgggagacatgcaagtgccagaaaaacccagaatggcgaacatcccttagttccacccaacatacctaccagcacaagaaattctagccagccttcctgtaactagagtagtggaggtaagcataacagtagtaactctggccaaaaaaatggaaaaaaatgggaaatttaacaatccccatacgccgcaagactcaaaggagaaggaggagaggtttacgtgcttcactctcttaacgataactcctgaaacagtctacacggccacacagtccatagttccatacagaagcctcctcaagaaagacataagtaaaagggacacttccaaattttatcgattttacaataattttggccatgataccaacgagtgcaagcactcaaaattggaaattgagatcctaatcagaaggaaaaatccccacttgcgttgttacgtacaagacaaactgacacaagcacaaggtgcctaaaacaaagatctaatgccaccacatgtgggaggtcacttagtggtcatcattggtagaccccatatattgcacgagaaacaagaaaagctatggagcgctatgcttagactgtccatcacgagccaaactatgaagtcttggctataaaggaaagagattccaaacagttaaagcttgaagagcctgccatcgccttcacaaagagagatgctgctaaagttagattccctcgtaatgaccccttggtcataactacactgatagggaacatgacagttgtcaggtgcatgatcgacaatggaacttctttaaacatacttttcaagttgacctataagaagatggggctccaactgacagatctagcacctcgtgaacaactaatgtgcaagttctttggctaagggcttgcgcccctagatgaatacacagctcgaggagaaagactggtggcctacttgagcaagattaattcaaaacttattaagtcagctcaaggggtacaccattgggcaagtccccagagaagaaaataaaatagctgatgcacttgcccggttagccagcagcaccttgacaaacaagaccaaattggtgcccattcagttcttgaaagactcgagcatcactattttaaaagaaatagacatgtttgatgacagccctacatagatgacaccaatagcagcatacctctaaaaacaggagtcttgccagaggacagaaatgaagcgataaatatgaggagaaagctgcctggtatatcatcgtagacagggttatgtataaacgtggattctcaatgccacttctaagatgtgtcaccaaggaagaaactaaacggctattgattgaagtgcatgaaggttcatgtggcaatcatgaggatcattaattatttagattatagtggaattatgaggaattaatgagataggaaatttactcgataaattttagatctacttattaggagcttggttgcataggcccatggtccccacatggtataggataatatcatcttgtagactcaagtaattggtttaataattcaaatagaattcgaaaataggctatgtcttatttgagaatttttaccaagcttgagcaattttgaaaagaaaagagaaatagagttttatttgttaattaatactctttgtgggtctaattaataaatatatttaaattgtattttatttgataattatttataattattaaaataaaattagtatttaaataattagatgagatgagtggtaaaataagaaaaggcactttagttttattaattagttgaaataaagtg

SEQ ID NO: 24849 - DNA, 4150 bp, Cannabis sativa
  modified_base (33)..(36): a, c, t, g, unknown or other
ttggaagcacacccgaagcagctcgccataaannnntactgatcttaggaggaatttttaatgaccaaaaccgcttccaaaaatcagtattagcatcttcacactaagcacccttagattcttgatacatactaatttaatacataatttggtgtaccattaaagtggaataataataataataatatagtgtagaaaattcttatttattgtgctccccgactcatatatcttttttttatttttttttttaattttaacatataagacatgtcatgtcgtgctttaaaaaattagagatggtgtcatgtcaatattttcaaagggtataccagcacagcctgtaggcccgatatgttcgtgtcatgctttgcacgtgccgaccaatttttcttaaatataggtcagtcatttttcacatccaaatttaaatttatgctttacttttctatattattttttagtaattaatgagttaattactaagctatttattttagagtttcaattatatttatgtaatttttaaatttttatattacactgtatatataaattaatatctggttttagacttctagttttatattttttttaataatttaaattataaaattataatatttactgttatattaaaatgttattattatttttattattgttgaattttggatgaaatatcaacttcattaaatttagcatttagaatataaaatatccaacataacataatgtgcattaaacatacaaatgttacaatcggaaaaagactgatacatcctagcaacaacatgtgctaggcggtttgctggtcgtttaacaaaacgaattttaacatattgttgctaggatgtctcaatcttttgctgggcttgccgcatgttgggctagtgtatttgtgcttacatgtcgtctttcgtacttctcgtattgtatcgtgtttaagtaaatatttttcgagtcgtgtcatgccaatttataatattgtgttgtgttgtgctcaagcttattttttttcgtgcttgatcgtgctcgtactcgtgttcttcaaactcatgtcagtttcgtatcgtgtcaaaaaatttgacccatatttcagcactacataacactgccaaagtcaatattgatttgtgcatttgagattttgaatctttaaattggaactctattgtgactagtgttgatttctttaagcgcaacaaaattttcaatatttgcatttttttctatactaatattttgtttcatgctgctgtgtattgaacggttagctttaaataaaaaatataaaataaaaattaaaaaaataaatgtggattcgtttcaacttgaaaattgaactaattaaagttttctattttttattcttattctaattatagtttcaagagaaatttctcactgtgaaagacggtccacgagcaaacgaattgcttttttttttctttttttttttatatgtatgaatcaaaattacatatgattaatgatgcagaaatttataatcagcggcacctttttgaaccaagatagctcatcgtctaatcgaataacatgatttaccaaaccatgagctgcagaaaaattattgtgagccacgtggtacaaaactgtcattagaaatttagacaataaaattataatattctcaaacagcgcctccaactcattaataatacttttcatttgttaatagctattacgattggtgattcgtttactcatagcagaaaaaccagaacaacaatgaaagaaactgagaaagaagaagaagaagaaaaaagggagaaagacagagagaaagatcaattgtgtatccatcaagtgttcagagtacaataggaactatatttatatacatcagaatagagagagaggaaagaaaaggagctgactaacgactcctaacaaccttctaactaccctgaattaacaaaataacagttccttaactaactctgaacagagtccctaataatagcaaaagagttaaagtttcgactcgtaatactgaaatattatctaaaaaacaaacaaacaccaagaaacaacagacatcagaagagacaattcttgaattaaacttatcagcaaagtctctataatcgtaagctctccataaaatcaacatacaaaacaacaataaataaaacttataattactacataatttaatgaaaatataggtaatatacttcaatagtattctaaaaaatgtgtcaaatttaacatatatatgctaaaatttatgctaaatttaacacaagattattttatccacaataaatgcccattttttaattactatagtgtcactaattattataatttattaatttttataaaactttactttctttatttatcatattaaaaaaataatcattgttttatatattctcaataaaaatattgaaagtccatcaaactaatttttttttacttattttatatcttgtgtactggatcacaattataaatagggcttttttcattcctaaacttcaaaacatttttttttttacatttttacgaaattctacttagaaatctctattgcaactagcgctacaagttaaattgcaacaaaaaatcatatagaaatccctattataactagcgatgcaaccactttagaaacccaaaccgtaaattttttaaaaaaaaatagaaaaatagtatatgtggtaattctgcttataaatattatgtcaaatatagcacaaacttatattttatgccaaattttacatcttcattggagatggtctcattgtttagtaatattgtgtaatgagacaaaggtagagctagtaagaaacataaaaatatagagtaaataccattttaacttttgtattttacagaaattattaattgaaccttctattttgtttaatgataaattagactctttattttgaaaatcttaaaaaatagtactctaaactagtcttttgtccgaacaaataatcctatttagaagtgttatgataatttgaattgtttatatattaaaaactgaactctggttattattttaaaatatacaagacttaaatgttttatgtctttaaaattttattttttatttaaagttcatttaaatatattaataaaaaatgacatgtggatattgacttgacacttataaatattgtaaaaacataatttaaagtattattatgggtaaaaattaaacttaaatattaattatctacaataaagaattaaattaagatatttacattataaattactctttattatatatcaaaataaaaagttgaatcaacattctatttgtcttcctaaaaaaaaacattctatttgtcaaaaaataatattcaaaataaaatattaatccaaaaatattgaagtgaattaagtattaggtagagcaaaagatgagtagtttgtatgtatggataataatgttgatacgtgtcccttcctacatctacaactacaactacatctacaactataatttaatatcatgtcaggaacacggacacctcacctacgcccattaagtaacttcacaagttgataaatgtttgggattatttcacaactagggaactaaaccgcgtttcgcgcggtgttgttcaacttttataattttttattatatgaatatatacttgttgagtgattatgatttaaaatatagtattttgatatgtgtaagtaataatattaaaattaaaaacatattatttttaaaatatgtaaagatgacactttgtgataaatattaaaaatagtagaaataacaaagaaattgcatgtgtcattataaaagaataaatgaaaaagaaaactatttctaaatttaataaattggatttgtgactgatgatgtaattctattttaaaaaactatttagacctattttttctttaatataaaaaaacaatatataaatactatttatgaaagtttttacattttgttttataagaggacaactttaaaaagggggtgacaatattatttgcttttaaaaactaaaaaaataaggatttatattaaaaatttaatgataaaactaatccatatgaaatgtttaataagagaattaattttaataaattatgtggaggtgaaatatatgccttaaattgtaatgatgaaaag

SEQ ID NO: 24850 - DNA, 1375 bp, Cannabis sativa
cttccaatataaatctatcttctaaagtggaatagaaagaagaaaaaaaatcattttgaattatcaaccggaataaacaaacagatcatctaatttgagttccaaacattaaagtattatactgagcttcactaatctataactatcaatgtctcagagttctaatagattcaaaagaagagtacagtaagagtgtcagaaaatgtaataaccaaagttacaattttaaattaggtcccttcaaattcatatacaaaagacattgttttttggaactcacgaattgtttggcgcaatgccaagtagtataaaaatgttcagaaaactaatatccaatggaattatccgggtaagtggaaaccaagtatattcagttatgggtggtgaattgaggtccttgttgaatatatcattcggccttggcaggaatatggttgccaccagtagcaattttgaacaaataaaatgcagtcatgagagcactgcagcaaaatcagaccaaaatatcactttgtaggtgaagatgaagggaggcataggggaaaaccagtaacattacagaaaagaaaagaaaagaaattgcaagccttgaggaacaagaaaataagataattttcaggggtaacaatgaaagcaaaagctattaagttgtgtgtgtatttagaaattgtagtgaggtgctacatttagaagagacaattatgtgaacgaaaacaaaagtagactcatcagtaaagtatgagttgtattccgaatttcgtaactaaaagctgtacaatggtatttcatatataatcatcatcaagtgcagagcacaaatgaacgaaagatgaaagtaatggcacaaatcagatcacatgcaacacttacctaataccggcaacaaccccagctggcataatcttagaagtctgcaagtagcgctgtcccatgacccatgttagtgcagctgcacatactgttttaaatgaaactagcattacttccccaactagtgtttctttaagattaaggtaatgattaaaattgacgaacatgagaaaaatatgaaagaaccagtcttctaattaccgtgtatataatcagaacaccaccattcatattgacaccccaaattttattgaaaaaaccaattcattacatgcaaatattatgcttagatgcagttacttcaaataatacaagatagcaataaccatttctttttttgtgaaaagaaatttcttaatagttatttggtgttctagatagatcacacaggagccgagatgccagatcagtttcttattttttccaatttcattatcagtacttctagttttccataatcaactaagatcaatcagaatattacgatctgtccacaaaagcaaat

SEQ ID NO: 24851 - DNA, 4596 bp, Cannabis sativa
gctaaacattcatatctttcattttatccaaaagtgacagtgctttagtttccatcccaattctatggaaagcctccatcaggttattgtagattgcaacacaatataataacctctgactttcaagtcctcaaacacttccattgccagaattcggcaagatcatccatgacaaaagatcccaacttcttcatctgcacaagcaactcataaaactcatccatttttttcatctctgcataagacaccacaatgggattaaaactctcagagtttgtgtgccttgtcaactcgattagcattaccctgaatccatcaaattcttcaacaaatcacaagcctatccaactctcccatctactaaaaaagcctgaaccaatgtcccctctccttcatctcctgaaacaattcataacccttctcaacaaaccattgatgatagttatataagctataacatcaggttcaactctgtcactcttcatttccttccaaacctgcaaagaccctttatcaaaatcatgaaagtaacactctcctctcctccaccaaatcatcatccttaaaatcctcataaacagacaaagccaaatcgaaataacccattttaattaaagcatccattatcccattatacaaaaaaaaaaaaaaaacaatcttagtttaacatgagaatatagttatgcttgtaacatttttgcttaccagccaaatgggagaactttgaagctaaaagctggttcagtttgtagcttaaggaccttagccacaagttcaggggtgacacttcggagcttcctgagctcgaaaacgataggtggcccccaatgggactgattcttacgaaaagcgtcaacgatgaaccgagcaatgggggaccaaatggagagcgttgcggtgggtttcgacggttgggatggaaagtgatgtgggtcccatttagagagatcgggcggctgggattggtggccacttcggacaagtccaaggggcggttctaaaagttttggggttttcgctctgttcttagtttaatgacgacaattacatccgcgggtttgggtatccgcgtaatgaggtgggttgaggtcgaattttgagggataggtatgggccacgataagatatatgtatatatttaagttttaaaattataattagtacaattaaaataattttatgttttaggctttttattgattacattaattagatattttagttttcacaaaaatacttgtgatgatgtatattaataatcatactacttctttaaaaaaaaaaatgacacttaaccgcttattttcgattataattttgtatttattaattttttactatacacactatttcactagtgtttgttgttttaatgatgtttttttaattttctttgagacgttattttttttttcaaaaatatatatgtaatattaatgggtacccaatggaaattcttctcccgtagggtgattcccttcccgtcctcgactactttaatgtaaacaggtatggggtaagtttaggaagcagaaatgagagtggaggagcaatcaccgcccgcccgtttacatccctagttcttagctcttatcatttctttcttcttcttcttcttcagataattatggtaacactggataaggttggagaagaatgcttcttttcaagctcattgaacccacttatacactaacaccattttttttaaaaatgataattacaactttttattacaatctttttgccaacctctacgctcgaaattacatgtaggaatatttttttcataacgatattcgttataattacaatatcatccttgtaaatttttaaaaaattctatataatttatagtactagaaacatagttcttgatattccagtttactacgcgtgttcaaaaaatttcaaacctattttcggtattgtaaattattcgaaatttttaaaaaatttacagtaatgatattgtgaatataacaaataccactatgaaaaataattgaaaaaaatactctaataactattttcgagcacaaaacttaactaagaggttgtaatatgaaattcaccaatttatgtatcaaaatttatttccactccaactaaaacatcaaaaattacactaaaataatattgagaaaatacatacatgcatatattaagagtgatataaataatataagatagtagtaacataacatgccattacaatttttagtttcttccataactttgaggctccaatatcacctcacctcacctcctaatagaaaccagactctttacaaagaaacaatccctcaatcctaaaagactggtactatctacatcacaaacaacatttcttatcttttgtgtatgactgttaaaagacaccaactgtttatgcccatctttctttacttccattagaatctcaccattcttccgaatcggtaccccgaaacaaatattttccagtggtccatctccaacatactcatatttggtccaagaacaagaagcatcttcagcaacatccattgtgaagatacgaagaatattctctgtcatctctccatagcagtacaaccgaatcgttccacactgaaatttggatgaaataagaagtgaagtcccaatattcaaagtgtggcaaatgtatgagatggaatttctcgttactcaaattaaaactgaggataaagtcataataataattgtctaaatcatgccccaattagtaacaaactccttcccaatataaatggctgcctagaacattagacattataatatttacaatgtcttgagacatgctaatctttctccaataattggaactcattgtgtaaacctcaactttgcatttgttatggcaccaaatggcaacacatttgtaatcattatttaaagaatcaaatccaaatcccacaacaccattaggaaatctaggagacccttcaattataaagttccctggttgtgggagaaacatgaattctttcaaagcaggattacataacgccattgttccaacatcatttactaaaacaattagcccatcacagtgataaccactataccaaaagctttcatcaccaataggttctggcaaatgtatacttagaggttccatgacagacataagaggatcgtcctcaccacgatcatcatagtttacagtcaacaatttgtatgcgatcaagctatgatcgacatggtgggaaagccatttgaagagtaaggatgtagaggattggtttttggtaatgaggaggtggttggaaacaaatttcgggtcgttaatcaaacccgaaataagagaataccaaaacttgttcacaactttagattgtactagagaattggcaggcacccacaacatgatattctcaattatttcctttggcaaatcacagaatctcaccatttttgccatgatcgtcaatctaagctctctatgctatcaaacttgtttccaatacagtataagaaaatttccccactccccccaaaaaatacaatctgaaataaaatcaaaaagctcacatcacaattattgatttttttaaatgatcatatgtaaagagatacagattgaaataaagtctgacctcaacagtttaacccttttaattttagggaatgtaaatgcacattgaaaccctactttttcttgaaatagaatttaaaacagaaatttgcaaaataaaagcaaagtgttcccaaaaactaacgtttgatttccattcataaaactaacgtttcataatcaataattaatgactcaattcataaaactaacgttttataatcaataattaataattaagaattagcattaaattaaacaaagcatatttagaagaattagcttatatttcaaatcattataaggaaagagtaaatttccattacatattcaaaccaagaaccaaaaacacctaattaactttcctaattaataatttcaatttactttacttaagccttagctttattggagatttggttgcagcaagtttagcctcagattcaccagccttagattttttgggtagcaaaaccggattaatgttgggaagaacaccaccgctagcaatggtaacaccgggaagcaattttcccaactcctcattgttcctcacagccaattgaaggtttcttgggttgattctgttcttcttgttgtcacgtgctgcattttcggccaattccaaaacttcaacgccaagatattcaagaacaatagctaagtagatcggagcacggtaccggtacgttgagcgtatcttccctttttcatgaatcgagctatacgtcccattgggaattggagtcctgccgtgacggacttcgtcacagctttttttctctctctgccttttcttcctcctgctcctttggttgctttgccggtttccattgccagcaactttgaaggttttctctagtttttttttttttttggagggaaagactgttttggattttaaatttggtgtggattcagaattatatagggaacggtttgctacgctggctgttaggttatttttagtattaattttagattaagttaagtatatttttaattgagttttaatc

SEQ ID NO: 24852 - DNA, 2581 bp, Cannabis sativa
aattttttgtgacaatttttttagcaggtgaaggggggggggggactaaaacctaggttttacttttgacaagagcaacaacttcaacattcatagctttattccacataggattggcaagggcagcttggagagatgttggttcagtgagagatgtgtctgttgtaagataagctttgggtttataaatcccaagctttgattcggtgaccatagggtgcaaattttgggttgcttgggggcagagacttgagtgtttgtgtttgagatgtgtgaagttgtgtgactttgtctggatatattgtttgaactatgagatgaaggactgagagaatttatttgttaggtagatgactcagaagaggatgaaggaggtggggatggtggaggtgcatgtggtaaaatatgaataacaggagctgtggggacaacataagtagtagcatcacatatcaagggagccgatcagttattatcagcaatggagttggctgaaaacagagagtgatatgggaattcactctaattgaaagtgacactgcgtgctacataaattctactactaggatgtaaacatctatagcctttggagttcaaacaacagcccaaaaatagacacttggaagacctaactgacattttatgagtttgataaagtcttagcaagggaaaacatgtgcagccaaaaactttaaacatattataatcaggttgttgttggaatagttttttgaatggagagacaaagttaaagagaggagatggaagtctattaattatataggtggcagatgtgaaagcttcccaccagaatttgagaggcatgtcagccttggaaagaagggttaggccaatatcaacaacgtgcctgtaaattctttcaacacgaccttgttgttggtgagtgtggggacatgagttttgtttgacaataccaagatgttgaaacatcttgtaaatgggttcaaattatttgccaagattaaaattgtctctcaacatatgagttgaattgagttaaaagattgattgcttcaggttttagtttcatgggaaatatccatacgaaacgtgtaaagtcatcaacaaagctccaaataatatcgataaccataagtggaagtgtgaaatgaaggaccccatacatctgtaaaaattaattaaaaaggtgcacacgttttatttattgaacttttgaaactaaactgatgcatttgccaatttggcaagcatcacagaaatcgggtttattacactttgtattaggtgaaatgctagacaacactttgactagaatagggtgagaaggatgtcctagtctacaataccaaattatagtgaacttgggcttatcaaagactggagtgctggactgctctgataccataccagaaatcaagaacagttgttattgattcaaatgagagaaaagtgaaaaatgaagaaagatgaagatggagaaaatggactgctcaacacacttggagtacccctgaactataattattggcagagtttatacaagaaaagggagaaagctctttagagctgttacaacaataaaccgttataaacgttgtaagttagttaaaaaataaaactaatttgctaacaaactttctggtgtgtctgaatccttatttccaatattattttactaaaaatatttttattgaaaagaaaaatagaattatataaaaataacacatacttaaaaatctataaaaataattttaattatataatattcattatcagcacatgaaagagtactcattgtgtatcaatgatgaatgaatataaagtttcatgtcttttccttaataaactagtaactcaaaaatctaactctaacaagattagaaaaaaaaagaatattattatctttaaaatgataatcatcatttaacaaaaatttcttttacaagctcacaaattagataactgtcacataagtagtgttctattcgttgacatcagtagaatactcatccacggaaattgttgatgagaaatatgtctcattattattgtcgtcttgattttgaggatatatgtgaagatttggaggtacttgtaggcattcaatgttactttcaagcatttctatgacttcactcattgtaggacgatcacaaggttttagttgtatacaccacaacgcaactatgatcatcttctttattgtcttccaatcctcgtttgttgcatttttgttcatttctatgtcctttccttcattgaattgcttgtgtatccatatgggaaaaaagatgcgacttgagttttcagtttctgtatttacattttttcgttgatttgccatttccattaatagcattccgaaactatacacatcagatttagtggatactcttccaatatttttgtagaacaattctggagctatatatcccaaagttccccttgcagcggttaaagaggctaagttattttccaacgagcatgatcttgctagcccgaaatctgaaacttttggaataaaattttcatccaaaagaatgttgtggggtttaatatcaaaatgaagaatatgcatctcacaaccttgatgaagata

SEQ ID NO: 24853 - DNA, 2347 bp, Cannabis sativa
tatatatagaaattttttatggtgggaattcttatttagtccttaagaacattttcttaatcataaatatagtagatttttgaaattagaaattacttattgtatacttgtatgtacacaattaaagttttactaaaaataactgaattgcattggtactataaaaagttgataaaaattatatattccttccacttgtcaaactatatggactcatgctattaatttttgacaatatatattttttttctatacaattaatatattctatcacattttttttctttaattttaatagtttcctttttttattaaagaaaaaaaatagaaataatttctttttaataattttatttttcttttatgtatagtttattattttttagtacttttttgtctcccttatactccaagaatattttattttgtgtattatttttctttatatgatttttttttatttccttatttaatattttattcgtttattctttatctgagtaaaaaaaaatacatatatattttttttaatttcttataacgaatttgtttattttaataaaataccaatccctttttgttcttttattttttgaaattaaaattaaattaattttattttattttaataatttagttgaaacaacatattttaattacttagtaagttgatagaactcttttacatactaaatttaattaactccacatgttttattgtgtgttaaatatgtcaattttttatttgtgtcataacgtacatttataaaatatattattgtatcgtgcgatctgctaagaaattgtattgtattcgtgtttaaaatcttaatataattaataatcgtgtaaaattgtcaccacgaacacaatacgataacagtaactttcagctctaattgtagtttaattttttttttttttaaaaaaaagaatgtaaatgtcaaatatacatatgttagcaaaatataattaaagaaaaaaaaaagaaattgtacattgtgggttatataattttcagtattaaatgtcaaaatataacatattttaaatgtaaaaataaaaagttaattaaattttaaataatatttttataaaattaaatttatatatgtgtttgttgaaaatattttatttggaaatagttttatctttgtttatagttaataattaagatttttttggcataagagagaaataaataaaaaaaaaaataagaaatgcattgtttttattaagagaattacaaataaattagattttaaagtaaatattttcattgatttaatatgatatattttatattaaaaatattttatttgtgcttgattgagaacatagtatttatgaaaagagtaaaaaagaaatagaaagatgataaaaatgtggcctagcacaagagaaaaatggtatttttgaagaccaaattgactccaagaagaactaggcccatctggcccattttcttctccaccaaacatgctcgccatgtggcgagctcgggtttcttctacagttgtcgggcccagcataaccaggagcaaaaactccttttgtcccccagcccgactcacgcacgacgttgtggtccgggcgtgtcacgcactcgccaagcgcataactccctctcgtttcattcgtggtacagaagcttaaaaaaaaaaagcttccctcctcctttttgtacacaacttgtgtcgcccagtagtccacttgttccagtatttaggcaaccaacactccatacgtggccgaggttcattacatccaccaatctgaggctatcacgtggcactctaattttgactattgggtaattacatttttatcctatgcaatttgtaataagttttaattgcgcattagtctttttaccttcctataaacagaagcttgggtttttagtattcaagacagtttcagatagagaattcttgagaaaacactctaagcgctcagtgttagtttactgttctttcttaattaatttttttatgggtttctaagttcccttaatattaaggtggacgataaaactatgtgtatttaattaaataataatttttatgttgattctcagtataaatgcttataattttcgtttcttaaaataatttctttcatctttagtaacacatatttttgatagttagaaattattaatacttgattttatattttaataaaaaataatattatttgatttgatgtatttactttaaattatttcacttttaattagaagttataattttaaagcgaatgaaaatctatttttgttagaaaataattagtttgattactaattaaattatgagaatcgatataattataaatatttttataa

SEQ ID NO: 24854 - DNA, 1787 bp, Cannabis sativa
cgattacccattaaggcgggtaatcccaccccatttagagtgggtatctgtgggtgcccgttcccgcgggtcgaatttccatcactacctataaatgatgactagtatggttaacatacagataaggacccgaatggcattgcaactttaaagttagatatgagcaaatcttttgatcgtgcggaatggggttttctcaaaatagttatgagaaaaatggagtttgatgaaaattgaaattcattaattttggcttacttgacaacaaatagtttctcttttcttttgaaagattattggttctttgcttcccacaaggggtctcgtcaaagctgccatctctctccttatttgttctttatttactttgaggggttctcacggcttctccaacatgaggagcatgctggaaacctgaatggtttacggtttatctattactagatgggttgcttcgatttctcacttgttctttgcaagtgacaaccttctattctatcaaacaaatgaaaactcgtcttgccattaagacggtggtagatacttaccattgtgcttcaggtcaagttctcaatcctaataaatttattatgtcttttgcacccaacacaacttaagcgacaccaatattcttccatagacagcttgcaatgccaatatgtgagtatcatgagacgtaccttggcttgtcatctactccgaaaggtttaaaaataaaatttttattgggatcaaagaaaggatttggtgtcttatgcatacttggagttagaagatgcagggggtaaggaagtgcttttaaaagctatggtgcaatctattcatataccatgagttgcttccaatttcctgcgacattttgtaaacaacttgaatccatgatatctaattttttgtggggatccaatgaaattggaactaagatacactggcgcaaatagaatttactttgtaaaactaaagcttcaagtggtatggaattctgattttttgtgcattttaatcaagctttattggcaaagcaagcttgaagaatattgtaaaatttgaactctcttcttagcaagttgggcactctccatctatgacttggaaagggattatgtggggtcgtgagttgttgaaaattggttcaaagtggaaaattggggaagggagatcagttaggtgtggtttcgatccatgaattttgggccacacttctttcctcccactttgttatgttgggcttgttaatggtgtggcagcaaatttgattgtagaggagtgttgatggaatatttctttgttgcaacaatttttttcccattgaatgtggaaaggattctgactttgcctttgagtttctttctcaatatggatattcttaattatcatcatcacacaactcgggtcactacacttgcggatgttgaaatctcatctacttcatcttcatcatggtggaactatttctagtctctcaatttgccaaaaaaaaaacctaaaacttttgtttggcgtattgttcatgatgctctgcccatggctacaaatctagtaagaaggagggttatcactgatgcaacatgctcgatctgtcatgtggcttgggagtcaataggacatgccatatttggatgtaagtgtatgctcattccgtttggcgtagttttggattggaatcattataaactatcttgttcatctttctactttttacactaatgttgaaatggaactcatcatatgtactcttttgtgtatttggactgaaaggaaccatgtaatacatggaggaaatgcta

SEQ ID NO: 24855 - DNA, 2324 bp, Cannabis sativa
aaagatatgtgtagtaaatttatatttaaattgtaatagtttttctttttttatgttattcatagaaccacttaatcaaatatagatatacattgatttcatttcacatgcaaaatatcttcttcttttaaaataaataaataaattatcaaaaaatcaatcttcctaaactatacataatatatgatgacattcacatcaatgatactacattataaagatgtaaaaaagatcttctaataatccattttgtgttttctttaatatgtccatttctaacaaatgatgtatcactaaatcaataatcaaagcaatatctcaagcaaccaataagctatatcgtactaaagataggactgcccagctgcacttaattgattgaacaccaatatcatatatctcttcatccttgtcacattgatttcgaaatgaaacttttttttttttttaaaaaaaaaaactaataattaaagaattaatttgttcatgagctagctagctaaactctactataataataatgatgataatagtggtcttgcaattaatttacaacaataataataataattaataacctatagttccctgtaccaaaaccagatcatgccaccacctaataactgcaatagtatcaaagtactactttaattaacgtcatagcttttgctgtaaaaatcaacttcatcgatcgatattgtctcagtataaatcatcataacttcctcaaaatcaccattattcctcctgtaattaattaataattaatatgatgagaatcaactttagatttaattacaaagttattattaatcttacaatattattaagcatttaaaaaagattaattagttagaaaataaatttttagttttttttttgggaaaaaaaaaggaagttaccaaagcaatattgtttgtgagtttatggtatatggcaagtgtcaaagtcaagatacattttggttgtgatcatctttctcatctttatcaccatttgttcttctgtattccaattgtgggaccacctgtgtcaagaactatgtcattcaataaccaccaaaatcgcctttttttttcatggggatcaaacttatcacatgcttttataaattatttattaattttctttcgagaaaggaaaaaaaaaaataaaacaaaaggaagatcgacacattcgacaataatataaagataacaatcaatctccattcaaagcatttgcaccgccagttccatcaatgtcttgatttttaagtgattaaatatattatataagttgataatttgaaaaatataataaaatcgtgcaaatatccttttatcataatcagatggggttaattttgatttaaaacttagtttattatagtttaaaatatattgatcttaaatctataaaccggtttaaatataatataagaaaaatataatcgtagttttagtttaattttttttttttcaaaaaaaagtaataaatgtaaaaaaaaaaaaatggaacttccatgactcgattaatgaatcatgatttttattctaatgcaaaaataaataaataaataaattatagacatacatatttttatatatttttcgtatacgtctcgacatttattatttaaatataaatataataaattatcattgaaggaaaaaaaaaatgtaataaattgatatggtagggaaaatggaggttcatttactttaccacaatgcaattaaaactttactttcattaaaaatgaataaataaataaataaactttaatttctgaactaacctgatcttgggatgaatttgactttttatatctcttgtcaactctgtccattcttcgtctaatacgcactaataagtagaatcatacaagtcttttaattagtaataaattagaatatatatatatatatatatatatatatatcttgcaaccacattctttcaataacaaggaaatatttgaaaacatatatattctgcactgctttaagatatttttttttttacttattcattatattttatggctggagcctggtgaagaaatcaaaaagttactttaataaataaaagtaaaaaattgtattatttgaaactaaacattactttaacatatataactccaaagtacatcgtagtgttttttttataaatggaagtacaccgtagtttaagataagaaaaatgcaattttttgtacatttaaattttataataaaaatcgattgatatcatcaacaaatattatttaatcaccctattatatatatcatcatcagtcacaaaatattattattatcaaccatatgtaaaaaaaaaaaaaa

SEQ ID NO: 24856 - DNA, 3922 bp, Cannabis sativa
ctaagctgtggcacctaagacttgagcataccagtgacagagggttcaaagagctagagaaataaggtattctagagggtaagctggatgggaatctagacttctgtgaagaatgtgtgtatgggaagagtcgcagactgaacagtaaaggaagacacacaactaaagagccttttggatacattcattcaaatctatgcgaaacaacaatgatatccaatataggtggtgctaattattttttgaagtataattgatggctaatcaataaaagtttgggttcactttttaaaatcaaaagatgaggtattcaagacttttattgaatggaagaaattggttgaaaatcaaacagggaaaaaaattaagaaacttagaacatacaatggtctagagtactattctaaccaattcaaaaactattgcaagcgaaatgatcttgagagacacaaatcaacaccttaaaccttcaacaaaatagtttagctgagaggatgaatataatcattctggagagagtaaaatgcatgctaaaaggtgctagttttgaaagaaagttttggagagaagcttttaaaacaacttgctaacttaataaacaacttgattgaatacctctattttttttttcaattagttattattttttttagttgattgaatttatataaatatgtaaaaacttagtttttttttttttttcatacacacacatttgattgtttttactaatcattttaatttttttatttcataattatttttaatatatattttaattagtgtatgtataatgtaccatttaattgagtatataattagaaaatgataagttttattagttttaaatttcattcataattaagaaattaattttttaaaaatatataatttaaaaattaaaattagtaatttgtccaaattaatcattttatctaaatacttatataaaaaaaattcaatcactaacattattatatagtccctcattttttagttttcaaaagcaaaaactattgtgtgatcccttttataataattattctacattcatatatggagaaaatattcaacttttatttacacgccttatttattaaacctagaaacgtttgttattttaatttattttattataaagacatataattttatttaatttcataatttcaccactttcctatctatttcaaaatagtaaataatgtttcaaatttaaaaaagtttactttattaatgatacacacatcaaaataatacattttaaattatatcactaaatcattaaaaaaatatatataaaagtagggtggaagccagcttaattcatagttttattataaaggaaaaagttccaataagaatcttctcttatttggtcttcatgttgtatctccatgccattgatggttgacccttcaacttttcctataaccatgaaaaaaattacactaatcaaatctttagtcggtttaatggccatgaagtactacatatatgcataatcattttccaaagaaagacaaagaatatatactaaccatttagtggaagtagtcatcttcttaatcttgaaattctaatactaatcatcatgtaaagattatcagctagctcactgaagcatcgaaaataagaaaatccccaataagaaccgagaatcaaaaccacacaaatttcaagaaaaccaagcccaaatccaactccaattcccatgtgaaaccatgccatgtcataccattcttcatcactttcaatgtagccttctttgtcgatcaaattcggatcaagatctttgaagatcacctctcccggacatcttggcgaaagaggaggaccacaaagtccaagattttcaacataccatgaaataggaaagctttgtaattgagtgcttgtagggattcttcctaacaattgattgtaggagatgtccatgtatgctagagttgagatttcggccaaactcattggaatttgtccacaaagattgttgtgagacaaatctaatgattctagtttactcaagttcccaatttgattagggatagctccactcaaattattccttgacaagtttagttgaattagttccacaagatttgttaattcttttggaatatctccaaccaatctattacttgaaaaatcgatgattcttaataactcaagaagttctttatatttatattctcttcctttccaccatatcatagcattatcttgataaatttcaaatgtgttctcatcttgaccatagtaatgatcgaaaattattgcaggttccaataaatattgtatctcaaccaataaagtaaaattgttaatgcatgatggaacatttccagataaataattttgggagagatctaaaatttgaatgtatttcaaatgacatagacttgttggtattgctccatggaatttgtttgcttttagtacaagaatcttcaaatttgtcagtgattccccaatccatgttggtatatttccttctaacttgttctctccaacatcaagatattgtagttgagtacaacttttcaaggatggaagatctccccaaagattattattccttaagctcaatgttttaatcttatacattgataccattgaagtagggattggaccaaacaatttgttgttgtctaatttgagaacttccaaattatttagactaagccaacaatcaggaatatttccaaataacaaattgttagaaatgtcaagaatgattaattttgccatatcaagtctagtagtagtgcaaaagaaaggcccaaattctgtgaggaagttattggaaagatccaagtattttgcatttaaaagagaatttgggatagaaccatgaatattgttggagctcaagtcaatgaatgaagaatgcttggatctcaatgaaacatttggcaatgttccattaatgaggttgaaagatagatctaagtactctaatccagaagatattttaggaaaccaactagggatgacattagaaattccagaactagataaattaagaaaagaaatattcatctgagtttggagccaagaaggaaattgaggacctaacttgcaagatcctaagttaatatattgtaattgaaaagatggagcccaatttgatgagaaattcaatgaaagagaggtagaagataagtcaagtttttgcaatttggaaagttttcccaagtgtttattagatatatctccaacaaatgaattcatggaaatatccaagatttcaagactagaaagctccccaacactttttggtaaattcccacttaatttgttgtaagacaaatctaattctctcaaggatgatagtttgatgagattatgaggcaatgatccttctagttggttagaacttagatccaaaacctctagagaatccttattaccacaatttttgtggctttgtaagaaatcaatcagctgtgtcccattcaatccattttccctcaaaattatttgttggatgttgcaaagattgcctaaatattttagtatttcaccttcaaaaccataaagtctattctctgacacatcaatatgtgtaagaaattttagattttcaaatgaatttgggagaaaatgtagaggtgattgagattgctttagggtgaaatcaacaagattattgctcaaattaagcaacttagagaaagttttaggctgcactgaataacaagcctcaactagaatttttgtaagagaattggaagaattaatatgagaaagagaatgagcaatatctaatataggaaagtaacaaaagttaaactccaatatagataaggaaggagctgctttaaaggattgaaaccaatccatggctttggagaattttgtgccacctagtctaagaagccttagattaggaagattagaaagccaatgaaaattgtca

SEQ ID NO: 24857 - DNA, 2347 bp, Cannabis sativa
  modified_base (1700)..(1700): a, c, t, g, unknown or other
aaaagttctttcctttcttctaaaaaatgcatcattcttctggaatttgtggattgtttctgtactgtaatatgtataatgtcagcttactttcaaagctataaaggagcggtatatcttagctttgaaaactttatgtttcaggtttatgcaaatggtgggaagaccattgttttcactcgaaccaaaagagatgctagtgaagtctcaatgttattatcaaataacatagcctctgaggcattgcatggaggtatatcccagtatcagagagagagaactttaagtgcgttccggcaagggagatttaatgtgcttgtagccactgatgttgcagcccgaggacttgatgttcctaatgttgatttggtaattacctataccctttatcggtctttgaattatcaccatatcctgctactctgtttctcaatttcagtttttctaagccaatgtatacgtatgctattaattcattttgagcaagctgtaaagtgattttttgtactgaattatcaattcttattatgtgtgaaatcttttagtactactataccttcaattttttcaacttcagtttatgtttcaatcattagcttcaacatttttttttctctgcatgctctttattgtatcctgtaaagagcagaaatttagattgttatttctgctgattgaaaattcgttctttacttttttccttaggttatccactatgaacttcccaatgatccagaaatctttgtgcatcgatctggtcgtactggacgggcaggaaaagaaggttctgcgattttgatgtttactggtaaccagagaagaacagtcatgtcttttgagcgtgatgttgggtgcaaatttgagtttgttaccccaccaactaaggatgagattgcggaatcattagagtcattgtcatctattgaccgcgcagttgctagttttagtagtggacggggtgaggggaatagctacggggcacgtgggggtggtttccgaacctctaggagttggggcggttctgataacaatgattattcaagcaggagtagtggtcgaagtagtggacgaggttctggtggacgaggcaggggacgtagttatgggggacgtgggggaggtgctcgaagcagcaggagctgggatagttctgacaacgatggtgattcattcaagagtagtggtcgaagtatgagaaagcccaacaatagttggtctggtaactcaaggagcagcggggatgattggctaatcggggggagaccatcaagtaggtctccatcaaggggaggaggaggagacaggtatgctatatacattctctttcagcaatttgtattataactttatccaattactcattgtgttactgactagatatgaacttgaatacagggattttggaggttcttgtttcaactgcggacaatctgggcaccgcgcatcagactgtccgagcaagcgaggaggtttctaagtccaacactgactttttagacttgtggaggacactagggcttctaagggccagtgcaaacgtaaaacacaagaaattgctttactggtatggcagccaacaaagtggcttcctgtcccgctgtatttatccaatgtagtaagatccaaatgcgaaccaagatattggaattttctcctgtaatctcattgtttatttaaaatgatttttatatatatatatntatatatatatttatatattatttgagtctagtgtcaagtatatttcttttgaagttagccaaaagaagtgtatttctttaagaaaaaattacaaattaaatgatccgacaagtcacagacatgcacgtgtattatgtattaaaatgattttttatttttgtcaatggtagatttattctaagaagagattctagagacactttttttttcttaacacaattcgcaaacatacgtagtcttttaagttttaaccacacttattatgagtagttaattgtatttattacaactcaattatattcttattttaagtagtaaatatgttaaaatgttgatttgttagttgagagagagtagaagagaggaaaatatgattctcattcgaataaatttgaattccaatcttatctttaagagctttaaactagtttagaaacaaagcctttagaatgtcagctaattgatcttttgaagaaacatgagttgttttgataacactttgttgcacattttcacgaatcaagcgacaaccaatctcaatgtgtttagttatttcatgaaatactggattgaccgctatgtgttgttgtgctgacttatagtcacaatacattattacaggccctttgtgttcaatttttaattc

SEQ ID NO: 24858 - DNA, 3624 bp, Cannabis sativa
  modified_base (3406)..(3418): a, c, t, g, unknown or other
gattgagtctccaaggtcgccagtcagaaaatattttttttgcacaaatagctcatagtatattcattcatgctatataaatctttgtaattaataaattacgcttatttatcaacttatcacacatttaaaatttatgctaaattagattagtaggatcataatcccacttgttacttgattagctcataatatatataaatcctaattaatttatcattaagcttatcaggatattacagctcccttactggattttaattatacgtatttatagctctcactcaacagtatatgtcttgtctaatgcgtacagaagaaggcataagacatcccattgttgatacttaaggattttcttctacgatatttatttatttttgaaacggtagaaactatttctataaataaattatgtctaatccttgaagtctaatgattttctttagaataagttattgggataatgtcctagtattttactaatgtaagatacttgctaaggataccataagctattggttgttgatctcaacataaaacatgatgctaaaaatagaaattaagcttaagtcttttgaatagaccaagcaaggttttctatttatccttgtattcttaaaattttggactatctatgtgcatggttagagctagttttggtagctttattttagagtttatttcatggacttttcattacttgtttatattgacaatgagtcattatcacaagtataatccttgtcatattatggtaggttcttaaaaaccctcccactaagactaagtattgtgattatgtgtttagggactacagtggtacagatattttcaattgtcacgacatgagtcaatacaatggaggttgtgggattatctattactttagtatgagacaatggaacatatcaaaatcaaataaacactttctactagtttgctactttggtgttgaaatatttgtagaaatattttgataaccatgaaaagatcatcccttatggatttgggtaaattttaatagctaagcatacgtctaattatttttatctatgtgtggtatcgacattttgagatagtaagtttgaatacaatctagagttacaagatctttgaactgcacatatcaaatatttttctacctttatcaaatcaaatgatcatttaaagaattatatcacaataattttctaaggacttgacaaattatccataagaatttctatatttaacaatttatttagtccaagtatttatgttgtatatcctcttcttgcaaagattaatcttgtaaaaactaccatgatcaagatctatacaatatatattatatctataattaatataaatcacacacaattgataaatagataataagcaatatgaaataaatagttctaggcataaatggatatgttacagaatataaagctcaatttcataaaagcaacacataatgaaatcctttaagaagaaactaaaattaaattaatactccaaaatatcataatgattgttgcaattcataatgagaaattgaaataggatttccaaaatataaattggaataattttttttgaaagttaaaacaatttatttaaaatttaaaattttgagctttgtcttctagcttggacattgtccacctcaccattgaactatctgtctcaactactcactaggatataaattcaaatttcaagcaggtggagctaaaaaagaagaatcaacacatggttagtagatctagaatcaataaccaaatagggattaattattctctagaacacatgagttcttgacaaaagagttagaaataccttgattctttgccaaaaacataaatcactggagtttccagtgcccattttcaccacaaaaagagaattttccatttcccttttccttgctaacaatgacactcttagccttattagatgtgttaatagatttaagtggcttggtcttggtattcttctacttctttttcttattgaccttaaaaatagaggcaatctttgcctcagccttggctgcgccatttgtagcaagagtagtagtaggagctttattacttcttttctgttggcctctaatcaaactctcaaatgtctgaaggttgtttttcaatttgtgaaagtaaaacatcaacttgttcatgatgtagttcgaagtaaagggcatgaagactagagataaactattaaggatcaaactgacttgtgtttcctaattgataatagttccatggattttatcttcttagaagtgaccatccaccttgactaggtgatcatggacatgctaattaggtttcatccgtgcattggtgaagttcttgatcgcatcaaaacaagcttgatccaatgccttcctaaatatataagtcaactgattcataatattagccaccatgagagtaccagcaaaccttgttctcaaggtatcaatcatgtttgatctagtatataaattattcttttggaatgtccatcagtctgaggatggaaagttgtactgaattttagtttggaacccatagctcgctataaactctgcaagaatttagaagtaaacttcgaatctccatccgaaactatagactttggtacaccatgtaatcttactatctccttgacgtacaaatttgcatactgatccactgtaaatgttgttttaactggtagaaaatgtgcagacttcgtgaattgatctaccacaactcaaattgaatcaaataaacctattgttttaggtaatccaaccacaaactccagggtgatatcctcccatttccactcaggaagtgtcaaaggctgcaacaaacgtgctggtctctcatgttcaaccttgatcaactgacaggttaggcatcgcgatatgaattctaccacattcttcattatctcactccaccagaagtagggttgaagatcttgatacatcttggtggtgccaggatgcaaggagtatgaagtggtatgagcctcttcaagaattttgtttctaagttctggactacttggaacacaaacccttgtcttaaataacagcatcccactatctgacactgtaaaatctctggcttgactagctcaaacttattccctgatcttcactaattctggatcagttaacttagcagctttaattcgttctaacaaattagattacagcgtcaagtaatgaagttttcctacaacaaactcgatgcttgatctgaccatgtcctctgctaatagacgtgaaatctaaataaaactagttacctgcctaggacccttcatgctcaaggcatcaaccactacattagccttcccaggatggtaaaggatctcacagttgtaatccttaaccgactctaaacaacgcctctatctcatattgaagtctttctgagtnnnnnnnnnnnnnaggctcttatggtcagtataaattccacacctttctcaatagagataatgtcgccaaatcttcaaagcaaacactaccgcggcaagttctagatcatgagtcgggtatcgttgttcatattccttcaactgacgagcagcctaggcaataacccgatcggcttgcatcagtacacaccccagaccctatttggatgcatcacaata

SEQ ID NO: 24859 - DNA, 2991 bp, Cannabis sativa
aagaatttttgtgaaagtattattggaacattattaaacatgaagggaatgacaaaggatacaaacagagatcgcatggacttgtctgatttggatataagggaagaactgcattttgagctttacaagaatcgtttgttgaaaccacctgcatgttatactttagcaagctcattttattctgatccagataaattttgtaaatttttcaagtctgttaaacttccagatgcttatgctatagacatctcaaaaaaagttagtatcacaaaaaaggtaatatcaggattggaagcttatgagtgccatgtgattttgcaacgtcttcttcctcctgcagtggaccttcatttcatacacgaggatattactattacactgtccgagctttctaatttctttcaaatgttatgtgccaaaactttactagataaagatctggacaaactacaagagaggattgcactaattttatgcaagttcgagaaaatctatccaccctccttctttgacatcattgttcacttggctgttcacttaccacatgaggcaaaacttgttggacctgttggctatcgatggacatatccatttgaaaggtttgtaattgattataaattgtaaatggtattttctattttcttgaagattatggtaataattttttttcttctcttttacagaaattgggaaaaactcacaaactatgtgagaaaaaattgtcagcctgaaggctcaattgcagaggcttacattgctaatgaagcagttagattttgctccatatatggccatgacattgatacacattctaataaagaagatgacaatttaggtcctaaacaaactcgttcatccattcgtgtgttctcacatcatgttcaaccatttggagacgagggatctgtaaagttgactcgtgatatgttgcaacaggcccacttgtttgtactgctccattgtgacgagttagatccgtatgttaggtaagtgatatatttgcttcgtcgttttctccttgcttttcttttactacaaaatgatcctaatcaattagttttcagtgagcataagaaggaattggagggaacatctgatgtcaaagtagaagaaaggcataaggaagaatttccttcctggttggcaaatcatgtaagtcactattttgtcttttcatgggcttgaatgttcttcttcatattgcttgtacaatttataacatatatatctatatatatttaggtgaaacggttgcgtgaaactgagccaacgaaggtcactgatgagcttttttcattagctattggacctgattttgagataaatacttactctggttgtgtagttgatggagtaagatttcttactgaagagaaagatagccatagaattgctcagaatagtggtttattctgtttattagaacgcgaaggtaaggttgtggagttttatggtaatttatgcaatgtgtgggagttgaaatattcatttggccaccgagttgttttgttcaaatgtaaatggttcggcacaaagccagagactggaacatctggtgaatgcaataatatcactcgcatctgggtcaagaatatatgtgatcagaatgctccctttgtacttgcaaaagatgcagggcaaacaatttatctcaaaatcactgagggattctgttggaaatatgcccaaaaagtgaaatacaaactgttttgggatgttcatgagttgagtagcaaaatggaagttgatgaggatgagactactgatgataacctcaactcttgtaattttcaatggaatgaacaaattgatgacattgcaatgaaaagtcttgttcacgaatatggtgacacagtagtgattaatgatgatgttgttccaaatttaagaaaagtaggtgtgggcctcccagctgaaatgtttgatgatgcatggttcaaggactgtcttaccccagatgaaagaccatgggttaattacactggtagtgaaagcgatcgcgacgacatcagctcctcctcaagtgacttgtaacgttacatgtttctttcattctagttttttttatcttagaaatgttgttgtgttttcattgtttgcttaactttgtaccaattggatagaagcctctctctcgtcttaactttgtaatgactggattttcatttcgattggtgtcatttttgcttgtttgaatctgtcaagacttctttgtttgcttatttattctaccttgacaagtttctctttatcttcattaatttgctacatatctgagcatttccttttgggaccaaattgaccactgactatcattttttgatatggagtgaataatatgttcttacaagaaatattataaatccgagactatgttgctacgagaatatcatatacatgttcatttatttactgtcctagtagacagatacaaatgatattcaaaatataggaaaaggggcaccgataatgtaaatagcattcccatacaaattattttgcttctgaacttttacttgtatgattgtgcttatgtaatattagcgttgttaaaaattaattttatcatttagtaatgtttaagaataaaattattttgcctagtgtaattgcatccttgattgtggatgatttgatttaataaagattaatcattatttaaaaaaaaaaaaaagaataaaattactttgcctagtaaactttttcacttatatgttgtttgtgatattagcgttattaaaaatatatttttaactttatcaattagtaacaatttaagacttccgttaaatttttcataaattgtgctaacaagatatgacattggtagacaaattcatgtactgaaaaatagaaaagtgaaaaaattttataaggaaacttgattaaaaatatatgagtaatttgtggcgaaatctctttatattttaatttttatacacttaattctcttatttttttattttatttttttttttttgtagcaaaact

SEQ ID NO: 24860 - DNA, 2339 bp, Cannabis sativa
aaaaaaaaaaaaaaaacctcctccttaatatcatccagtgttattttcacattaggttttccaacattctgaaatgtagagctcagatttcgaacaacagatctagatcgtaagacagggggaacagagttcttaccttggctaagatcactgttacattgcctatttgcctctatgaagtgtgcgaattcagttcgaacatcatcttggcgttgcaactctcgaagtgaagatctaggagacaagattcacatacagaaagagttccaacttttagttctctcaaagctccatcttttgttagtcggtttattctgtctaggacaatatagcctaaacatatatatgccatagatatatttcatcatcatttgaaacctttttcctcttattttgcagaggcaatgctactccaacaattcattatttaaaattaatccctcacatggctcaagcacataatgtttgttactctattttgcagaacaaataggtgtaccattcctagaaataataatctcattattaataatccaatattgaaaaaaataatcatgcaaaagagataatgaaataatgttcatgatacattcattaataaaataaatattgcttaataacaaaatttattgtaaaatttcaaacgaactctaccaacacccttggcagacacttatgatccattctccaagcgcatagtcacctcgccatcggctagctcccttgacgattaaagtatctacatagaagaacaaatatgatttacggctccacaatcaacaatccataagaatttatcatcctctatagaatttgatcttcaaaacatagcttgcgtctcccaaatccttcatttggaatttttcagctaaccacttctttacatctgatatcctttctacattattcccaataaatagaatgtcatcaagataaagaactaagaataccactacattactattaatgtattcatatacataggccttgtcctcattttgttcgaagttatactctttaatacttttattaaagttggtatttcacgatctagaggctttctttaatccataaatggatttaagcaacttgcacacctttcaatcttttactagtaacacatacccttctggttgttccatatatatggtttcatcaagattttcatttcgaaaagcagtcttcacatctatttgtaatatctcataggcagctatgtgaagaagaatgcaagtgaatttaagcattgtcacaggagagaaggttatgtcatagtcgatgccttctcgttgtgtttagcccttggctacaagcctagctttaacggtctctaccttccttttagcatttctcttcttcttgaaaagtcacttacacccaatgggtgtaatgtccttaggtggaatttcatatttctagactttattggtgcgcatggaatctattccatggcattgttccacttatctgagttagggtcttccattgcttctttataagtcaatagatcatccttgtctgtgttagagacaagaacatgtacttcatgttcatagcggacaagttgtctcacaatcctcccactaaaaaaatgtactgggttttccttttcaggaactgtggtattcgttgtcagtcgttcaactaatggtgctgaaatcattggttcagaaatctcatttctaatttcttcaaatttcctctgaatatcttatagtcatacacagttcaaagctaggaacaagttttctagtcttcgatttaagaacatgagcaagacaacctcaaatacagaaatgtttcaaaactaggttttgtcccattccataattccataggagtattgattatgctcttcaagggtactacatttaaaatgtaaggagctaccaaaagcgcgtatccctagaagtgtaggggcagtgatgagtggcacatcatcgatctgaccatgtctaacaaggtttggtttgttctctctataacaccgttctggtgaggttccccaggtgcggtaagttgggacaagatcctttcttccagaaaattgtctttgaattcggaatccatgtacttgccaccacgatttgatcgaagtgtctttaatgatttatctaattacttttcagacatagccttgaagtctttgaactttccaaaagtttcagatttcttggccattaggtaagtatgactgttatcttgaataatgatcaataaaagtgatggagtattcataactacttcgagcttgaatattaataggttcgcacacatcagtgtgaataagctcaagttgttctttggctcttatgccttttacagaaaaaaaaaaaaaa

SEQ ID NO: 24861 - DNA, 2211 bp, Cannabis sativa
attatttgtacggttttgtgtccaaatttctgtcttgtatccatctcaaatgtaacaatagcattatttggttgaaattcactttgaatggcttctaataatttgtatgaatgacaccagatgtctaggctttatttttttcgaaattattctcatattcccattattaattggttttgcagaaatccaatcctttatctgaagactgcttcaagccaagaaagagtagcggtgaaccaaagcagcagagtgtatttcaagagcagcttcgagccgaacacgaatcatttaaagctgttttttccagaaggcagcagaggaaagggcttgatttggaggaggatgcatagtttgtgggaaggtccaaatttgttttcttcaaatgaaatgttgttccatatttttgtttccattcttttatacaggttgatgtagctgtttgtagttgcggattagctcttgaaacaagctggttcaatcccttacacttgtatattagctcattttgtagaaacagttatatatattataaaaaaaacactgatttcttcttccatgatcatcctttagctcatgtcaataacatctctttttctttaagtgaaataatggcaagttgagtgggttttgtgaaggatttacatgaaacagttgaatccaagcatatttgagaaagttggagagtttaattaagattagtacttttaagagtggattatgttcagatcaaaaaaagaagagtcgattatgtttgttctgtctatgatactctgttatttttctacttgtttaaggagtaattaatttttaaatttaaattactacttggtttccaattatttaatttagtggagcacataaaacaggatcgtcaaaagcgcctagagctgagcttcgctcttgtcgcgcatgcactatttgtcagctacctttttttttttttttttcaagagaaaagaaaactttattcaaatagttaaatcagctattacaatttcctttaacaatgccaggagattctttacagtaaaccaacaacctaacaaagaacaagaggataatgtgtaacttcgtttgcagattacggaacaaaacaaatacgaacattaaaaaaagaacttaacaattgtttgcaatcagtcacaagtaaaccaaaagtagaaagcatgtctagaaagcgcttgagttgcaatgagactatcggtttcaatcaggataacactccgattcttctttttaatccaacttaaagcttccttaatacctatgatttttgctatcataggttgaacttcccctagacgaaacactgcaaaagcttcaataatgttaccatcagctccacgggcaatgatacctccatcataggcacactcttttgcaaacactgttccatcaacattgattttgatcattccatttactggtttaacccacctcttcacttgtaacaatgccagacgaaactaaaagtggttcaaaacatttctcacgagcaaattttcattgatccaaaatacttttgctgaaaaagcaacagttgcaaccgaacaaaccttagtgcatgtttggcatcataactgaaaaactgttttttgattttaaaaacagaaaattattatttgaaaatactaaccaaacgcgatttgtgttttgaaaaattcaaaaacaattttttgttctcatttctaaaaatgcttttttgaaaacaaaaaatagaaaacaataccaaacatgctcttaaagtcccataagaggtcatttcgagccttccaaatggaccaagcagtaacagtagcctcctccatgagagtagagttacgtctctcaacaacacccttaaaccatacatcaaactccaccgaattcatatgcctgctatctaaaccagtaagattgcaacatgagatggcaaaaggacagttcaccaacacatgtgaaatagtctcattagcatcatgaaaaaacaaacagctggtttcgacaggtacatgtttctgaaagagcttaacacgagttggtaaacaccttgttaaagctttccaaagaaagtgttgaatcttaggaagaatctttagcttccaaaggtggcggtagaaattaaaatactcttctagacatgtttttttatgctgtaagaaatggtatgcacttttgactggatagaaacctaaattttccttagactagaaccaacgatccatatcaaca

SEQ ID NO: 24862 - DNA, 2844 bp, Cannabis sativa
gaagagacatgctagacaaccagtaatatacctccaaacaaagaccttgccataaagcagggactaggaggacggctacatggtgtccaatcgtggcatcataacacacagaggtggtatcctaacaccaccaaggagcatttctaagaaagaagctatatagctattaacaaaagtgcacaaacgctctatggaaattacaccgaggtgcaaagccagtcgaatgtagacgggatcaaactacggcattgtacgggcctttagaaggctggccgaccatgtccttagcaagttggccagtcatagaatccacattatggctagcaaccacctccacaagatgcccagccatggcctcatctaatcgacaaggtagtgctacctcaatattgctggccacctggtcttgcctatgccagcccaatccactagcactttgctctcatacttctggtttatagtgaccaagacgtacacaatatcttgctagtaggatcccttgacaaaagggaaagaagaagagatcaagccaactcaaagtagtatggcggcgcacaaggagctaccaggctcgttaacaaacagatcgaggaaagaaattctttgcaagagaattactccctgataaatattccttgtcaacaaatcccatgtagcaagcatgttcagacaaaactgaaaaggttcgcaccattttacaagataacagtaaaggtggatacaagtctagcgagtacgaagagaacttgaagtcagaatttctacccaaacactgaaatagggaacataggtaagtactctcattggccaatttgtcaattatgttcctctaatgtttcatcgtgcaggaacccctaaaatcgctagtactcacggccttcttggagtggtcttccaccgttcttcaattgtggtctctgctttgctaagctgcacaggggtagccactacgtgatttcaaaagcggataccaagatgtaagcttttgttacacattagaccgactatgtctaaaccacttgctcgcaagattaacttcttaaagttactcatttagttccacatgcgtactatggtctccaccctaaggaagaacctaggtaaagcctatgaaacttggtgaatagcaagtgacgaagagacttgccagcttggtcgcttgaggggcacccatattgtacaatacatcgaattggcacaataaacatatgcagaaaaattttagggcttaaaatatgctactaaacctacctctaagtagtgcatgcatactttgtcttgacaaattaaatctggacccttacctatcaaggccataagaagatagccaggacaatcatatgtccatcatagatggcttcaaggtttaataatagtcgtgttaaaaaatagagggcctataggcaaaagcaagaacatgaaagccttgaggccgaatatgagactagtttgcatgcatgaggccaaggccctgctagaaccgtataatcaaaaaagacctagacagagctcctcttataggggccacgtactgggttatggctagggcagagttccttacaagatccaagccatgttaagtcttaagttgaacattcaactataatagactcaccattaaggtttatacagagtttccaaggaaaccatgcatgaaactaaggttgtatatgcctatagagcaagattcttgctaaagtcaagagaggacagaaaactagccacctacttgaaaccaagccccatgacgaccaaggttcacaagccttgcggccggggtcccatgactcaaccaataactggccagggtcaccgaacccaggcatgaacaggcaagctttacagggtaaaactctaaggctggccaactcccatgatcaagccttagggccggccatgcctcaagcaagacctcctaggccagccaaggtaagttttgaatcccaattgtttttctttaaaactcaaatatgtgcctcgtattctttatgactcaaagagtcaagaatcatacgaaggccaaaatcgaatattatctatcaaaaagtcacacattatacattccaaaactatcataaggatcaaataccaaaaagattacaaaataacatgaatcaaaaaagtttttcgaagcttaaaaagcttaaaacttgttaatggcaggtacaaaaaagagatacccaagaaaagaagatgagatgtataaaagagtgaagatcaaagatccaaaagcatgctaggaaaaaaatgaacacttttctagataaggctgtaaaatagagactactacaaacaagatgagagctagaaagtccctatctgacctgatgtctgcacagggacttggggggcaaatgttatcctaattttagtcctcatgacatggcattcttaagtggatagaaccagaaccatgtggcagtacaactcactaaaaggcaggtgaagtcaacacctgagcaaatgaagaccccgacactcaaacggggatcaagcgacaaaggggtggtcgaccagccttgggatagcaccctgaccgaccaccctggccatcaccctgactggcccccctggccatcctccttgccagccaccctggccatcataggggcctggccaaccaaggagtgcactggaggctttgctagacagccctgcacgtggacaacagatatgagctgggaattgggccctaaaagtccaacagaatggctgaataatatctagattcaagggcactttagtcttttgtaattatctaacaaactatgtaaatatcaaggatttaaacttgtaatcaggggtttaggccccctatataatggccttaatcctagcctagaa

SEQ ID NO: 24863 - DNA, 2085 bp, Cannabis sativa
  modified_base (2039)..(2041): a, c, t, g, unknown or other
gggtgtgctgggacaagaacttgtatgaagaataatcattatctgtatgaaagactttcaggtttgcattaaattgatttgtaatcatacgatcaaagttagtattattttttttaaggaaaaatgcagaaaggaagggagagtgaaagttagggcttgttaccaaagaggtcacaccagatcactgatccaccacttaatattagttttgtaacatatacataagcaattttttaataagcgattaacttagatcagaacacaagattgcaatttggtttaatttatgtataacttatataattaaatcatttaatttctgctaataaattttgtagagagagatgtcgtacttgcttccacatttgcactctggatgggctgttgatcagtccatcctcgctgaggaagagcgccttgtcatcatccgatttggccacgactgggatgagacctgtatgcaggtattttgaattcatcctaattccccaatcctaaattccaattctctttattttatttttcttgatctactaattgtctttttttgggggggattttaatttctgttttactaaattctgaacttctgtattcctttagcttaatggaattgttaattcagatagttgtttcatccagatcctagtaaagggtttttcccattctttgtagaaatttcttaattttgaaactgtttgcgttgttatttttgcacatcttacttgagggtttttggtttctttataataccaatccactacataccagaatcaacagttagagttcttggtctatttataatacttctccactatataccagaatcaacagtctttcttttagtgttcttattgtatgttctgttttattgggttttctttttttttggcatttacatccatcatgtcgaagttcaaacgtgtacagcagagagaagagaagagatgagaacttaggttgaaagtaatgtgtaattttatatgttgttggttcttcactttgcttacataaaaaactctgctatgtttctattgtgggtctcgtatttgatatgattgatatatgtctatatgatgtgtattgggatttaattctcataatttcatgtggatatcagttgtagcttctttcatggagtctttttgcaatgtacaatttgtttgtggacgtatttctttatttagtttttgaatgtattgttttgttgctgaacagatggatgaagttttggcatcagttgctgagacaataaaaaactttgctgtgatatatcttgtggacattactgaggttccagatttcaacaccatgtacgagttgtatgacccgtctacggtcatgtttttcttcaggaacaagcacattatgatcgatctcggaactggaaacaataataagatcaactgggcccttaaggacaaacaagagttcattgacattgtcgagactgtgtaccgcggagctaggaaaggacggggtcttgtgattgctcccaaggattactctaccaagtatcgctactaagctcttatgcaaatctataaatatttgtggttatatttgttagaattcactgtaacttgtttctctaagaatctgtcgagtttctcagagatttacttctctcaaaagtctaaagtcttatgttaactatttggacgcttagtgcgatgtccagaagaatgaaatacaatattacaacttgattgaatggtgtgttagtacataactacatattcttatcttctaatgtgttaaattatatgaatttcacttgaatttggtttttgagcacagttatcactaggactgaacattttggctgggattgactcggacccggccaacctgcgcagacccgattcaaccaacccggtcaattgagaaaacccaatccctagtggcgggtcgggtctaagccggtcaattctttcgggtgggtttgggtctaattttttatgtgaacccattcgactactttttattttgtgtataagattttagtaaaaattatatgtatatctttatatattaannntgtctatctaacggcaattcttggtttaacggcaattcttggtt

SEQ ID NO: 24864 - DNA, 1895 bp, Cannabis sativa
  modified_base (60)..(66): a, c, t, g, unknown or other
caatataaggttttcttaaattctcatgtgtttattttcattattttagagaatttatannnnnnntgttaatcaacatacttcttagtaaatttagatcctgctacaatattcccaacaattgatgctatttttttttaataatgtaaataaagttattgttgcatgttcgtgttgtacaatgatccttctcatgcgaaagttggatacaagttagttaaaattagttgacagttatttctgttaactgtcctagttagtcacaagttatttttctattttggtttttaattcgaattgaataaattgaaagagatcaatttttttagagacatagtcttgtacagtttctactttctctctctcaatgtaattctctccaaaatcaataaaacaacttctcaattcattgtttgctgctggtattgctactgctgttgttggtttattgcattaacattcttgttggtattgttgttcttgtgtttcgctcattgagcatctaatcttgattgttaagggtgatgatcgatcacaacaagtggtgtcagagcaaggttttagctcaatcaagattcaaattcgaagactccaagaatcatcgagaagatggcagtagcactattaaagattgacaagttcaatgggacaactaatttcaggttatggaggatcaagatgaaggcattgcttgtcaacaatggaatttcagaagcaattgatgaagagagtcttaaggagattgaagatgagaagaagaagaagaagaaggagatcaaaactaaggcacacagtgccatttgtctcagtttaggtgatgaagttcgaagagaagtgtctagtgaagacaaggctttaggaatgaggaacaagcttagttctatatacatgaagaagtcctttgctaacaaactgtacttgaagaagagaatgtatactcttagaatggatgaagggaaagacttgaggaatcacttggatgaattcaataaaatcactcttgatctcagcaacattggagtgaaattagaagaagaagaacaagccattatttagctgagttctttgccaagatcttatgagcactttgttgatacaatgatctatggcaaagaaactttcacaatgtctaaagtcaaggctgctctgaatctaaaggaaattcagaagaaaacagaggacaatcaatgtgacaatggataagaagggaaaccgataaccagggtcaaaggatgactcaagggaaattacagaagaagtgattttactgtaaaaaggaaggtcatttttgtgatgaatgcttggctttgaaagccaaacttaagagagatagtaagaaaaatagggagaaaggagaagctggtgttgtagcatatagctatgaatctgcagatgtgttagtggcctcaaatgcagattcttatcatgaatgggttcttgattcaggatgctcattttatatgtgtctaatcaaagaactgttcaatgatcttaaagaaagaaagggaggatcagtacttctaggtgacaacaaggcctgtcaaatccatgaaattggttcaattgtgctcaaaatgcatgatggactgaagagaaagattcagaatgtcaggtatgtaccagacctcaaaagaaaaaaaactattatccattggggtgttaactgaaagggcttgtaaagttaaaattgattataagtgtcttaaggtcttaaaggattccaaaatggttattaaaggagaatttaggaatgatctatatatcatgattggtgaaatagttgctgattgtctcaatattgtttcatcaagccatgatcaggaccaaactaaaatgaggcacctaaggcttggtcatgtcagccaaaggggtctgtttgagttagaaaaataggg

SEQ ID NO: 24865 - DNA, 1355 bp, Cannabis sativa
taaacgaatcaccaatcgtaatatggtatcagagcacgaattccccccctgaatgcaaacatggcgactgttggagctcaaaatcaatcgaatccaccgaatctgggaaatactgcaaattccaaccctgcttctcaaggaaatcgcaatcgtgcatcagatgagttctctccggtatatttctcacacaatatttccgttaaacttaacgatcacaatttcttgatctggaaacagcaggttcttgcagctattcgtggaaattgcttgctcaaattcattcaggattgtcctccacctctaaaattcttatctgatgaggatcgagcatctcagacgtataatccagagtttcttgattgggatgttcaagaccagttgctggtctcgtggatcttgtcatcaatgtctgagagcttgctcactcgaatggttggttgtcacacggctcgccgaatttggtccactcttgaaaagcactttactcttcaagtctcttccaaaattcttgagtttagaacaaagttacaaaacctcaagaaaggcagtcaatctctgaatgaatacttgctgaaagttaaacagcatgtcgatttgcttgcctcagttggtgaagttctaagtgatcgtgatcacattgcagctatattcaaagggcttccaagtgcgtatgacacgtttgtcatctccaccaatacacggatcgaagggtatactgttggggaaattgaagcattgctgcttgcttcggaatcaagaatcgaaaagactgatcaagaacccgaattaagtgccaatattgctgtctctgagattgaccagtagcctgaagccaatctggcttaccaaaatcgattcaaaaccagctatcctcctggttttcccccagatatcctttgcagtttggcacgtttgcaccaaatttttccagtccaagaggcatctctcgaggagctccatactactattcaaatggatttgttccaaggggatatcaccaccaacagcctcagtacaattcttttcaaatcaaccgcagcagtactaccagaggaggcagagttgctactgcttatggccgcctgcaatgtcaactttgtcacaaaataggccatacggttgtggattgattttatcgattcgataaaagctttactggtgccccaacaaaccatgcttctccttcccctcaagccaacctgatgcatacttcacctcagaatgatagcaattggtaccccgattctggggctaccaatcattgtactcccgatgctcaaaacttggcttcaagctccaattatgaggggtctgaatagttgtttgttggcgatggtacatgtttgtctatcaag

SEQ ID NO: 24866 - DNA, 1760 bp, Cannabis sativa
  modified_base (1708)..(1717): a, c, t, g, unknown or other
aggattaagctattaccgaactgctcggggctgaatctctataaaattcatgtgtcttattattgctttatcatatatctgttaatacatactatttatcgcttataaaatagactcattgttgttggctaaaagcgaagtcaataagaaccaaaactagaagtagaccgggaccctagaacggtaccagaactaagacttggacttggaactgtaactggacctagacctagacccagaaccgtaaccgaacaaggcccagactccaactcaaacctagacatgaactaggacccagacccggatcccaatccagacttggactcgggacccgaaccaggacccaagctcagacccaaacatggaaccgaacacgggcacagaaccagagacgggacctagaactacaccccaatcttgatctcggacccaaactaagacctggaacccgggacctgaacttgaaccagattgggacccgtgacaaggatctagatcttgacttgggatccacgaaatgggtcttggaaccgactcgtagtccatgtttggatttgggactcagactaggactaaaacaaagatcttgacctagacctgggacccaaaactagaacctaaacaagaaccgccggactaggaccctggaacaagactaggaccatgacaaggaccctaacccacaccttgaattagaacacagacctagccccaaacccaaaccaagaccggaactcaggccaaaacatggttgtgtacccagacagggaccgagacccagactcggacctacatctgggacccgatcccaaacattcactcggacctcgaaagggatccgaatacgaacctagactcggacccaggcccaaactgggatcaaaacctgaaacatagatcaggaccaagatcctaacccagacgcagacctggacccgtacctaggacccaaactcagacctagacccgatccaaacatagacagggatccagacttggacctaaacccggatccaaactagaactaggactcagacccgacccacacccaaacccgaacccaaacactgagtttgagtgtgggtctgtgtccgagtcctggtccagttacaattttgggtctgggtccagatcctagtgctggtcctattcttgggtcccgatccgcttttagttttggttctagtttcaagtcatgtggtacagatcgtgtccaagcattgagtcttggatcccaagtcctgaggtgggtcctaggtctaggggtttgggtctggggtcaactctcttggatcccgatccaagttctgaggcccatgttttggccccaatttgggggcccaattcctcggtctgggtcccccatctatgttcgggtcctaggtcccagtccatgtccaagttcgtgtttcagtttcggttcgggtctcgggtctcggtccgagtccaggtcccagtttgggttcgagtccgagtttggggtcctaggtctgagtttggttcatgggtcctaggtccgaccctggtttttggttttgggtctaggtgcgtgtcccagtctaagtccaggtgccggtcttggtttaggtcctaggacataggttccgttccaggtcgtagtcccggtatgggttctggtttgagtttgggtcctattttgagtcctgctacattcccaagtctgggttcttgttgggttttatgcccnnnnnnnnnntctatttcaatgtaatccaaattattcaatatcaataaagtaa

SEQ ID NO: 24867 - DNA, 3345 bp, Cannabis sativa
tgcctctaaaattactcgagccgtcaatcgatagagtccattttaattttgactcagcatttagacatagtaattctttgtcagcttggtcttttgcggttgatatgaagtctgcgatgaaattagctaggacttgtgatttgatcaatgttatgggctggtagactatgtcatactcgctcaattctatggcccactttgtcagtcgttcagaaagctcgggcttgtgtaatatgctccgtaagaggtagcctgagactacaataatctgatgacattggaaatatggttggagtttacgcgtagcggtgattagggtaagtgcaagtttctccagttgactgtagcgtgtttttgcatcaagtaatgtcttactcacattttatactggtagttgctttccttcttcttccctcacaagaactgcactgacacccgtatctgagacagcaaggtataggtagagtgattctccattttttggtttcgacagtaacataggtgacgtcaagtactgtttcagttgttgtaatgtggtttcacattcttcagtccaaacaaaatctttgacctttctcagagtgctaaaaaataagtgacatttgtctgaagatcgagagatgaaccgactgagcgctgccagccttccagttagacgttggacatctttaatgcaggttggtgattggatgtttttaactgatctgatcttgtctgggttggcttcaatccccccttttatattttctaagtacctcaaattcttgtctcaggtggttgatatgttggtcaacaacaagggatttgatgagcatgtcgtcaatgtagacttccatcgtgtttcccaacatttatgcaaacattttattgacgagtctctggtaagtagctttagtatttttaagaccgaacgacatgactttgtagtagaaagatccgcgttctgtcacaaaggcggtcttttcttggtcgtctagatgcttgagaatttggttgtggcctgaaaaggcatccatgaaactaaggagttcgtaacctgcggtcgcgtcaaccatcatgtcaatgtgtggtagaggaaaagagtccttcaaggacgccttgtttaagtttgtaaagtcaatacacactcaccattttctatttttgttcttcaccacgactacatttgctagccattctgggtagtctacttctctgattgaaccaatatctattagcttttgaatttcttcattgatgatttaattttgctcaggagcgaacctcctcctttttcgtctgactggagggtagtctgggttgatttggagtcggtgaactacaacttctgggctgattccttgtcatattgttgtgatattttgcacacgcaagtgcacgtatcgtttacaagtaattgactcaccaagagtgaggtcgatcccacgaggattgttgttaagtacgttaaaacgctccaaagacgatttaaactaaattaaaaatatactaaaattaatactaaaaataacctaacacatatcgtcatgtgaccatttaaatcaatctcgttgttttcttaggaattgtatgagtctcgctctgaattatggagtaatttttgtgcctattcgtattttatgctctaggttatctaggttgatctctatttcatcgaggtcctccatttgtggctcgtcaagtgtaaggtgcaaaacttcttgctgtagttgctacatggtcattgacttctccttgaatgtattctggtaacaatctcttacgattttttaaactccctagatttttttgataccccattttgtcgagaacctgatgacttgatggtaagtgcatggtacaacatgcatggcatggatccaaggttgaccgaggattacattgtaggctgaagggctgtcgatcactaggaatctagtttgctcattcacgccctcagcgtacacaggtagaatgatttccccgattgtgtacttctgctccccactgaaactaattaaaactgtagactttctaattattgaactttcgtcaagtcccatttccctgatggcatcaagaaataaaacattagctgagctttcattatcaatgagaactcttttggtcacacaattggaaatatataatgaaataacaagtgcatcatggcgagggttaatcaaatttgaggcttcattgtcaacgaagttgacggtctgtgccgtcaagtgactagtttgactgattgtggattggctgcttctcgggtgtgtcttttggccgctgagtatgtgactccacttatttctgatcccccaaagattacattgattattttcttttgaaggggtggctctagtggtgtaggaggtctattctcaccccctttctcactttcagatgccatggtcacctttcctttttctgtcaaaaggtcttttaggtggcctctcttgagaaatccttgtacttcgaaccttagagcaatgcattcggtgtgactgtagtctgaatggaagtcacaccattttgttgtatctcgcttgtttagtggtactttggtttttttttttttggaccatcatataacatttcccatgttcttcattatggaaacaatttcagtaggttgaacatttagattgtagtctccaatagcttgtctatttatacttgtaggctcgtgagaattgaaagacctttgtctgtccgatccctgccatcctacgagatatggctctagcttatttctttcaacccttttactccttgaatctcgacgatttgatgtgaatacttgggaaggtaggttggcttatcttcttcccattttatttgagctcatgcctttgccaaaatatcttccatggtacgacacgggtacttagtgagctctttgtaaagatcagactccatatgaagtccttggcggaaggctataatattagtatctacgttggaataaggaatggaaactttctctctgttaaatcttcccacgtagtctcaaagtgattcacctcgcttttgcttgatgcggtataggtcgtctaaaagtttctcgagtttcttgctgctagcaaattgttcaacaaacacatcggttagttttgcaaatgaagatattgagttattttgtaaattaatgtacctgtgtagggttgggccgacaaggctggacccaaaccctttacacatgcaagcttcacgcaagtcacgaggaattatcgtcgtgaacattctttgtttatattgtccgatgtgatcgttaggatcagtcgttccatcaaattgtttcatggttggaaaattgaacttccacaatctctactagggcaattactattggaatttattttacca

SEQ ID NO: 24868 - DNA, 2050 bp, Cannabis sativa
gagagagagagagaggaaaaatgaaaagaagagtattttgggtagaaattgaaacaataacatttagttgtacaaattaattatagatctaaattttattaggggatatttttttaagcatgtacaatacaattttctagataaatgctaaaggacacatagtgcttagcacacatctttttgaagtataatattattattagtgtaatttaatgttggtccctatttattttttttttgatataggtccctatttattttactttaataaagattacaaaaaaaaattattaattaatgatatgaagttatctaatagtgatttttgccccgtaacaataatagaagaatgctaagggtctcctataatttaataatttattgtaataatttaaagagaatattatcaaatactcaagaaagacatagaaaaaagaaaaaaaaattgaaacaagaaaggagcctccatttcaatttaatcacgtgctcttaatttgagcccttaaaccctaagattgctgtaaaccccaaaccctgccattcccaattctcctcactatctcatcaatggctcgcctgatccgacctttgaggaaaattcttcattctatatcatcaacttcttcttcttcctcttccaaaactatgcctttactgcaacttctcctcttaaatccccaactctctcctcaatccccaagaacatacatttctgaaatgcgcaaatccgccttcgatggaaaccttcaaaggctactccgtaatgagatccaatacgaattggaggcctctcctcctgaccaggtaacttgtaatttcctatttttcatatgtaattagttagctttttttttggaacttgggaataaaagtgaaattttgttagtgaagtttggaatttattttcatcttctgaagatgttgctgctagtttgtgattgtttaatcgaaccgtgatgatagtcaaagaacctaatttttcgatcaaaagaaaccaggaaaactcctccagatagctgatcccataatgacatttgggctttgttgacatactaaattatgaaggtgattaagtacctttttatttttctcttcagtgttgtagaattgtgaaggtgatcccttaatcacctttgtttgtttctatgcttcaactatataaatcttctctatatgattggttaaagagcagtacagcatttagtcattctgtttcctctaatctgggaattaatctttcaaattaaattttgattttattttcatgtttagtagtaattacattaaaaaataacattaattatctaaagacgagtttgtaattacaaagtgtaattacactcagttggaggtttcacgagaattcggtagtgtaattgagatttgagaccctgtactacctcgaagtacatgatttactttgtaattgcttgattgaataaacatgtcaaactttctaattattcagaattacactcaattccaatattggctttctaaaccgcaccatagagaacaaacaagtggttattgcatcatgagtctaatatctatgccttgtttcttcctgttacagccagttacaaaatttgattcatttacaattgataaccgacctggagagcaatgggttagtttgaaaagaaaatttgaggatgaagacattaaaattgaagctaccatgtttgatggggttgttacttcttcaaaaactggtgcacctgttgttggaaaagatgatgtggagtttcacattagcacgattgttaacattaccaaagagggaagtggtcatatggttgagatcatgtgctcggcttggccagaagaaatagagatcgatagtgtttcgattcgaagacaagaaaatgtgcctgctaagccttatcctggccctgtattcaagtaagaactttttctaattaggaattgaacttatttggaatacatgagcctgtttaaacaaaagatttgtctttttagatttcggttttatgtgagggcacctaatgaagtattttttttctgttgtgtattttgctcagggact

SEQ ID NO: 24869 - DNA, 3447 bp, Cannabis sativa
atcactggccgccatttaattactttgtaaagtcatgaattaattaataataaataattaaataatatccaaaaatattcttattaccatgcttaatgctttgtttgcttcataacatatattcaaagtttaaacagctaccttattatattaattaaaaacatatctaaatacataagtagttttttcattattattatttttttgttataaaatataataataataataaaatgttgttggagcgtggtgtctttaatcaagattaaataactttgattacaatttattatctgtcaaagtgaatgataagtaaagaaaaaaaaagatatatatgttgttaattaattaattaatcaaatactgtgtaatatttatatatatatatatttatatatatatccatgtgctaatgttccataaaatcatataagaaaattcgtagttaaatatatcgaatctacattgcagattctttaaaccatatgtttggtgtgttttcacgtgcttaaaagtgagattagacaatacaactagttttatcttatttccaaataattaattgacatctaatattcttataatcatcacctaattaaacaagtcatataattattattttatatataatatatatgtatatatctctcaataatggatataagcatatagttcttgttttgatttaaatttatagatcaaataatccggtcttcataattaagattgaaaaaaatattaaatgtgataatataataattatttataattgtccaattgcccattttttttaaaaaaaacgtttggtgaatgcatgtcattaaaataaatttaatatttgagaagaaaaaaagaaaaccttaaaacacaatatatatatatatatgccgataattacttattattttttgctttaaatgctaatcactgattaaaaaactcctggaacattcttaaagtcaatattccaattaactcattatatataaatataatttctgaaaacgtatatataaaaatatatttttttaaaattagaataattagggcttataattatggacctcaaaacttattttgccgtttaaggacatagaataaaacagttgttatcagacaattccaaattaataaatttgtaaatctatggtggaccaactgaaacgattgtaataacataatatcatcaattggccttatggaaataaataaataaataaaaaataataattatgtgtatatttcattacaatgtatttgttcattactttttcgatcactacttgtttgtgattatgatgaggacttctcaattctcattttctttttaatttcttctgaaaaatacattaaatagacaaaacgatattatagtttgccaaaaaattcttgaaaaatacttgtcatttgaccataaatggatttataaaacaaaagtacttttgttattacaactacaaatatgtaaaatttgtaagattgaattgatctaacggttaaaaattaatatattttaataaaaagacaaaattcattgtatatgtatttatatttgtacattatttcaatgaacacgcaatttgtagacttgttaactaatgtaaaatattggtggtataatgatttaatgacataagtaaacttaactaattaaaaatgtgggtagctaacaatatatatatataaatattaataagtaaagtacaattataataatatatgctcgaaaaagagtaagtacaattacaacactaatattcctttggttcttaactcatcactttggagttggtagttcgtacacattacatacatagatatatatacatatacataatatactacaaatacaagcattcatatttatatatatatatatatagagaacctgtttttcaaaaggacccacgtgcccaattggactaaattggctttaatttgaccgaaatgaagaataatgaacaccaaaagattctgatcctaatcatccacgtaataatttccgagaaaaaaaaaagaacattttctcatcatccaaacagatcaccaccagatcgatttttgacagtttgtgaaaaattcactgttccattccaaattattacacaaaatagatatgaattatataacaacactttgaaattgtaataaatctctgtttttcacataaatattactcaaacttgaattgtacaagaatatttttctttaattagtagaaaaaataataataataattatcaggtttctttttttttttttgttaattattagagattatataatttcttctctacaaaaatattgataattaattaatactattatattaacctctgtacaaaggcgaattagcttgaacaattttagataatttcgattgccggaaaaccttaatcggactcggaaaataccaactccgattctttgaagattttacctcacccgtacctgaatcgaccgacctcaccggaaccgccactgacctcgacctcatcatcatcgtcttcctcaacgcggcgttatcttcatccaattcgattttcttaaccgaatcaacatcgtgtccttctctccgactcttcttagacgacctaaaaacggaccaaaacgacgacgctttcccgcgcgaaccggcaccggaaggcggtaattcagaccgatcgccgccgagatcggaaatagaatctccaccgacgaatcttgatctggaacgaagaaaaggaatggctacagacctcgatcgacggaaagctggctcgctctcgatgagactcgacaatcggccaacggaaccaagacctgaaccaccgtcgacggaagaagatgaagaagacgacgtcgttgcgcaacaaccacaaggcttaacgtttgcgcaatcaggacaaagactcccaagtcgttcccggagacaaacaggacagactccgcttcttcgacgcttggaaggatgtttcgaacatttccatacctcatcttcatcggtgtaaaacgccattttctcgggaaaacgattttctctgagattttctcttcacttttccgttcaattttctctctgtggtttctctttggctcaggtttaatataagacagtgtgtggggtttgattgggggagacacgttaaccctggttatttttaacctcgggttaaaatttaactcaggttagttttggacttcgtcgattggtaaaccttggtggatggaagaaacgccgtcgttttaagctgtgtaagtggagcgagagcagttttagtgtgaatgaatgttagtttaattgtgcttgttttttgatttatttacgataatgccatagggattggtgggttggttgttttttggtcacacgtgtcaaagctagtgtttggagtattacacgtgtggtcacagttcacatctggaataggactggtcataggccaataggtgaaaatggacccaaca

SEQ ID NO: 24870 - DNA, 7514 bp, Cannabis sativa
  modified_base (7470)..(7478): a, c, t, g, unknown or other
aataataaataaatctatttcaataatgatgatattaacactaatatgtagataacatttaaaagtttaattaatatatcataaattctaataaaaagttcaaaagaaaaattctaatgatttatatataggtaaaagaaaatacaatgtctgtttctttataaaaaaaattgggatgatttcaaaaaaatacaaaatcaacacaaaaaattacaaaaatacagttggtacagaatttttaatatttttactatttttaaattttatatacataaaatgtagtcttttatgtatttttatgttatatctttgttattttgtttattgattttttgttatttatatattatttttttatgtggttttttattattttttttgtgcttttataaaataatgtaaaaatatatatataaaaaataacttttaatgtaaaattgtaaaaaatttacaaaaaaaaattagtgttttttgtaattaatccaaaaaaaattcttatattacaccagagctcctaatcctatgctgtgtatatgaagctataatatttttaatgatttatttaaattaattaattagcaaagtaaatcatggtgatatattattagggcatgttgcctcaatctaataagtaatctacctctctctcaaatatataataattaataaaaaatttaattgtaccacaatttaattaatttatttattttataaaagacaaaaggcatcatataattgcatggtaattttaataatatatactgtcatcaatcatgataaatgtgtagatttcatgctatgaaaaataataattaaattaaacaatgataattttattggtagacattactttcttattttgttttatataataaaatatgtttcacagcacttgtagatttttactcttttgaattgttgttttacttaaattgttcaaaactatcccattcgttgaaaatgttgaccaatatactgatgtgatgtggtagttaaaaaatatggttaatattattgtaagaaattttgtaaaagttatggattggattttttattttttaaaataataaattgaattttatattatcaaaaattatataaaatagtattatgagtttaatttattattttttttaatataattaatttaaaaataatttttaatacgaattgatacgaaaattatatttgaatttgtcataataactttaaattgaattattattaatttttattttgacaaaaaattaatttagaatattatcttgtactattttataaaacataagaactaatttgttattaaaaaaataaataatctaatcaataatttttataaaatataggataaaaatgatatttatcctacaaactcatttaaaataattattgagaagtaaaaaaaatgggataaagtttgttgtgatatatgtaaaaaggaataaaagataagatatatatgcactaattattggaactctttatgaggaaactccacatgaaattgtctagagactaagaacaagggaaggtatatttttcattggaccatgtggaagagttgttagtagtgaaaaaatatattaataatattattacatatttattttataataataagaaggtatatattatgtatttaatttgaccattagtggtatgttccatatatataccacgtgtaatagtatttttgatcatcttttaggtttacatcaccattcacttaaccaatctaatagatgcatttatgagtttttggtatagatattcaagtaacttaattttacatgatatcattgatatgtattatattaggtgatgaaaattaccaatttttaattaaagtaaaaaaaaaaaaaacaagattattattgattttgttcattcttttactctattgattatacattagtgatgataccacgtaaattattcacattactaattcaaattattatattattattattagatcaaggtaattagaatattcatacttgaagagtttcatactcaaatctctttcttaattagcagccaaatgaattgtttagaatggattggaatagatatagaatgatattaattagattaagataattaatagatattattgtcgccaaaaattaaacttaagtatttatttacaactaaaatttaaatttaaatatttatattaaaaattactcaaatatttataataattcaaaaagaatagtattatattatttttactggaataaaagtaatattgtttaattaatctaaatttttaatagcatagaatagctcaaaattttaaaatctcaccaatttaataaataaaattttgacaataaaattataaataaaattttcattctttcatttaaattatttttaaatctaaaatatatttacaaaattaaaatattaaaaaataacgataaatataattccacacaaataggattagttattgagtcctctagtaaaagaatgtccaagttcgaatctcccctcctcaaagtaaaattaaaaaaaaataattatctattagtttaaccctatgggtcaaaccagccctaattaaggtggtgtttggttgaaagtaataaaatgaaaagaaatattttttattccattattttgtttggtttaattttaaagtattggaatattatttcaatagaatgcattttctaccatttttctaaaatgactattttactttgaaataaaaagaagaccgttccaatgtaacatgagaaaaaaattattgatttttctatgtattttaaattttatttcattcaattcctactcgtaaatttttattccttccaaccaaacgccaagtattgcaatgtcatttcaatgcgttgatatcgcttgtagctaacaacaatgagtccattaaagcgattataaacgattaataataatgattaagcaaattgaacacagagattgttatagaggtttgacccatgatggtggtaataacctactcccttttacttttattaacttgtgagagaagaagcaataagttcttgatctttctcgaaaactcttacaatagttttagcaacttaagtgctctattgaatgaattaatatagaatcaatgaaatgacttcagtatttataaggaataattatatcacttacacgtacatttaccctgggcgatatatacgaaattgccatgaaaacgactctagtgagactgtatcgtttaccctgcacaatacctttgtcacattctctaaataagcaatatctgataaataattcagctctagatgacatactgacaagatttgcgtctttccaagtctaatgaataatccatgtgttacccaaataaacatcataccactttgtacagattttaagataacacaatagaatgagatttttatcattttagtaaaatgactattttattttataataaaaagaataacaatttaaatgcaaaatattttttttttataaaatttaaatttaaatttaattcaattctattatttctatttttatatttttattctcaccaaaatatgtataagctagactagaagaatctcattcatggtgattattctattcatgatgagataatgtatcttctttttaatttggcaaagcacaccgtccaagacaaccataacgccacatacaacaacatccacaatcatattctcatcctaattttcctaacactcggtgcgactctagtgggacccacctctaacctactcgacatgccacgtgtgatgaggcgcaccagaacttatcctggaccccccttctctcactcgcctcatttaaaatttcaaccacgtgccaaacaaacgtgggggacccacaccaacactcattttaatttcatagcgctagtgtcacagccgcctcctgttaaaaccaaaacagttccgaatttcaatacacgacgtctaacggtctcgtaaggttccggtaaatatctcaccatataaatactgccacgtgttaatctagtgtcacccatgtaactttagcacacatgtcgcttccacgggctataggcggtctccaaacctcctattttgactgtttgaccgggtatactaaccggtaatagccagtcgtctcaattaaactaagtataaataccaagtagatggctgaacttggatttcatttcatttgagtaactgagaaatagtgagcctttaattttacgtttttgcccttgcttgttctctttatttacgtttatacccttctccggttatatgatagctgccggtcaccgggaacctgagagccaccgctcttctcctgctcttggattccctcgcttcttatttttccgttaccgccgccttaggtaaccggtgagccaaagatatatacatatttcgtattaaaatgccaagccctaagagtaatcggagagtgaacgaggagaagaatcggagaggaaaactgacggagaaagcgtcgtcgtttcacggaaaaagcttcactactgatcaggcgacggcgacttctcaactccggcgtccgaaaactctaccggacttacttccgagtcgaagtttactcacaacatctctatcttcatcttcttcgatgatcatcgaaggaagaccgattaataataagctgacgaagattcttctcaacgttacgattcaaggtagcgtaggagcggttcaggtgttgatatcgctggaagcgacggttggagatctgattgcggcggctttgagtcagtacgctaaggaaggtcgccgtccgattttggtcgccaccgatccgtcgagattcaacctccattactctcagttcagcttagaatgtgagttttcctattccaattcaaattcaatcgtaaccgttcgttaatttaatattgaagaatcatttgatggaatatactgttggacacgtgtacggttgagattgattgtttgttttgtggaatatatttgtaggtctagatagagaggagcaagtgaatggattaggatcaagaaacttttttatgtgtccaagtaaaacgacgtcgtcttcttcatcatcatcatgtgctaatgaagctgagaaagcatcaaagaatggcttcagttggctaaaattcatggaattcaagttttaattaaattatcttattgacttatttgtttaaaaaataattaaatagtcaatgattttgaattatttgtacaaatatatatatagattcaaaaaaaaaaaattgaaaaaccaaaattatttcactaagaaaataagtagtattggatttttttttcagtaaaataattattggaattgaattatttgggtttggggacccttattaggagtgtagtggtttcaatatcaatttcatatgaatgtttgtacagtttgaaatttggccacttgtgtttgaattgtatttatttgtagtgaatttgatgagaataattagataatggaagcttcatttgtcaaatatcaccataattattggaatgaaatgatttatttttaatagtcccaaacacaaattgtcaattagatgttaataattagttttattgcttataatttatcaaaatatatctagttagttgtgcatggattatggtgaactttttaatttgactagttggaagtaactctctctctaatataattcactcacctaaataagatgtataaaagtaaggggatattgcagaatacgcagtcatttttctttttggaatttatggtaatttaaattaattgtaaaaatattgtttttgtaacaaatttatatataagaaatgtctagaaatttatttgggggcttctgtattttggattactattaaactgaatgaggcagcctatctcctttgcgtttattggatttcttcggatatggatgtaaaatttttgtttaacgagaaaattacactctatatctttttcatattactttcttttatttttattctcttttttaaaatttattatttttatctattttttttaaatattgtaccaattttaccatgtcacttcaagatactcttcatgtctcttatgccagggtattttaggtacaggtatgtttcaattaaatataaaattaaagataaatttgattaattgattaataaaaatactatttttcaacttaccccttgtttcttctactaaaactgcaaaagtgcaaatgtttataaattgagtattattatttggtattaatagtgtttaacactttttaggactagtttagtatgtattaagttgtattgtattatattgaattgaattatatatcatatttttatataatattatgttaaactttaatttatactaaaatattatatattgtaccaataaaaatgaatagttttacataaaaatacaattcaatataatattatacaatacaatatggtgtaatacggcataccaaacaaatcttaggggtgtcgtacataagcaccactacttataacttttagcatttctcttacaaatttataaacacatttttaaaaataagaaaaatatatttactagaattttgtccttctactctcttctgtctttttgttagagaattctctatttttaacacatattatacttttttaaagagaataattttaaaataatataaaaataataaaaaaaaatatgaaaatacggttgtataaaattttacatatttttatgattttatttacagaaaataggtcttttgatatatttttatattatactcttattaatttattgttttttttttgttattattttgatgttattttctgttacttttatgtaattttcttgttgttttataaaatataatctttaaatgtgaaaatgtaaaaaaattatataaaaaaaaataatattttatataattatctctttttaaaacaaatattttaaattataattgttgttaataagagtttaatttctaaaaaaaaaagaaaagaaaagaaaagaaacaaacaaactacatttttatacatatttcttaatggcccaaatatccaaatcagataaggaaaggcaaatctctgtcaacataaaaataatcatcggcaaacaccccatcccaaacacaagagctctattattacaaaatcaaccatattagtatttctaaattgttacataagactttctatcaattttgtaattaaatatatagaaaatcaacatttttttttgttaaaagaaaatcaacaatttgcttattaaaattatatttttttcaattgtataaaagttaaaattaatcaccaaaatcagcatttagcctaagttgatcaatttggttactaagtgtagttcttaaaattagtaaaaacacttcaaagcaaactaatactctaactataaaaactgaaatgaatccaaaatagtcaaaacaaaaaaataagaatataaaaagggaaatttacatgatatactaacttttgtcatttnnnnnnnnnaatactgtcaggcggtatttttttactttttactgt

SEQ ID NO: 24871 - DNA, 2850 bp, Cannabis sativa
  modified_base (190)..(201): a, c, t, g, unknown or other
tttgcgaaatgcgctggtaaaaattacttttactagtgcagtagcgaactgtgctggtaaaagtaacatttcttgtagtgactaggggtgcacaaaatatgagtcaaaccatttaatccggccaacccaacccattttttgtagtaaagggttatgttaagagtaggccatggctcattgggttgaaaannnnnnnnnnnnataattatgggttggttatgggttggacacattttaactctatataaatcaaaccaacccatttttttggaagatgttccaaatttgagacaactttcatgcataaaatatattttttttttttatgaatcagcatttcattgctccaacaaacagttaatacaatctaaagactattcaaagtctgtacaggatctatacaatctctcctctctttttttccttaacttgtatgcactatctaattacaaagaaataaaccactcatagtctattttcgctactgttttaggcatcacacaagtgatcctagttttgacttgccactttacttcttggatcaattgctgcacttggctgctgcttccctgccagattttacaatttttggttttccatatgtgatatactaaggctggaatggcagcagcataaacagttttccgaaacttacttattttagctctgttgatccaccgaagcacattctgcaaggatgtagttgcagctctccaacaaagccaatccttgatttgtccgaggcattcctgtgaaaatctggagcagaaaaataggtgaggggctgtttcttctgaatctccacagagaatgcattgagcatctgctgtaatttgaaacttgacaagcctctgtttggtctttaatctgtccaacattgctagccaaaggagaaagctatgtttaggaatattcatccttgaccatatacttgtttgctccaatgacataaatcatctgctgctgttaggactttgtaaacttcagaaactttgcaattttgagcattaaactggctgcagttgactttctctttccattcatctttgagttcaacaattttcctctaatatcagctgctttgagtgggggccttgtactcccaccaagattctttgttaatatagacattatgcacccacttcacccatagattatctttttttgatgcaattgcctaaatattttttatgacagcagctttgttccattcatgaatactcatgaagtcgattccaccaactttcttaggcttacacatgttcctccaagccacacttccagggcctgccatttcactttgacctttccataagaaactcctacaaacagctttaatatcaacaatattcactcttttaggtagtatcattacttggctccagtatgcatgtatagtaagcagaactgaattgatcaatacagccctaccaacatatgaaaggttcctagaactccacacctttattcgagcaatcatcttgtccactaggagcttgcaatcttccttagagattccttttgcacatatggggaggcctagatatttgaatggtagatctgctcttgtaaaaccaggcatatcaaccacccttttgatttcagtctcatccatgccactgcaatatattgctgatttattcttgtttggttgcaacccggatgtgttggagaatagctttaggccttggagcattcgatagatgcttttaaaatcacctttgcaaaataagagtacatcatccgcaaagctcaggtaatttagtttaaattcactgcatctctcatgaaaaaagaaatttgtcttttcacctacactcttcatgattctactaaggtactccatgccaagtacaaagagcaagggagacattgggtctctccttgtcttagtccccttcttgcttggaagtagccattcatagaaccattgaacattagtgagaaccattgaactattttatatttattattaacaaaccgaatcaatctagagtttcttaaaaaatcacaacattttaaaatttataatttattaaacactcaactgatcagtttttgcacagttttgctgcagttattttttttcacaacatagctacaattatttttctccgcagcacaattatgccaaactaacctatcaaataattaaaaattaaaattgtcttctttgtagtagttaaaagagtgttgtgatcacttattttttttttttttaattgttatattagcatgagatgcttcaatcaagttcaacagtggctgaattggataactgaaactagattgagcgagccaaagttagtcaaatcaagaagcatgtttatttaactgccactgcagtcttgatttatcatatggaaggtgtgaaatgagatgttttttggaagggaaaaacttacacaacctgagtttttttgtagcgtagcataatagtatatcacaatcaattaatagcttgtaacttaaaggtcttgagtttaaacccataacacctctctttgttctatatccttctctcactactaagctagctttagtagccaacttttacacaacctaagttattgtacgaaatatcaaaacacatgttaaaaatagttacaggctttggatactgtgttgcccttgtactttagataactatttggccgtgttcccatgagttattaatttttaaatatgttgcattgtgatagtaagtatatgtaacttagttaaaattttaattatttttataatagataaaattaatgatgtaatagcgtgtgataatcgtaacaacttatagtacaaatatatataattattattctgaaacatttataaatacgggaagatctccca

SEQ ID NO: 24872 - DNA, 4994 bp, Cannabis sativa
acggggaattcccgccccattaggagcggttccccgcgaggcccatccccatgggaaaaatgtgcatccctaatcatatacatacttttgtgtttggcatatttataaaatataattttattggcttatcaaccaaaggttgatcaaaaaattatctctttttatcttttggtacgtaaattaaattttcttcattatttatataaacatgtgtatagtgttatactcgaaactcggctacacttcagagagtgacacatgtcaatcaagtggaatatgaaccaccaaatataataacgattacatcatttaatgcaaaatggaataactcattaaatatagaattgatagagcatattcataactcgttgactgtatagtcttaggcgagacaaggatacacaaactattaattcatgtatttatgagacaccatcttgcctcagaaggcgcagatctaaagacaagattcaaaagaacaagtaaaattatctcaatcaatcgcggataatatataatgaggcatccatatatctcgctatacattagagaatattgacgaggcgaatcggttgttaaacacttagcgtattttccacattataatagcgatgtgtatcaacttaaaaatgcaggacatgatttccaatttgcgaggccttatggttaaagagcaattcttaagtttgctcagtacactggtgctcatgctattgctggaaggcataagtttaaccaaatcaccattggtcatttataggcaaagtgaaataccatcgcccaaatcaacatcaatcgccttgaagataagaatgaaaagcagttatgcagttatcaattattatccacatgtgtttaaatgaaacgtgatcaaaatcccacgtttcatgaaacggttatgtaatttaaatttaaatgtaaataattgccaacctatattcctataaataggggtagaattccacagataaggggacgaaaaaacttagagaaaaagattactaattgtaatattgtatcaaatactcagaaatatcttaaataagatagactcgtggagtatgcatatttaactgtaaaactacataaaattcttggtgttattcttatatttatacattataatctatgttaaatttattacaaaaaaatgctcattattcgttaacgaaagttttcgttaacagtttggtgctttcattgagagcctacgtgataaaactcagaaaaaatccctccttacaaacaaaatctgaccatggctgattataatcaaaatgataatagtcatcttgaagagactacacatcatcttgggaaagaactaatgggttcacagaggccacccactccagtaaacaacaagttcaagaaggaatcatggtggtaataatcaaaacccaaaaggaaggaacgaagaaatcaatactaacactggttatgtacccagaagtgaggacgcttatgatcccactaggtatgtaccattagtagaattagaaaacagataacttcggcaacacttacccgagtctaactaacgaaacgctgagttggaaagagaggttgcagcggccagggagactcaaggaaacaatgcacaaaatcaacttgatcctggaagaagaccacgaggtaggcctcgggttcaagaaccaggaggcaggtggaaaatcaagaaaattcccaaaacaccaaggatttatgaatcagggaatcaggggaataaaaacaatgatatgccagagtcttctcgtagaaacgagaacataaggcaacctagaactagggaacaggaaatccatcgtaataacgagagaaatcctaggactcaacctaggataagtgggttaccacagagacacccccaacgtccttctcgaactgatagggaggaggcatacacatacctaaacagagggtgtgtatctaacccttttcgaaggagaaggcctgtacatgacgaggcaagttctagatcgggacattcaaggtctcgggggaaaaattgaccaggaaggcaaacacgagaaagaagcagatcacggcgttatgctgatcaagagagtatgagcaatacgaggagttatcaatctgagagttgctcaaatacgaggtctgtgagcaactatgatcaaagacaaccagatctttgtgagcatttgaatcgagtctaaatcagaatgcacctgacttacgccaacaacttaatgctaaccgacagctaggatccaatctaattgagaatcattgagttggaggataagttcaggagatatcaagatgggaaatatgggaagttacctggttatgactcggatgaggagcccgagcatttccatcctgacattatgaactctaaattcccccagggattcaaaaatcctcatgtctcgcagtatgatgaaacttcggacccagtcgcttaccttaacaattttaataccataatgcgagccagcaaagtctcgtataatttacgttgtactttattctccacctcgctaactggagcagtgaatagttggttcgataagttcacccatcattcaataacttcttgggaacagttgtccaaggattttaagaaacaatttcagccagcaagagacaggcggcctaaagcatcctctctaactaatataaagcagcaaccaggtaagtcacttaaggcttacctgagtcgtttcagcactactgctgctaaagttaggaacttgaatgacagtattcagcatactgcccttcaagcagggatcacgactgacctctcaacagctaggggcgagctgtgagatgacttgcaaggtcgcctagtgagaaaaatattattaatgtaatgaaatgaattgaattcaaaacaaaagagcgcaagtgtttgtgcgcaaagaggaggcaagaaatgagatgaaattgttgaagactggctcgggaaacaaacccagcattgccacagcaagtactgtctccacaaaggctgacaatccaagtggtttgaacaccaaaagaaaagatgactcgagagaatcatctaaaaataagaagaaacagaaaaagcacaataaatatgtgccaatttacactgtttataccgagcttaatgaaactcggaaaaacatctttctcgcaaatgagcacagggttacgttctgtaaacctgagccaatgagacatgcgagacacaaacgcgacccgaataaattctgtcgatttcattaagacatagggcatacaattgaagagtgtcagcaactaaaagacaagatagagagcttaattgctcgtggatattttggacaatatgtgaagcaacaagaaaatgaacaaaactgacatattcagcccaacaacccagataaccaaagaatacaacctcccctattacaaccaataactgcttgttgttttccataaaaacaacaattagtgctagtgcgagtggtgcttattgttgttaccaccattctcactagcactcattggttgtcgtgaatattagacagtgtttgttgttttcgtgttgtttttatggaaaaccataaaactgtaagaaaaaatttgtaaacgtaaaaatgtaatttttttacaataaattgtgccttatgtaatatttatttaaaaaattacattgtatacccactttactttatttattttaatttttaccttcatttccatgttctttaatatatacccacttttatagatgatgtccctattatacccttaaattatgtgctacacttaagtggagagtaaggatatattaggcaactcactcacaaaagtgggtagattttaataaaataaaatataagggtatttttgattaatgtatacaaaaaacaagtatttctcaacttatctcgtaattataatagaataagcaaattcattcctatatcaaccaaaattgtagatgaagattggttttaggccttgagtcatatatatatatatatatatatgttttgtttgttagtttggagttgttttgagtcctttactgactcgattgggtgattttggcccttattttgtataaatttatctattggtatcaatgaaatttcttgcttattgaaaaaaattaacaaaaaaaaataaatataataattaaattgggataattacataaggtattatttttgtaaaaaattatatttttacgtttaaagaatttttttttatatttttacgattttccatagaaacaacacgaaaataacaaaaaaattacataaaagtaacatgaaaataacgtttaaataacatcaaaacaaaaacaaaaaataacaataaattaacaagagtacaacataaaaagactatattttctgtaaataaaatcaaaaaagtaaaaatgtttaaaattctgtaaaactgtatttttgtaatttttttgttgtttttttgtatttgtgaaataatcccaatcaaatttgtgtgtattgtaatttgataaaattttgaacaattatagatcggaaaagaaaatattaacatattaaaaaatagtctgtcatcaaatttgagcaaaatatttgacattacaatgttcctattatttttcccatattttttttcattggtaaaatctatccaaaaaataccttaattaataaggtttcgaatgtaacaattataacgatctttttataatataattccttgttaataattttttccaattgaaaatataaatttctctgttaattcaaagattaggagtattttgtgttactatatttcatcacaataatacacacacttttcagatgattgaagttagtaaggatttttattttttaattcttgttgttgtgttaaatttatgaattaattgtggtaattgtacgagattggaatttgattgaatatccttttacaagtgatactagatttggatgaaaccaacatgggagttgttgtaggtttgctaattattgaaagacaaattgaccattttggttgatttaattagagaaaagttt

SEQ ID NO: 24873 - DNA, 1627 bp, Cannabis sativa
  modified_base (30)..(31): a, c, t, g, unknown or other
tactccactcattgccaattggttttgagnnggaaccccatgattctcaacagccacgtcagagtgcaaaattttagataacacaatgaaagtttaatcaaagaatcgaatgccagcgaacgaatattctcatgtgtggattttgacagtaatcatctgcttccattttttgtatttgatttagtttaaaagctttcatctactgttgaggtaatactacgattgattgaagtaagaaatgatatttattgtttatttataccaggtatatatcatgtgctttgataaaatttattaattttatatattttttcttactgaacatcaaatcatacacatacatatatatacatatgtctttcttttggtcctttgtgtgtgattcgtttatatatatatatatatatatttttcttaatttggtggcatactttttttcttgtcttcttcggccatgtgagagcatgaactctcatttaacatatatatatatataaaaataatagttaatgaaatgtatataaacgcgcgtatatataaatattagacttatacatatattttgagaagtgttaactaatccaacattacttactcatatatatatactcaaaagtgttaatcgactcaaagattttactgagtacttatttttttatattgaaatttatatatacaaatatattcaactggcacaataaggtatagattatatatttttttaatcaaaatatatttaactataaataattttgacaatgaatttatggatgagggtatccatttttttgtggaatgagggcattttatgaatgagagcatctttttttgtgtggaatgagggcattccatggatgagagtatccaatttttttgttgaataagggcattccatggatgagagcatccaattttttgtggaatgaggacattctatggatgagagcatccaatttttttgtggaatgagggcattccatggatgagagcatccaattttttgtggaatgagggcattccatggatgagggtatctaattgtttatagaatgaggacattccatggatgagggcatccaattttcatttatagaatgagggcattccataaatgaatagagagaaatatgagagaggtaatgaccatcaaaataaagagagaaaggaatagaaataataacattccatgaatacttacccttgaagcttgttgattgctgacaaaaatttatcgtagtttttttcggtctcttttctctctctctctctctctcttagatttttttcaaagtgtcgatccacttttcttttctcaactacccctatttataaaacctaattttaatttaatttttatttttcttttatcaacctcaccagccatgtaacgtaatgggtgagagaaaataggaaagtaggtagttaaagagaacaaagagtctcctaatttggctatcataatttgactgattattattctttttcatattatttttatattattattttaaaataaattattcttttttcaattttttttaaaggaataattataattttatttattctcttttttttttgttcaacagatgcccctcaagcaaatgtgttgttgggttttatgccc

SEQ ID NO: 24874 - DNA, 5002 bp, Cannabis sativa
  modified_base (26)..(61): a, c, t, g, unknown or other
ataaaatgatttctgatctttattannnnnnnnnnnnnnnnnnnnnnnnnnnnnnnnnnnntagggcacaaaacccaacaggttaattttgcaaaactcttcaaaagtccaagtttgctcataaaaaggggaaaaaagaaagaaagaggatggagagggtgcctcaaaatctaatatagcttcaaaaaagaagaaaactaaccctcctactgaaaatatctccaatatccaagtgaatcctcggcctctaaagttgtcccaaattctagccaacaacaaattttcaatgtggatgattctttcaagagagtcgagtaacggaaggaggtactcaaccatgctaaggtagttactttcaatgttgagaaatctaaagtccctctccttgatcctactcttgctctagaccacttagttggggttacagaggacaagcttgtgtttgaatgttaacctcacttttagacaacaatgattagtcaattaaagtgatgagatgatagataataattaatatatttaagcaataaggacactaaaatttaaagaggttcaaccccgtgattatggtaatagcctagttttctttacttatattaaattgaagaattatcaagatcacaaggagttggccaagtgagtttcttaataatcctaaggaaaattttacaattttagacagcataatatctctttaaagaatcagaaatcggatccctcaatagtgaaatgactccactatgtatagaggaagaaatacgttcaattggtttcctaaaaatatttagaataaaagggaaactaaaatagtctcctattatcattttataatgcgtgttaaccccatcaaagtagggatttaaatgggagatatttatgggaaatatcccttaatattgttttgcaatcgcattcaatatgtgcgcagtacttggcttcactatcatgttggaaactgctcggatggtaacaattaaattattcgatgtttcatgtcagcctgcagactatcattcttgaacatgaatcaccctgaatgatacattaagggaaataccatatgttcaagttttacaatattttccacgtgtcaccttactaattgccacatcaccatgtgcaaaaattaggataacattttccccccaagtctgcgtgggaaccattttctcatacgtggacttattcggccttctgggtgcttgaatgggtgacacatgtctgaatcccaatgtctaccttgtcttgatgaggtcggatcacgaggtacgaagattcaagtgtcctttcgtatttcgagcatttattacttttcttcaaaaattagtcttaatttgcacactgacggttgtactccccaccgtgtactgattgtactttttgggggaaaacccaaatttcaaaacttgggattgccaaattacccctttagtaaactataaaagggggtttgggtctctttccaagtcttttacacattttcaaactcaagaacttgagcgaacatttctttttctctccaaaatttccaagtttttcttctttgaagcttcaaagaaccccaaagtgatttctagaaaccaagccgaatcatcatccagaaacttcgaacaattagtaagttttctaacctttatgcatttttttttttcaatttttgtattttttttgcttaaatttgttctgtgagatctgggcttgaattgaactcttccttgacattaaaaactaggattcttaattttgggctcgaatgtatgcgtgtggcttatgattcttaatttttggttaattccaaattgttttgctgaataacattttaaaatatttgtctggcatttctgggaatttcctgagttcttcctatgttcttgaacttgtttgctctagaatttttgtctttaggacaaaaatttcttcctttgatctttaaatctgtctaattggagcgtcaatgatgttttttctttggagaagatattttatatgtccggttcttacctctctctccttcgttttgaagatgtacccaagcaatttctaagagggtaagtgttggaagttattttattaggatctagattgattaacatgtatattttattatagtctataatctaacatcctaaacatgaattttctaaaacaataaaataaacacataagatattaagaaattcttacattgatggcagcagaatataatgactccttctattcagatctctaacccttaattcctatctgtagcagagcattatcaagatttgaacttggatcttctctccttcaatttggttagacacagtcttcctcactatgctaagtattgctttgacatgagtggccataccctcaattcaccttgggattcgaatatttgagaaagaagaagaagaattttgaatatagaagaagctcttcttagttttctattttatttgacaaaagagtctaataataaactaagaaaacaagagttatcttattctatttataggattccttatagagctaggtaatttagatccataacttgcacatttcttagctatagtctcaatcacaaaggttacaaatgtctagatcctcttgccagattgtacatatctatggatgttatatttgatgactccatcttcccctttgcttctcagaaacagcgaacaaattctagctcctcatccactgtcttcaatatttttccctcagtacagattctcaaagcatcttcatctacttagatgtgtcccctttttcccagccacagatctgttctcactcttcctaagaacacttttactcaatctgagcttacaacatgtgtctcttcgcaggttcctccttagtgtaccgcaacccaaactttgtcactcaacactggtccatcaacttctgctcctccagtgtcaatatttgagcatctatcatctttaccacaacctaatattactcctacgattgtctctaactctgttttgcaggatcctcataatatcaatcctatagcaacatcccaacatgcaccatcaacagatgctcccatactcaactcttattaaatgtatactagggccaaatatggtgtccataagccaaaggtttttcttttaaccatgaattctacctctgttaaataggctctgcaagacgctgtttggtcaaaggtaatggatatagaaatttatgccttgaaaagaaatggcacctatgttcttgtgcctctccctctaagaagaacaactatagggtgtaaatgggtgtaccaaatcaaagaaaatgttgatggcattgtgaacaagttcaagactcgattggttgccaaggggtttcatcaacaactaggattcgactcattgagacattaaaggttggttaattaagcaactagacgtaaacaatactttcttgaatgggaatctttaagaagaagtttacatagctcaacaacctgactataaagatcctcaaaatcctcatctggtgtgcaaattaaaaaaggccatctatgaccttaaacaggacccaagagcctggtttgaaaaacttcacaccccctcatttcacttggcttcatatcatccaagtcagaccatagtctattcattctacatactcccacttcaatcatcatattgttggtgtatgtggatgatataataatcacagtaagtgatccccaactggtttcatatttgattcaggccttgaatgttcagttttcattaaaaggtcttggttctctctcttacttccttggatttgaagtcaatcactcgaaacaaggtcttcatctttctcaaagaaaatataccaaggatcttctcaatagagcaaaaatggatggtattaaaccctctcttacccctatgaccacttgtttaaggttgttagcctatgaaggtgatccatttgaagacccccaactctatcgatccattgttggtgcccttaaatacttggtcatcactagaccagatttatcattgattgttaacaaggtttgctaattcatggctagccctctctgctcttactggaatgttgttaagaggatccctcgatacttggcaggaaccattgactatggtatgcatcttcacaaaccagaaacctttgaagttgtagccctcaatgatgctatttgggccactgatgtggatgatcgaagaagaacatctggttttgccatctattttgttcccaacttagttacctgacagtgtaaaaaacaataaacactctctcaatcgaatattaaagtaaaatataggagtttagctcaagcaatctctgaaattacatggctccactcactttttgctgaacttcacatatctttgccatgctcattacttggtgtgacaacctcagcaaaattctcctcattgccaacccaatttttcatgctcgaacgaaacacattgagctggacctatactttattcatgaaaagatcctacagaacttggttcatgttaaacatattcctgctttagactaagttgctgatggttttactaaacctatctcgtgccctcaattcactagtttcaggttaaaacttactattgtgcctagttcacattgtaagtttgaagggtgtattagggaatctcaaatgttagttttttgttatgacagttaatgagttgtcactcagtttgttacacaattttttagcttattagttgtattggttctatataatctgtaacaaattctctaatcaatgtaataagattgttcatccccatttcatctctttatccttctttctctctgtatttctttccctctttctcttcatcttctatctcgattatctttactatacttttttctaatgtcaacgagatcgattcaacaactctaacacttcattattatccttattgaattgctctataaaaataacacgaaaacaacaagaaaactacataaaagtaatgttggaaattttttgtttgaccaacactttttaaagaaacaattaatacaa

SEQ ID NO: 24875 - DNA, 2653 bp, Cannabis sativa
acctttggttttgaaaaattgaatcactaaaagcacgagtactcatttagtttggaagttttcttttttttgaataaagtttggaagcttctaggtgtctgcaactctaaataactataaatattggaaaggcctactgtaatcttaaatacccaacaaaaaagatcaataaatggttctctacaagatttggatttcaatggaaaggaagaaaagaaaaaaatcagatgaacagagaaaagaaataaaaaactggacaaaaaacaaagaaagaataatgggtttgaagaagaaaatacaaataatttttttattttattttttaaaaataatggcaacaaaattattcaggttccagttatagggctatttttgtccttacatttcaataaacaaattactaccattggatgccaaaaatctatattgtaccataatctaatggttcactaatatgttgaggtgtgccatccctcactaataaatgagggattacataattagccttcttaaaaatgtttgaccaaaatcaaactcatagtattattatagggatatgattttatcccgtgatgtactttcacgaaatgtattccgtagtacattagatgggtctcaagatacattaaataagtgttagggtacgtttctactttttaatcctaattacccctagatcaacctcagccgtcagatcaaataactccctcatctgacggctatcgtacattacagattacaatccgtgaaagtacaataacaggacaaaatcatatccctattattatattcaattttttataataaaaaaattaaattattatttaacaaaataaagaggttgatcaatattttttaaaaaaatagaatccaaaatagtatttatataacataaaataacatatgataatttgtaatttgtattggaagttcacataattttcaaacaaaaataaaacataattgaatgtgagcattttcgatagtttgcaaaaatagtgtgccaagagttgtgctcaatttggcatgtaccaatataacatgatgcatattttgaagtcttcaaaaattcaacactcataggcgtatgtcttaccacaaaattataacataaaagttacaacataacacaccagcccgattaatttttgcttgtcaaaacttcaaaaacatattatattacacaaacatttgtcctgagaataatgaggattatattatataaacaatttgccgttttgttgaaaaataactaactaacaagcttgtaatattgggaagatgtacaaagacagtacctccaacggagcttgttcttttgaaaacataaacactcggaaaaatggcttctcgtcaggctttatgagggtacattgaagtggaacagccaagagatgacaaaagcaaagaccatacaagctaacaagaagtttaggaaccgatgaccctgccagaagtttcgtgtctctgctgggtggatgggggcagctgcaggcgttgttgttgcagtatcattcgagtcgttccattgttccatcatctcagcttcactaacaccagatacattgattgcagttgatccacaaatttcacatgttctgtgttcatgtaatttataaacaagatcagcatggaaatgtcaaataggagaaaagaggaacaagaatcaatcttaggtaaacaagtttaaagtcgggattctcattttcttgtttgaattaaagggttgatgtaagaacaagtcatagtttcaatcaataaaaccctttacttggcaactttatgttcatattacatagttgcaactctcaatgagtaaaatgttcatttatgatatgaaactaatagcaatagtgggatacacctgaaagtttcacatccagccagattcatacttttgaccatatcaaattgtaacaaatcaaggaataaggatttaacggaaaacattttcatgtctttacaagtgaaaagcccaggatatcaaagaatataatggtagcctaataccaaagcaaaagaaaaatatatatgagattccatctcaaaatcaattggtcatgagaaaatggggttgcccatattcttgttgagaaaccaattgattatatgagtagagtagctcatatactaatatatgactcaatatttttacattaatccatgtgcgacaatgttctccaatacagaagaataaagaaggttcacttcacgaatcacaactgattccaccattagtcttaattttctcaatagattatcaaactaatttaattgactatctcccctcaattctctttttcttgtctccactgggaattaacattactattcttttacctactcacacttaataactgataaacatgtataagaatagcaagtggggtctaatttttaatcttcaagtcctcaatcttatttttcctactttcattttctcaaatttgaagaattgggttaaaaggtaatgtaatcatgtaaggtaaagacctcgaaatatttatatttataaattatagctacttctatcgggttctctttccacttttctacaggtaaattcctatattgttagggcctttcctatctagtgttttaattacttgtatgcccactctttctcttatttttcctatcttttcttttcttt

SEQ ID NO: 24876 - DNA, 2805 bp, Cannabis sativa
cgtgctttcgaaactgaaacctgcgaacggcacatcactgaaatttaagtacaaaatatcacaattgagagagagttgggcaagtaaagcaggtataaagtgtaagcaccttttttagatcagccagtataagaggactaccacttctgcatataacagaagtccccataaaatcgaattcgagctttgatatatccatctccatttcttccttgtctctttcagcaagtacaaccactacaccaccaccaatgctcttgtttgctatggctagttgtttcaaaagtgaaccctacagcaaaaagtatagctactcaagactttatttcgaattcaatgtttagaccgcgagaatcataaagatgaaaaaaaaacatgtcaaaagattaagcaaacgtttggttggaaggaaagaaaacacatgaatcaaatgcaacctaagaattccttatatgtatgtgtgaaggatgagttgaagcttaacaaaccaatgacaagagaaattactaaaagacatgaaatttgaaggtattagaagaagctaccaaccagtttgtcactccatccaagaatgagtatatgattcctttcaatgacttcactcttccctttccttaacgaatccaccttctccgatatggcatctgaaacaagcccgagcatcatagcaaatataagcatacctcccgaacttatcgagactgaaacaattctcggtccaatgccttcagtatcggcatgatttccagaatcagctacaaaagtccatgaaagccaaagagcttcagcaaagctattggtattaacagcatacaatgccaatccaccaaaaccaataaggaacatagttgcaaatagaagagcaagcagcttggcataaggatagactgagaaacaaacatcaacagtgtaagcaattctcttcttcaaaggaacttcttccttgtttttcttagtccttttcgagaaattcattatatgaggaagataatcaaggtatttgcacaacaagaatggcattactagtgtgattagaacagaatacaatgcaacacttctatcttcagcattgccataatccaaaataccaatttcatcattctcttcactctgcatattatccttggtgctttcataactatgactatctctattactacaattcctacgtagagaagcattctcagcctgaaaacccaacaaaatatacaaagttcatatctatacaattacaaatctaaacgaaattaaacaacagatccaaatgaaattgatatatgattaccttaagttggtcaactcttccatggagatgtactgaatatactccaaatatcactataatagcaaaaggcaactacacatagtacttacatccatcagtatcaaaattgtattatgcaaaatgttagaattttatgcattaaataaaattctcaatataatctttttaacttatgatatagaaatcaattttatattatctaggtcacatgatttttcgtgattatagttttaatatgtaaattctattaaattttgaacttatggataattatgactattgcgttgtctacacagttaaaaaaaaatcatgattatatgcttcaaacatttagtcttatgatttatcagtgcattgaatttatactaacgtgataatcaatggtaggatttgcttacacttagattagtggaatgtctttttcaaggcattagtaaagtaaactagcatcagatgtattggctatatatcagattggactgatattcacagcagaaaagatatcgtaaacttaccgtaatatattttctaagtaaataaatatcacttagttaatcttaaattaaagatctttatcctgagatggttaggttctggcttaactgtactgcatgtgttccttgacttgttcgttataagcttatcagagaatcaactcaatacttacatcttggaaacatagtagtgtaattaagtgggagcgctaatcatagatatagaatttatagcttctataaatacttagaagtaaaatgataatttccttaaagtttttggctaacagacataaatggaagagctcttattttagtaattctcttattttagtaattatattaatttattaaaatatcatttataagaaactaagtgtattaaggaaaaaatacattgaaggataaaacggtaattttagtccctattcaatgtaaaccatttatgaagaatcattgattatttaaattaaaacaatagataacttatagcgtatttattcttagtaaatagagcattctatgtaatcaaaagtgcaattccaaatctacagtggaattagaaggaattaataagataaaaaatttactcgataaattctagaactacatattgggaacttgattatataagtctatggtccctacacttgttgagttaatattgttttgcagtctcaattaactgattttaattaattaattaaaattctaagtaagactatgttttatttatgagttttactaaggatggacatatttgagaagaaactaaaatctaggatttatttgttaattaagagagcttgtaaggtctaattaataaatatgataaatattaattttatttaataattaattatagttattaaataaataaaattagcatttaaacaattagaatagaaaaatagtatttttgaaaaaaaaaataagtatcattaagaaaacaataaaatggcaaaatttaaacttgtgggcctccatatgaattttgaccatttaagtttattaagccattttttt

SEQ ID NO: 24877 - DNA, 1968 bp, Cannabis sativa
gtaacaaagagcagaaaacacacagaaaaatgtgttagccatattatatagattaatttatagcaatataattatttaaatttttaaatttgtaagtgacataaacttaatatttataaaatgataatttttctttaatttcgttagtataaattctacatcattagttaacggaatttataacacaaaattaaagaaaaattacaatttaaggtaaaaataatattaaacttataccctaatttatatgtatagagtacaatccaaatttataaagattgattaaggggagctttttattagttaacttgcctttctggcacgaacacttataagaccattctcaagtgcctcctcaataggtatcagttcatagtggttcagattgatatcctgtccattcaggtgcctatatataatataatattgggatcatgaatataaatgtaaattaattaagctattagctactaagaaataaataaattatttatttgtggaattaataatatatagtgaaagatataaatatatacctcagctctatcaccatgttctcattttcttttttgaccatttcaatttcattgtgcaggttctgcatatacgtacgtgtttaattaattaataattaccaaaagaaattaatcaatattactatatttatttatgtgattatttattgatattatacatcatctactctatgagtatcctcattaagatcatataaagatatacattgatccgaagtaatgattgataatcctaaccaaatataatataaaaagttttctccttaattaattaatttctgcatttttctggctttgttcttttcttcagcgttttcttgtattttttaaagaaaacaaatttaactattaatttagtgatgtgtctgtgtaatagtaaaattaatattatatataataatcacaaccctttctctgaaattttgcaataaaaagggaagagggacagaataatatattttataatatattttataatatatatgtaacagatctgttattaattaaataataataagaatataaaatagccgcacctccttttagtagatctgttcgtagaaaccatacttgttgtttcttaacatctttatggaaaataattaacacccatatattctttttccattaaatcaaacaaaataccaacaaataaaaaaacaataatcacaaatatatatatatattaattacctcatgcttagcaggccataacttctctttggagtgtttgtgatattcctcacatatggtactcaaccttaattcaaaatcacacaaaacaaaattcactaattataaataaaaaaaaatacaatttttattttatttattttcttattaaatctaaaaagaaaaaaagcttattacgaattatcaggactacacatggcatccattttgccagatccagaaacgatgatgagtgagactttaacatcacaaagaatagcaatctccttagccttcttgaaaattccagcttttctcttagcataagtcactgctctattacttgtattctctattttcttaatctcaatcttaccccttcccatatttattattattattattatttgatatatatcaacaacaatcttcaacaacaatcttcttcttcttcttcttcttctctcttctagggtatatatagaaagagagagagaggaagatgaataataatttaaagagaaataagggaagataagggttttcctagaagggttagaggctcatttactttctaagtgcacagaaaagaagtgtttctttatgtatgttaataatgacatatctaaaaattatattacaacattgttagtagctatgtttaattataagtgacgctttacgattgattagcaatcttgaaagttaattttttaaattatatgggacctaatatttaattataccaatagtagtatga

SEQ ID NO: 24878 - DNA, 1084 bp, Cannabis sativa
atagggtatgaaaaatatacaaaaattgtgtttataaatacaaaaattgattatacctttgtttgaattgggatgaaaatcatcagcatcaatgaagctgaaatttgtcatttttgccaacatctcacctattgtactacatatgatatagccacacataaacccatcattatatatataattaaagaagataagagtaagttaaggattgattttgagagttcttacgattttccagctccactgactcccataacaacaatggctatctctgactctgactctgttcctataaaaaaaaacagagaattaaacaacacattataataagatctcatctcatctaatgttgggtctgattattattttgatttaattaaaagaaagaagaaggaataaagatgagacctttggaagaagccatatctgtaataagggtcaacaaaattaagatcgcccactcctcttccaactcatctttatatctttatatatataataaaataatataatataatatatgcgtgtgagtacacgtaattaactctttctttattattagctacatatatatatgtcctaaccaaatacagaaagggaaaacagagtcaagtacttgaatttttttttacataaaatgaaataacaacacacaaacaaaagcttttagcataaaatgaataaataggtgattgaaaaagctttggcctttgaggtgggcttctctcactttttgttctcatcacatcaactcttccccaagggtgtttactgttaaattatggcaatgttttggcttgttaccaactcaatttattctcattcaattgaatccattcaaagtgagaattacctctactctggccaaacacaattatcctctaaaaagtgaaccaattcctaacagtcaaagaaaaactctaacctttctctgatccttctgaatagcaagcaaagctttagactttagagctgagggcaaagcttcaatttccgtctccaaaacatccaccacctcaggaaagctatgtctttagggccactgtagcaatgaaatgatccaccatttgcttagatgttttca

SEQ ID NO: 24879 - DNA, 4913 bp, Cannabis sativa
acgagagttaaggctccaaagcttggagccttatacttgcgaatgtttagtaattggtgtttcacttctaacatagcttggcataaaggggggagaataatagttgcttggaatctgttgagctttgaagtaactatcatatcttgttctagccaagcaatgcatctttatgttgtttccacagataagaggccccaatgttttgtcacttttgtctatggtttcaataatgaggaggggagacttaaactttggcaagaattgatgctccacaaaaccgatacaccatgggtagttcttggggattttaatgacatcattgaaagggatgaaaggataggggttcgggtaaaatataatctttcttcctttaaggattgtattattgcttgtaaccttgaagatgtcaaatttggtggtagttttttcacttggaataacaaacaaaaaggtgaggatcggatatactctaaaattgatagagtgatggcaaaccgaagttggatggactcttttcctaatgctgaggctctctttcttaatgaggggttatttgatcatactcctgctctgcttacggtttatccttccattcctagtggtaggaaaccgtttaagtatttcaggatgtggtcaagtcaccctcattatcagcaacaggtggtttcggtgtggaaaaggaatatcaggggcactaaaatgtttcaaattgtggcaaagctgaaagctcttaaaccggtcttacaagagataaataaacagggttttcatgacattcaagttgctgagaagaaggccaagattaatttggaagagtctcagaaagctcttcaaggggaccctttgaatattgatcttcaacaaactgagcaagcttttagagagaattatactcatgtgcagaaagcttacctttctttcttacagcagaaatccaaggtggattggattaagaatagagactctaatacagcagtttttcatgccagtatcagaaatagaagagttaccaacagaatcctgtctattgaagcgaataatggagagagagttgagaatcctgaacaggttacgcaagctttcttggattattacaaatgccttctacgaactaagatgcaggggagattgaaagcgaaacatgcagtaatagctgaggggccgattttatcagagtcacaagctgagtttctcttacaggaattctctgaaactgaagttaagaatgcagtgttcagcatccctggaattaaaagtcctgggcctgatggctttggaagttacttctttcaagacaactgggagcttattgggaaagacatttgtgaagcagtaacctcttttctgcactcaggtaaccttctcaaggagattaactctacagtcattactttaattcctaaaatcaaataccctaataaggtgagtgattttaggcccatatcttgttgtaatgtgctttataaagtggccactaaattgatatgctctagattgaagcatattcttcccgatttggtgtctctaaatcaggggggattcattaaggggaggtatattgcacataacatcatgatttgtcaggacttgattaggagttatgcaaaaaagggagctaagcctaactgcatgttcaaaattgacttgcaaaaggcttatgacacactagattgggatttccttgaggaaatgttgataggattgaagtttccatcaaaatttataagcttgattatggcatgtgtgaagactcctagatacatattgatgtttaatggatctctccatggttttttttgaagccaaaaggggtttgaggcaaggggacccgatgtctcctttactttttgtgttaggtattgagtacctaagtagaattcttatcaaggtggggaagaaagtggagttttattttcatgaaagatgtggtgaattgaagcttaatcatcttagcttcgcggatgatattctattattctgcaagggtgacttcaagagtgtgtatttcttaatgcaaggccttttgcttttctctcttacttcaggcttgaatgttaataaggagaaatcagtcatgtattgctcgggcatgaaagatagagaaatccaaagaattttggatatgtctggttttactaggcaaaatgatccattcaaataccttggagttcccatatgtgcaagaaagatcaatgcaaccgattgcagttgtctacctcagaaaatggctgcaagaatcaaggtatggggaacccgaaacttatcttttgctggtagacttgttctagtaaactcagtccttatttcaattcatatttactggagccaaatgatgatacttccatagaaagtaataaaagaaatagaagccatatgtaggagtttcttgtggacagggaaagacatgatgacaggggctggatgcatatcttgggagaagatttgcactcctaagagagaaggggggctcggcataatgaatattgcattttggaacatagcagccatggctaagcatgtttgggttgtagctaataagaaagacaatctatgggtcaagtgggttcattgtgtgtacatcaaacatcatgattggtgggagtataatgcttccacaaccagcagttggtattggaggaaaatggtggaaataaagaacaaaatcaagcaggtacaacaaccacaacaatttacttctgtgaaatattaaatatcagttggttatagttggtttgctcctgtatttaacagatttttttggaggaatgaggtctggaatagactaaattctcctaaacatagcttcttgatgtggttggctgtccaaaacaggttgaaaactcgggaaagactttataatttcagtattattgattctcccgattgtatcctatgcagcaggtcacctgaaagtgttgagcacttattttttaagtgtgacattgctctagattgcttgaagatgatcaaagattggctgaattggagagtgcaggccgactccttgcttgggttactgaagggtatccggaagtccaaggtctccaaattctgcaaaggcgttaatatagcagcagtggctgccttggtttatgcaatttggagagctagaaatgatttactatggaatgcaaatagtcaccaagcagctgagttagttaagcaagtgaagtgggaagtaaagagtagaactttgtatgttttacccaaaaaagtaaagcaaaaagatctagcttggtttcaaaatttgtaaatacaaagttgtatagattattttaaggccttgtttggtgcttataggttgtaaaaatgagttttgtgcaatgaattttctgattcatcaaaaaaaaaaatgctctctaagacacatgtatgattagttaaggttgcatgttgtccaactagtagaacatgtacaatgataagaataaataatcttaaaacaataagttgtactaaccttgttaggagaatctttgatcgttaatacttaggttcaactctaatttttttttattcaaccaactctcatgctttggtaattagcaaaaactctcattttttgttgtggtgaataaacttaatgttatgttagttgaaaacgtgaatgatatatctccttgctaggtttgatataaagggttggtcttctcacgtatcataaatactaattaaagagaatttacttgaatatatgataactttttttagttggctagtaatcataaatgaaacatgctaaagaaaaaaaaaaatcataaatatcatttacatggttggtaagtcttttgttttgtttttcaaataaaaaggtaaaaatttaataagttgacaagtaatcataaatatcatttaattagagttttgtaaattataggttattttttgagtagctattctacttgtatgggccgagccttattatttttgtttttgtttgttgagttcaatgtggcctttggtgaagcaaacttttaaaattttctgcaaaatattattcggtattcttttactgttatcaacacaataataatttaatagtggatggttgataatgcgcatgaaaatttgtactcatgtaaatatttgtgtatataaaattaacaaaaataagagagaatgtaaaaactttctgcttaattaactaaatttaagagataacataaagacatgaaattaaactttagaacataaaaacatgtaaaaaaaaagagtggacagaagtcctaacactgagaagttacatactaattttcaaataaaatatgaacatatattttgaagaaaagtttcgacgctggttcactcagatcccatcattatctcctccaatgtgtaaatagttttgacccctttcacttcatttgcttgatgaaagataaagtcagaatattcctttagctttttgtatgcttccaatatctcttcattagctcttatatgttctgaagttttctttatcatcgtggaagagtcttcagctatttcgtgtagtttttgtagttcatgttccttctttgggcagttcaagcacaaccccttcttatcttcagccttcatagttggctggtttgaaccattagtagacatctctagtgaacaatcttgaaaaataaaattttagtttacaatgaccgggtttgagggtgtgaagaagtcgtatgattttattaggatataagagatatcactttcatttatagggagaaaagaaaccctaagaaaggaaaagaaaataatacttcaacacgttttctacttattactaccccatgatcaaacaaaagacatcctggtagccaatactaccccaatattaaatagggtaaatagtgccataagtacccaaagttttaggtttgtaagcggcataaacccaatgattttttttagtggcataagtacccaatgtt

SEQ ID NO: 24880 - DNA, 2765 bp, Cannabis sativa
  modified_base (1482)..(1491): a, c, t, g, unknown or other
atgcccaccatttactaggttcacttgtgtttacttcaagttctatttcatcatcttcatctaggatatactcatcttcaagaaattcaacctcctcaacagggacattatggcccaattcatcatcttgttgggcctcactttgccccaaatcagcttctgcttggacctcatttgcagcttcattgtgggccaaatcagggacattttggataacatttgaaacttggttgtgttcccaatcaaaggcactttgggactcactttgacctaccatacaaagccacaaaagatgtgataaggttcacttatatatatgtatgtgattaaaattttaaaatacaaagtaactaatttcaccaaatacaatatagtaaggttgttcaaattaatatcttcatattatttctcaattattgttaaataaaaactgtaatatattaaccaaaacatggtaatactatacttttaccactcactcaacttaatttcatgaataacatgataatttaagagagagtccaaactagctagctaaatcctttctgctattataatttgatgtatcccacttactctgaaacttttcaatgtcaaaataaaccataatcccaaaccaatgcaaagattccataaaacactgtaattgggtcagccacaaaaaatcacttttataattgacccaacaatattataatatatttttattaaaaaataataatatagtatataaatccacgcatgtaaatacaaacccaccattcagtctattactttaaaagaaaagaaataatatcaagtgaatataaaattctatgaaatcaatccatccaatctaatacaataacatgtggtcccaaaaatatttaaccagagcagataacaaagtcttgaaactaccgtaaaataaagaagagaaagtatggtttgggtctgaaaagtaataaaaaaaaaaagaaagaaaaataagaagcttacaatatacatgagttgggtctagatcccaccaagacattatcttcttctccggcgttgtttaccggaaaaaaattgactttccaccagtaaaaacaccaaaggcagcatgtattaaggtttgtgaaatgtaatttttttttataacttgtgaaatataaacttaagggttcttacttttatttagtttatttttaagtttgattttaagatttaaatctggaaagtgaaaagcctgtgaattaaataaaaaacgtaataaaaaattatttagatatatgatattcattttaaagagaaaaaaaataaattggtgtgatcttagccttacacgtggccacctaagttgactaacaggaatttttaaatggaatgggacggaattaatgttttgtaaacattgggtagtttacccgctaaatataaacaatgggtacttgtcgcttacaaacccaaaacattaggtagttatgccgcaatttaccctaataataataacaacaacannnnnnnnnncaacaataataataataatataaaaactttaaaataattacaaaatacttatatactaacttaaaagtatgtatgtatcctgaaaaagtaagcttacatatttttttcttgttgaacaactagataacaactaacaaaaaattagataataatccaatttttatatgaaaaattaattagacaccaaaaattatgtgaaagctcaaaataaatattgaaaaaaatatacataaaataataaaataaaataagttgtacattaccttaaagatatttataagaatttatatgagtgaaaataacaataaaaattaattcgatataacatttttgtatgaaattaatacgatttgtttatattagacaatattttaatattgggtttaatttgtaaatattattggaaaaaaaattaaaaaaatagtaaaagcaaagtattttttttttaaaaaaacataagtgagtatattcacaaattatctctctcattcttttttaaataactaatataattttttcaataaaaataaaattatttaattaatattattttatgttacttttactttttcaatttttaataaataaaagataaacaaagaaaaaatgtcacaattaaaaaaaataaaaaaaaaattttgaaagtgccaaatggcacatccttctcacaccaggacaaagtgagcccccacccattaggtctccatttctcaaagaacctgacctcgtaaaaatgtaaataagaaaagaaaaataataaaaataaaataaaaaatgcgaatcccaataaaaaaagttaaaaaacaactttttagttaaattttgtaaattaatcttatttttacctcttcctctttgatcaacattagagtttgtactcatcctgtacattcatttaaaaattctcattataaaaataaaatcataaattaatctatgcataagcacatcaaagcataaatttgataatttaaaatactcataaattaatattaaaaaacaaaaaaaaaagttactaaagcaaacacataagcatatgtctttcatacatcaaatcatatttagaattgttaaaatataaatactagtattctaatcatctatttgctagccatgtattctacattttttctgccaaattttgtctccaagtagtccataaatttgaggacttgatattattaatataattattatctgtgatgggatgatttcctaatacactgttcatctcattctccactggatcaatgctcatttctcttcgaataaaa

SEQ ID NO: 24881 - DNA, 2085 bp, Cannabis sativa
ggtcttagatgcagacctaacttgcctaagtccaatactgactctgacattagtgtacgtttatggagcttgtagattgcttgatatggtaagtttattttctaatcatctttgatctttgaagatttattggttttcgggtattgttatgattggtttatcaaaactcatttagtaggaaattatttagtttattactctattggaagctttatttgttatttagcctaattaaactttagttggtaatatcacttttgggaaatttgaatttaatcttcaaacattttgaacataaaacatgttttatcatcttaaccatatatttgcttaactttcattcttaatatgtatagactttctaaattcgctcttatttatacacactcaatattttagagtattgttatttattactttaagatgacgaatattttatcgatgtgtcactttataattacttagctatactttatattatttattatattaaatatataaaactcgatattagaatacaccaaataatattatgtcacattttgtaatgattcgacccttaatatttttcaattctatcaacaatgtcaacaattcaaagaagagagtaataaagatgtactttgagttgtgagagagaggattaaaattaaaaaataaaaacaattataaaaaaaaagtaatttatagtgtaaatatctaaatttaaccctcagttacagattaatatttaagttcaattttcaaccgtaataatacttaatttaaatttctaaaactgcggtaggtacttcagtgttaagttaatagttaaatacttacaaaaaatttcaaaatataatttgtattattatcgttaaaattaaaattaaatatttataattaaaaattaaatttaaatatttatgtcatgtaaattatttgaaataatttttttgtttttttggcaatgaaaataaaattactttttgattaaaacttttaaagtaaagtatttgaaattgggaaattaggtcatgcatggaagaaaaaacaaggtccttagccatccacgcagcttaaaatcacaacaaaataaatatatattgtcttcttcttcttcttattattataatttataaacaaaaataaaatatttaaataactagaaaacgaagcgtgtgtataaagtgccacgtggcagtatgttgttatgacacttcattgttattatgtaatgtaaagtaagtttggtgtcactactctacacttctactacatactacccttcattttatggtgacactatttatttgctaaaaataataatttaaaaaaaacaacaacaacaattttattagatattgtaaaaagttgttcaagccatgttagatttttatatcatatgtggatttagtaacttaagtattaatatgtgcattcaaaaatatgtactattataaaaaaaaaaaaatgtataatatatcttttaaaagaggtgttatgataaatattttatttgtttcaatatttagaagaattttttagtctaatttttttttgggtttgggtccagatctgtggtcgtcggtcgaggtttgggttgggattttgttataggttcgtgatccaagttttgagtccggagtctaagatttgggttttggattctgagtctatggtttaggtttcaaatttagagtttaaggttcaggttttggattcagagcctagggttcaagtctcgggttcggagtctagggtttgagctcagagttgagagccagttttggaatccagggactatgacctaagccgacgtctagagtacgtgctaaggttgggttcgtgtcggggtatagaatattaaaggtttttttttactaaatctaaaaacatattttagaaaacatcaaccaaacaagtcttttaatttaaaaactataaaaattatttttcattctcatttataaaaacacaatttcaaaaataaaaaacaatatcaaactgttaggatttataaaacactttagaaatatataaatcacagatctaaacatattcttaaaagtgctttaatatagaaaaccctaaatcataaatcta

SEQ ID NO: 24882 - DNA, 2107 bp, Cannabis sativa
  modified_base (2065)..(2082): a, c, t, g, unknown or other
gatcactgttgatacatatataaaaacaatagacttttactcccttccaccgtgttcctcctaaggaagaggaagcttagtaggaatattttggagttaatagtagggttacagagatgagtttgtttagaataatgaagattaagtcttcaatccaaaggtaaaggtctaaagggagatcccttttttgtgccaactccattgcataggctatcttcgatggatcaccggagggatgaaatcctaccattggattggtaggtggtgtatttcccatgtggcttttatgggtgtcagaatgtaccagctatacaggctgggctttggacgcgtgtcaccttaggctcattcttatttgaattccttttactcataaccattagatcatttttagcccagtatacaaggacatgcatgcattacacaatagcgcatagtgggggacagcctctgacatcgtacatgaaaaaccttagtccctaggtccatagtcggacatgcgtgggctgaaccttcgcgagccaaaggcgtatctcggactagtgcctccataaggtgctttcacatggtttgagaatatccatattcctcacgagaggaaaaggtctcgacttctgggatggaatgagactctagctcacggatacccctcgtatggccaatcagtaggggagacttcttccatggagacctttcccgcaatattaaatgccttcgtccctcttggagtgctaagttaatcatttgggtggcttaatgactcctttgccttttttcattaatatccatgtgtcgtgcttacgaaaatgcagataacatttatcccaagcttccaggatataccatggttcgggagcttgtagtatctctttctaaaaaaaaaatttcgcgcacgtgggacttaggacaggttctttaattcacttcaccatcaatcgcgagactgaagcatcattactgaaaatgcatgattacttatattcttttgttagtgccttaaacgttgactttgaaattttttgtgtgtggtgggtgcgtattctgcgcgatgctcaaaatggcggtgattagatttgtgctttattctcattcactgtatcccttttacgatgcatgcaatgatgggagccgactattgggaagtgagatatccccttagtttttcgttcatccaaccgtcagacaccttttgagtgagttaaagtgtctacttcttgtggaaggtgcctcttccaggtgccccataaatactttcagaaactgttccacttttccctttccttgcccatcaaaacaatacactttgagtctcaaatcttctcatgttgtataagaattcatcaccattacagtcagacactctctccttcatcgtggacgtttcaccaaaaccgttaatccccacattgtcttgtcaactggtaagttttcttgtttgtttacttgttttataattttgaggaatttgtgaaggtgcctttgcttctggaacactggttccacgtccattgtcttcgaaggttctggaattacgccatgtgctgacccactttgttattttatcgacttctggcaggtacagtaagtctgtcataaaaagagcagattctcctaaaactgtgagcagtagttctaccagcaagaagcagtgtcttgaggtatccgcccccaagattggtctttccccagtgtcgcgatcattagttgaggctgggccagccttggtcttcttaccccttggccttgtcaaggtttccttcggtggggttcaccttccccacgaaggtgattcctttagaccctcttgctagcagaaaaagagggaggtaaccaagatcctgaagggctgcttggacgccgaaaggctacaagtccgtaggagggtagtcatgttgtcagtggtctacgaggctgacatcttacaggatgtgcatactccaatccctacgggaccgattatagagtttgaggccttggagaagatgcacgcatacaaggtgggcagaggggttgtaccttttcccgccaaactcctagaccaggtagttgttgggttttatgcccnnnnnnnnnnnnnnnnnnatataatcagatttatttattaata

SEQ ID NO: 24883 - DNA, 3647 bp, Cannabis sativa
cccctcaagcgtagttatattactaaggaatcacattccaagcttaaccccctcaaaacaaataaggcaatgtttcgcattactattcccttgctaccattaactcattctaaagagccccttaagtttatcttctagttgtaaattaatacttaaattaatttttttggcggtaaaaatacattccgttaatattttgttacaaataaggtacctaacgttaacttctcagttaaatggcaactaaataaatacgtagcaacttctaattagtctaagtcattatttttaattttttatttaagaaataaaaaaaatattttaattttaaaattttaaaaattttaaaaaattttatataaattatataaaaaaatgatcaattaaaataactaaacaatataattggaaaaaagaaagaaaaaaattctaaaatttcaccttcgcatcaaaactcaacaactgagacactttttcaaaactcaaatattttatcacctaaaaagaaaaattcttaaaatcatcatagtgaacaaagaaaacttgtcaactcctcattcagatctcaatcagacttcgcacagagtcaaatagagagggggatccaaatttagaagttttcatggtgcgctgtttgggccatagacaccggagttgctccgtccagcattggagttctctgatgcttgcaatcttggtgggtgggaatctcatccgttgattgtgggtggaacgcttcaccggggtttggtggaggtaccgctggagatgaagcctgtgggaagaaagagagatgagtcgactaggtttatttttaggtatttattttttatttttttattcattcagtttctatttttaatattaataacttaatatgaatgttaaatttagtttattattattgtttgacagtttaaacgaatctttatttttctttaaataaaaaatcaaaactaaatggctttgaccaatcagaagttccaagtatttatctagttggcatttaactgaaaaattaacatcaagtacctcatttgtaataaaatattgatagaaagtatttttaccaccaaaaaattaacttaagtattaatttgcaactagaaaataaacttaagtatttacgcctcaagtaattaggtactaaaagtttattcccaaatagtgaaagagggacaatagtttgagaattgggtaggctataactttgtgtatgtttttttcttatttatggaatagtgatgatggataactttgttcatatatggtcttataccatgtcttcttcgagtgtttcctggttccactatcggtcaacgaacctttttgattcctttgtgttcattgaatttttaatccagctgtgtgttttatcttgtagatctgttggtgtttccttctctctcccttgacttctttccttgttgcttttctacttattgctcatttaagctttcttgcattcctcttctttctgcctgtgtgctttgttcctttgtcactcatgcttttcccttttgtttcccttgacttgtttctttgtctatcgtttcttgtgtctggtgtttgttgcatgtttctattgtctaccttgtggtgtggggtcagttgtagtttttgtgttgcccacgtgttgttgagtgtagttggtggaggttagtatagtgtcatggagttagttaagattcctgaggtggtgggtgggggtagaaatctttctttgtttgatgacacgatttcattaaatgcatatgcttctactatcaaaaatttattgtcactttgccttttgggaaaactaattgctcctcagtgtgtggatgagaacttcattaaaagctttgctcttaaggagtggaaatgtcatatttcagtatctcttgtccagacgaccacaaaaaagtttaacttttttgagttagtttttgaaaatgaggatgatagacttaaagctctgggcaacagcccgtggaatgttaaagggtgcctattacttctcaatacttgagaccctagccttgatgtatatagaagcctcattttctactgcgcggttatgggtccaaatacataagcttcccttggattatttttctataattaatggaaacaaccttggggctcttgctaattcggttgtggaggtcgaacttgatgataataaaccggccacatggaaaaaatggctcaaggtttttgtggatgtctctattgaaaatttgttgttctctggttgcttcattgaggtacgaaaaggcattaaacattgggttcagtttaaatatgaaaaaattggtgttttatgctatcactgtggccggcttggccacttacgtagtggttgtgctcaagcagcccttgatacagtcgcaaatgccaatgggaattctttcccctatttggactgtggctgaacgtgggtttccattatatcgactgtttctccgagaaaaagtattgtatcgtgagcgagcaacacccaaggatgattggaatgattcaccggtttccttgaattcccctgttggactttgcgtccccaagactggagttgttcttccccaacctccgatgaacggcccttctccgtttttgagaattctgtaaaagattattccaggccctctattgatgaaacgtgctgccaaaaagtcggtgtgacttcccaagacatgctcaggcacacatgaggaaggtctttccactttgggtaaaaagctagcatttgttgatgctgagaaagaaaggtaacctgatgtatttcctattgtggattcggtctgtttaaatagagaagatgttgatgtggcctttgataactcaaagaacaaaggagtgtccttgctggcagaaaattcaaatgaaaaattagttaggcctgtagtgaataatgtggtagacacggctgggccttctatgatggggaaaaaaatttcataatttaatagttctctttatgggcaagaaatgaatgatcaacttgatgagaatagggccttggctaaatttttacaggccgaagaaacttttttacaagaactaaaaatttttggagagttggacttacatgaaatcaaagctattgggagtgatattggtgtacaacctacttctaaacaaaatgagagaaccacccaacttaaaaaaagaaaaatgtttgaaggctctttctcagaatgctcttgtcttaagaaaattctacgttagtgtaacaccctactagtataggcgtgttaacatgatttttaacttaattgtgcaactcgtagctaattaacgagtttattgaaaattgtgaataattaaacctttaattaactaattataaataccaaataacatacttggattaaattgggatcccgtttacaaaaatatttacaaaagttttactatgcatattacaagggtttgtctcccagggactatacaaaataaccatagccgtctcaaagaccgtacgctccatgcctaatcgtcccaacatgtacaatcttcatatgctcgctctcacaattgctcaaccttagccttgcccttacctacacatgcaaaatatatttgtgagtcgataaactcagtaaaaaaaaagcatagataataacacagcaatacccctgattataatccagtgcccatacacc

SEQ ID NO: 24884 - DNA, 3088 bp, Cannabis sativa
aaaaaaaaaaatagagtatgtactaatgaaactggatcaaaattacaactttattacaaacattaagtacttatgctgctaaaaaaataattattaggtttatactacttacaaattcaaaacttttgaccattgtccaaaagattctgcccccggtgacgaagaggccaaagaccatttgaggtcaatgttgcctatagattgctaaaatatagtgtatatgtagggaatctttattacttgtatactatataataaacattattattaaattccaaaaaaaaaataatgtatgactatgacatgcaattgtttatttttggttagatagagcacaccattatttaccgacagcttttcttttcatcattcttttcttttatataaatataaatataattgatttgtctaaaaatattaagaaaaaaagaaataatatacatcctttaaaaggctctttccttaccttctttatctatttcgataaaattataataaattacaaagtcaaaaataataagtttaaacaattgtttataatatatataaaaaaaaaatagtaatttgtacaataaatttacatatggttctaaaaaattataatttgtgttacaaaaataaattgaaaaaattattttaaataccgaaaaaataaaaagtgtaatgtgtacacagtatgtagagaatctatgacgtggccttatccgcgtaatatcattcattaacctaggagaaatttgttaaggttatgctagccttacctaattttattttatttttattttaattatttatatttattttttttataataggtaaaccttacctaactatatagatatatgaccactcataacaactcctttaaaatatagaaacactaaaaaatttaaaaattggtactaaaaacatactatagcaaatgctctaaacttcttttttattttaaaatttactatttatgatctatatttatagaatactatatattcattgctaaataaatatattttattaattattttagattttaataattatttgtatatgagtatatgtgtatatatttatattacatatttaaaatgaataaaatatatcaaaatttgaagaaagtagaattttagtaatgtattctaaaaaaattgatgtatgatgtaatataaaagtgtgctagaaagtagaattttggttatgtgttctaaaggataaagtaaagaagttgtcgagaatgctctaataatacggtaaaaatttatcaattggtattagaggaataattgattggtaggaaaatattaatattaatatggaatcttggcagtaaaactacttaaatttatactttttaacacttaactacaaaaatttaaattttgacggtaaaacctactaaactcaagtttcgttttcttcattacatttccgtccaaaaacttcagttaagtgtcatagtggactatccatgtgtacacaagtgtacacatagtaaattttaatagtccacgtaatattaattgttaaaatattgtaaaaaattaatttaaaaattataaaaataaaaaatatatattttattttacttcttttcttttttattttaaaatttactatttatgatccatatttatagaatactatatatattcattgttaaagtcattaattagacactctgttttattaaatgacaaaattgactttatatttttcaaaatgataaaaataagacacaaagcttaatttttaacaattttattttttaatataaccgactttaagataatttctaacaagaataaatacataaaatataaccagttttgtcataacatctctagatcagattattattaatttttattttgacaaaaaaaaaaaaaaaacagttcatggtcctatttgtacaattttagaaaatatagagtcaattctatcatttaacaaaaaagaaggtccaattgataaattttacaaaacacagggtccaaaaaaatatttaccctttaatttatccctcccattcatgaccgggtctagctcgttgagaagtttgagatgccagagccaccatctctaccccccttcccctttttttatggtagaaaaatcaaacctttgcccaattataaatatgcatggttatttaaggtttttttatttatttaatttctactggtttgacatatggttttttgggtgtagtagtgggtgtggttgtggtggcagtggtggtgataacaatagtagtgaggatgataatagaagaagaagtaagaaggaacctcaaagaagaagaggaatgagtcatctggtcatcatgagagaaaggaaaaagaaaaaaaaaataggattgggaaaaattataattttataatttattttattttttaaattctaaatatttaaagaattaatattatgtggactattaagttcttgtcaagtgtagatcagtatatattgtggtatgtaaactgtggcacttaacagaactttttagatagaagggtaaagactaaaatagaagtgcagtttaagtagttttactttcaaaatttaaatttttatgattaagtgttaaaaaatataaaatttaagtaattttatcgccaatatccccactaatattaataagaagtgattatatatgtatggttgggcatgcaaaaaatatttgtttaattaaggtagttttaatatttattttttttcaattttgatattatgaaggtatatattttattatagtaaggtttgcaaattttattgtataactaataagttttttgaaaataaatatttcaatataaatagttttaatattatttttctttaattgttttctatgattataaaaaaaaaaattataaatatgtagtgtactaaacttgtttaaattctaatttagctattgcaaacaaagacaattttgttgtatggtggggaaaaaagatcttttataatatattcatagttttattctttatataattaagagaaaattacatgtgaatacgtgtttgtccatttaattttaataataacgtgatgtgtgaaattattgatattactgttattttatacc

SEQ ID NO: 24885 - DNA, 3183 bp, Cannabis sativa
agctataattcatcattactcctcttgagttttgtttgtatcctggagacatcactagcaagtaaagtattctcctggttcctgatggttagcatgcactcaaaaccagaattcatgtccttcttctattggacaagagcctctaagttagtaaggacctcaccactttttagaagcttagcctcctaggtctttagttgctctcagagagcgcttgaggaccccttggatttgtcgtgaaaaaagatgagcttcataaatgcctaaaaacaaaataaagtcaagattagtgccagaagacagcacaggtcaggcagcccttttatggttctatgacggctggccagcctctcaagaacaatgcactggctagtaagccttgcacaacagctccttatggttgacagcgttcaacaatattgaaaagtgagcaaagttagatgtgcaacttactgaggtcaacatagcctctccaactcgccatcaccaagctctcaaagcttatcgtccacagtgggtaaggctctatccatacgcatgcgagttgcctccatggctctgttccccatggatgaatcgtcccctcaactgggcctctaggcacccttgctcaaagcgtgagtcctccttaatggagggtcaaggatcatgggctacctagctggtgcaggcccaggtggagaaggaggaagagaaggtcctgcagcatcatcagaacgagtggtccaagcaaaaagatggtgcaatcagaaagtaataaagtcagaataaaagttatgaatatgtaatataagatcaaaatagaaaagatgatgcaatcaactaccatcatcgtcagaagaggagtcatctgaatcattaatggctgccttgtccttgcctttatataagcaaggggcaggtgggcctgatagatggcatctaagcctcatcagcaaagtggcatcctcgacggttcccccgtgagccaagcactagcagaaggccctttctctcttctctaaattattggctatctgagatggaggaacatagttgtccatatcgggagtatgctcgcctcctaggctagcctcctcagtagctagggctccatctaaacagcttgatgggcccttagccctcgttgtaattactgcattttaggatatggattagtaaaggcaattagcgttgagtattgataattctataagtagttattaatttatttaattttgggtcccaattttaaaaatgggtattagagttataatttctcaattctagagattttattaaactctagatgtattatttgtattatatatgaaatatgcaatttatataatttttgctcggggacgacgaaaaacgcgatgatggccattttaatcacatgggtaagattagaacctttttcttagtcagataaatagtggagataaatagaatactagttttgagcggggttatggtttttgaccattttacccttagactttaaattgcttaagttttaggctaaaagggtattttggtaattttaaatggagatttagttggctacatgggagagtggaagctgcccactttgtttacttcatcatgggaattaattaattaggtttgatttatcttagtaaaatcaaagaaaaaacaaaaaaattaagaaaagtcaagaacttccctttctctttcttccttgctcgaccaccgcaagactagcctagacttgggatttttctctggtgttaattaaggagtgctagatgaattcaaggagtaattagtgaaggtaagccatagaaactcttaacttatgaactccttaagttttggttggttttggtatgaaattttgaagtttagtggctgttaggatttgattgtagtgtggttcgatttctaatttttatttgagttagttttgatgttttgttgctggtttgaggtttggtgacatggatgcacaagcttgagtttgaaaactcaagcttggttcatccatgggactttttgattttgtgggaatttctgggttatgttgcttggaatatgttggttgatgttattataggtgttctggatagtttggtgagatttggacatgttttggataggttttgaattgtttggggcaacctggtgcaaaccgattaactagtttgctaggtcccgtaaaactggttaaccggttctaggactggtttctcgaacaattattttcgtcgattcgtgtgcattttagagccttggttgggtgattccctatttcttagggtattatggttcagttctctatggaagaacctttagttggaggttcgggtttcccagattagggttttaggcatgttatttacccaattatgttatgtgattaagaatagcatagaacatattgtatatatgtgagtgtatgtatgtgtgatatatatgcatgcttgatgtgattcgtacactaccaacactagtacggtagcggtacagagtgcattggtatagtgtatgatgtctaaaggatacattacggtgttaccaacactagtacgggtaggtacagagtgcatgtggtacaacacttagcggtactcggggtatggttcataccataccaacactagtacagtggcggtactgagtgtatgtggtacagtggtacatggtcgtatcttatttaagaacatttttgctcatttgttaagccttgtaaaaaggtttatgggtgcctagatacaagttagtattatattatttgttatacgcttttcttactgagtttgtcgactcacagttctactttcgtgtgtaggtaaaggaaaggcgaaggttgaacaggagtgagcctcgagcttagatgatgttgtacatgtcatggcggcgcgacctagagtgttcggtttgaggacatctgggtttttttttgtagtcgttgtgcaacctgactaaatgtattttgaatattttgtaaaagtttaattacgggaacccgacttttgtaattatatatataaaagtttaataattaaatctaaaagtttaattagacacaattttcaaggaaatttctttgattagcaaagatcgcactgtaactgaaaaaattaatgtagcgtgcctaatgtaatatccagattaaaatagtatttattattatttttttttttggatattaattgagcgaggataattatcttgttt

SEQ ID NO: 24886 - DNA, 2926 bp, Cannabis sativa
  modified_base (2879)..(2882): a, c, t, g, unknown or other
ctcaaccgtcagatcaaataactccctcatctgacggctgccgtacatcacagaatgcattccgtgaaagtacaatcacggaacaaaatcatatccctatatatttattaacaagtatcttttaatcatgcataatataatttttttgaaattaaatataattgtttttattgtaaatattaaatgtaacttacagtaatgatataaaattatttgtgattaaaacatattatttaaatacaagttgttattaatttaattttagtcacaacaagtattgtaactaaaaatatgtttagtcataataaattataatttttaatttgtaacttgtatatttagtcacagattttttattcataacataataataacgatttataattaatcacaactttttttttatttatttataatcataatttttattattactaaaagtaaaattttttgtagtgtaagatgatgatcactttattatattttattttttctttgaataatgtttatattaaggatgaaaatgagtcacacaatcaaattaaatacaaattaaaaaaatcacaaaaattatacatatacttagatattgtactataaataataattaatactagaaataaaattctcttttgaatgatttataagaccaaaaaattaaagctgctacatttcacatgtgcttgaggaaacccatcaacatgagtttgacaattaatatataatgttaattatatttttcttttcaacctttgcgtcagaaaatatatttcagcaaaatatttttttttctaatttttgtatggcagtatttaatatagatataacattatttttgtaaatttttaaaaaaatttatagtgtcgaaaacatatattgtaaatcggaatatctaattaaaattctgtttagatacagtaaaaaatattcaaatttttttaatatttataagaattatacaataattataaaacattaatgttcagacaagaagattaagaaaaaaattataaattataatataagaagttataattaacgcttctcgtacatatattagtttaacttattttttatttatttatttatttaaaaaaattaaataaataaaaggagaagaggaaaggcatttaatgagattcatgatccaaacattaattatataccaatatatatagtctcaccaaaatctactaataattatgctgtagattaaataagagaagaatatatataaatattaccatgattgattgaataataaataaattgaaaagaacatattggttttattgcttaattaatagcttttagactttggtagtagtttaaattctttacagccctaataattatttaattatgcatgcttattaacttttgaaaattatgccctagctagcttaaattatcaatatttcaacaataattagaaaattaagtgtttattagggttatctcatggctctatttgactgagttttctgcttttaattatgaagctcttcttgaaaaagctattaaaatcgattttggttaaaattaaaagctaacactcactgatttttctactggtaacagaaatgtttttgtagcttcagaaactcaaatacaacttctaaaaatatttaacactaattaaatgaaaatctccaataattaaatgaggggtgtcaccattaatttaagaaaaaaagatgaattaaaaaatgaattttttcttacatggatgaccctttttaaaaattataatatttcaaaatatattgtaatgatccgatattaattaatttaattatttattttgggataatttacacaccaaaaataaggttttagaccgctatacagtactaccacgcgcacaatattctctttagatcatgttttcgttatcttaaattatttaaaaaaataaataaacttacgacaactatcgtgtaaattttttgaatagccatgacatatataaaagagttcgttatgtattgagaactaccatagagatgctataatttaaataaaataaataaaaatataaatatggtgtaaataattattctagaacaaaccgagccgatatagttaagacagattaagtctgtatctaggactcacttaattaaggactccaatttttttttacttgttttaaaagatacacattttttttaagtgtccaataattttttttttataaggaaagccttaaattatgacaattgttttttgtatatattaaatatgggtgaaattaatgggtggaatatgatcgaggactgtactgggcaaattaagacaaacagagttatgagttttctgagaagtaggtatttattttgaccatatttattaaatttacacaggaaattatgtcataattaatgaatgagagaataatgtaaatattttatataaaataaaaatctacataatcaattatttactgaatgaagtcattccaactcatggtcatatatataaataatgacaaaaagcttattttgttgtgtctatatatatagctagatcaattagataaatatatatataataaataataaatagaaaaaaaataaataaataaattatgaagatcgagttaacaaattaatttatatttatatatatcatcaactattcttatgcttaattattaaacttaatgttttaataataaacattaataatatatatttatatatataaaatatacttatctaacaatttttgttaattttactgaatatattttaaaaatataaaaatatttcgttaaatttaatagtattagtaagattaattttagaaatatatataaatattgataatatttgttttaagttaattaaacttatactaattttaaattaatttannnntatataaatattaatatatttttataacattattatttttaata

SEQ ID NO: 24887 - DNA, 1310 bp, Cannabis sativa
  modified_base (882)..(888): a, c, t, g, unknown or other
tcaaaacatggaagctttagatttctttttcttctttctaacgcatcttgaatcaactcatttggagtttgtatgtgaaagttatatatattttagtgaaagatgctgaagctgtcaatttgcttgagtagtcgcgaccaccattttccatggtcgcgaccctttttcatggttgcgaccatggtcgcgactatggagcaggtagagagcttgatttttgtgttttgcctatagtcgcgactaagcattcaacccttaatctgaagaatttgttgggcatttatagtatttataggaattatacttaattttcttttttctctctaaatggggagtttacatgaaaatacataagattgggttgtttcatgaggcccagcccaggaaaggataaacttgtcgactaagcatattagacacaattaagctatcattggcgtgtcctctaattgtggacaattaattatgaattaattgcttgatcttcatttgtggtaattttactttttagcttaatacgatcatttggccgagatttgaaaagagttaattcctttttgtgcacttggataaaagagagaaactgaactactctttcaggaacacgatgtttgaccctccagaatcatgatattggatctcctttcaaataagggtcgggctttctgacacaacatgaaaccaacacgagcccagaaagcactagcacgactaggcacaaaaaaatacgagtttaggcacgacacggcacgaaaaatatgtcatgaagcatgatacggcacgagaagcacgaaaggcacggcacgtaaacacaaatagactagcccaaaaaacacggcacaacatattataaaaccataaaatttattattattattattnnnnnnnttattattattattattaagatatgaatttaaaattataaataagctaaaacaataataaaatttaaacataatattgaatattataattctataattaaaattattaaaatataaaagaattaaaattatatattaatttatttatagtttatagggtgtaatataaaaatttcagcatttataaataaatattcaaattttaatgatattaaaattttttcatatgattatctataaaatattattcaaaatttatatgaatataactaaaactttgaaatatataaaatttaataacggtaaaaaaaatatgaaaaattaaacatgaatttaagcttgaatatgaaaataggctgatttatttaaaaaatgtgggtcggcacgagcaaagcacaacacgaaaatactaggcctacaggt

SEQ ID NO: 24888 - DNA, 2520 bp, Cannabis sativa
ccccattgggggcgggtatccgcgggtataattgccatccctacctatgtctattaatatgaatgaccaagttcaagctttaacattgctcactcactatgtttcatataagaatgttctctgatgagtgatgactcaacctaaaaacaggtccatttacaaacagtggtagccttttaaaattagtagaagcagtagtagtactactacttgtattataaagcaatgtacttgtttagcatttttaaacaatattaatatatatttttgattcaaacagctatcttcaatgtgggtttgaaagtcagcccattgcccatgtcagaaatatattcttctttctgagattgcaaatgcaatgcaaggtggatattctagaaaagtgttacaaataaactaatgcacttaaaaggagtactcttttactatgagaaatgctataatattgttataagagcaatttaatattaagtgttacttattttttattttttatttttaaaaaatagtaaataacttcattcaaatagttaaatcagctatcacaatattttgtaataatgcatgagcattagttatagaaaaaatacaacctaacataaaacgagaaataggtgcaaaaaagtgagcagttttattcgcagattgtgaaacaaaacaacaataaacaagaaaatcacaaatagctaatctctctccaaacacaacttggcaaaaagtatagtgtaactacactctttttttcactaggcaatggtacaagcaagcaaagaatttaaagtaactctgacagtgaattctaaattaagaataaaatcaatttcaaaaggatatcatttcaacattaattttttttccaattccaaccacgccactaaaaattagattatattttttattattatattattttattaatataattagattatataattatataattatttcttatttttataaaaacattatttaaattttaaagggtaaaaaaaaaagaaaatatcatagtctacagttcctattattattagtggaacattataaatttccataaaaataaatttacttttatttttcggttggatcattttgtgaaaaaaatcacatcatatataacattttaacgtttggttagagatagcctatgggcacttacaactaaattgcatatatcatgtatagtgtataatttatctccaaccaaacactataatatacaccagtttttgtcataatattaatattatctaacttatatatataatattaaaatcaatataatgataagaaaagtaaaatttgatgtagtttttagtgttacgattgaaattcaaaaaggaaaaaaagatggtgatcatggttggagatgggctaaagtactaatatgctttctcaattccctttaaaaataacttctgtagcaattagcaaaggcttctcctaagggtactggcatgtaaggctagtccccgaaaatcccgttcttcttcgaaggtcagtcgatcaatctatcacatgccactgtcattatctgagcgctctacttctgatgatctgggatggttgaatttgcaaccattttttgataacaaatagggattgatattaaataagtacagttaatattctactatcttctaactaccttgtaatttatgtgaaaaataaaaaagaagaagtttataaaacaacaaatgccaactgagaaaaagaagcaaggaatttgcttgaggaaacaactaatattactgtcaccttagaagagctctctttctcaaggctaaatgcaagtattagtttccatccagttaaaaagttacagtatacaataaagaattgaaggcctgctcctctttttttagttttttttttttgcttttttcttttctattttttcatttcttttcttgtttttaatctctttttgaagctacctggtattcacacaagagaatcatacaacaaacacataagatgagttgagatgagattacaggcctaatctgattcaggtattgccagcttcggttggcgtaccacaaggggccagagtgttggaaggcaaactgattccgccccctcttaccgatatattttgaaacttggcagaactagctctgctcacatgattcgcgtctagaaaaataacaattacggtgatgtcatcgtggaaatgtcgtcgtacaccccggtcaatcttcttcaagtccgagtatctcatttccctcttcttcgcagcttcttgtagagcggttttcaccaacctccttgcacttccctgaaatgaaatataagtttaacaaacacaagttatttttctcctttcccattttcttgaccaaaaaatataatctttcatgaacagaaatttggttggtcaatttgctattggggatcattccttttagattatttactaaaaaaaattgaagggaagggaagggaaggcaattcaatgtgcttatagaactactctaagtagcatactaattatatagacttcaaaccagaacttaa

SEQ ID NO: 24889 - DNA, 2024 bp, Cannabis sativa
tgatatagggtagagtaatttaaagaggaagttcaccactgtctgcaatcacaacttttgtcttaggggttccactctgtgttccttcagcttcaaccttgtaaacaacatccatcccagatatcacctttccaaacacaacatgtcttccatccaacctgtatatgtatatagtttaaatggtaaaatattcagttttgactaaggccataaataattaactaaacaaagacagtgattattagttttgttaaaagcctgaatgtgtatccaattaccagctagttgtcacagttgtaatgaagaattgtgaaccgttggtgtcaggaccagcatttgccattgacaaaaatcctacaagaaagacacagtttcattcataacatgtacctttcaagatcttgaggaaccgagatcggcaacaataggacattcattggttcttacctgggccagtgtgctttagcttgaaattctcatcggcaaacttgtcaccgtaaatcgattcaccacctcttccatcaccaagtgtgaaatcacctccctgaatcatgaagcttggaataattctgtgaaatgagctacctttgtaatgtagtggctttccactcttgccaatgcctttctctcctggatgatttgcaaaagctaaaggtaagaaaaacaacacacactaaaatagcttctaactgagaagctttcctctccattcaaaaatctgagatctttatatcctagtaggctagaagcaacacaatctgcatttggtttttacatctctataagtcacaacattcaatcactctaaaatcactacttttcccctgatcagattcgacctaactcccaatttcaaaatagttttttttaaaagaaaaaaaatgcaaatacaaggagagaaagaaactaaaaccatatgtatacctgtgcacagagctcggaaattttctgcaggaataagaattaaaagtcaacaattagtccaataaatagctagaaaatttgcatataatttgtatttacatataaaaaagatcaacctttaaatcgactatacctgcagtcttaggaaccgcctttccgaagagccccatgacaacacgacctgagatcacaaagataacaagtgaatcaacatcaaagaattctgatctaataataataattaagtagaaagaaaatctgagagatgcattgcactaccagctggttttccattaatctcaacatcaaagtagaccttgtgtgtgatttctttgagatctacggtttttttctgggcctgaataaatggccataaagataacaacgacattaataataataatgaggtcaaaaagaggggtaaatctagggatttccaaagtattgtgtatatatactatagtataatctgtgtacctggattagggccatggtgccgaatagaaacatagtacacagaagaaacgacgccatcttagccatatttgatcttcttctccggcaaaattctcttgttttggaatcgcagcagctcaacccgagtggttttagtgtgagtaacctgaattttctttataacaactctctctagtcttacggtttattcgtgtcattaccaatagacatcagacatgtggacttcttccaatttcgttggcagctggccgcttcccacatattggacttggtcccatttgaattgggctacaatcgatccatgttttaagctatccccaatattttttttttttttttgcatggtgttctctattttagatcttctttttttgaaaatatgggtgaaacattcattaagcaattaaacagttagatcttgcggtcattatgaaatagattttgcggtaaagaggagatcggaatagagccatacagttgctgggagaaagcccacttagccacattatggacaacatagttataagttctactaacattagaaaaattacaacaaataaaagcgggagaagacttaatacaaaaggagacatagttctcaagagcccaatgggacaacttcc

SEQ ID NO: 24890 - DNA, 4208 bp, Cannabis sativa
  modified_base (60)..(60): a, c, t, g, unknown or other
aacaatctcgatagttcagggggaatttttgatgaccagaaaagttcagggggcatgatntggtacatgttaaagttcggggggcgaaaatcctaattagccttgatattatgattatgattaagtgagaaaccgggattaggattattaccctaaagtgagcggttatatggtctggggttattactctagtaattaaatgattttgaatgcaatgtcatgctatatatgttgatataaagaattatgcaggtaaggcataattaggttagacttggtaatcagaaccgagataaaccaatctaaggccttattgtatatagacgagtgagcgcaacacgtaggtctatgctaaatagacaataggtgtggtgacatcaatatttatttgaattgagaatatatatattacatattgatatttatactgtcttgttgggcttagctcataggtgctctactgtgtaggaaagggtaaatctatttgtgatcaaccatgagttcgagggcttggcgatggattttacatgttcggggcatactagacaacgtggattgggtttacaagttgatgtattttgtattctcagttttgtcgcttaggtcggcatgtaaaaatgacttgtaatattttgtgaaaatttttataggatcccaaaacatgagaaatctttttggaatggtttgtaaagtttaaataattacaagttatatttttatttcgtacataatttaaagtttaaattttattcttatttctagtaatcccagtttaacgggattaggttatgtttattggaaatcgtaacgtacttaattgttaggacattacaatttggtatcagagcactaaggtttttaaatttcttgtagatcagttggaaatgtacaatcatcattagagacaagctcgactcgtggtgcagtaaatgttgagagtaaatgcttataattacttatgtgattattcatttaccgctttctattttaggcagtatataagcatctagaatgaatgttatatggaaagcatgattagtattttaattgataaatgtttatttgattagagaaatagaatgtatgagttagggtttaaggcaataagtgtgtaattgtagtgttggtgcctgactcacaaggttgttgattttaggactatttgtgaaaatggaccctccgcaatcatctagaccacagggcaagcacgtagagcctgataatgaccaagccaatctatcggcaccgcctgcgcctccacataatttggggaataatgcgagggttaataatactaatccacctgccaattggcagtaaattttccttgaaatgcgaagcagtacttcatcaagaagataaattgcgtcggtttaggcaaccaacactggaagctccagcagaacaagtgttaccaccagttcctattctagtggtgggtaacctgggatctattctaccacatcaagattctgtgttcgaatgttttgtgaagctgcaacctccaacatttatggaggtactgatattatcaaggctgaacagtggatgagcactattacccacatcctagataacatggggtgacggggacggaacaagttaattgtgttgcatttatgttacaagataatgcctgtgtctggtaggatattgtgggtcaaacccgagacgttagtaccatgtcttgggaagagtttaagaccctgtttgaagaaaatttttataacattgctgcaagaacttcacatatggaagattttgtgaagttgacccaagggaagaagacagtggccgagtataccctagaatttgatcgtctatccaagttcgctggtgatctggtaccaacagatttcacctggaaacaaaattatgtaaggggactgaatggtgctatcagtcgggacttgaaaattaccaccgatcacgacacattttacatgatttggacttcttttggcttttttggagagggcatttcgagtgcttttattttttcaggatcggcctctatttcccatatattaactataaatctcaagaactttcccgatgacacccctaatgagcatttattcggattgagcctcatcttgtatttcctcaaaattgaaaaacactcaacaaggtgagcaacatgattattaaatatagaatacgcattgttaagaagatttgacaaactggaaattaaagagtagtttaaactacttttgtttcggtaacatatcttttgaaattgagtttgcatatacaccaatcaggccaatgaaggtgttgtttagtttgtaacaaaaaagttttagtgaaacacaattttcgtaatttttttgtttaaaaaaaagtgtgattaatatgtatcaaatcacgttttttgaattttgataagaatcaaatcatgtcttcgtcgaattttttcagacgattgaaaaattctctctaaactattgagattgttagatttaagaatttttgtccaattccatttaattttactagtgtgacgcttgttcatgcactaaatcatgccctttgaaactttgaaatctataaaatcgtgttcactaaactttgacatgtaccaaatcatgtcacttgaattttcatttaccttttgttcataaaatataacaaaaagttctaaatctcaatgaggaaatttttagacaaaaatctaattctataaaaacaaaaatgtaaacggaaaactatatgaataattaactacaacggccgtctgtcatattgaatatattccaatatttgttaatctgttgattaattttcttttttattattaatatacttattcaatataagtgattatgaagatgaactcctaccggtcacatttagttaattaaataaaaaaaaaccatttacttggccagagtcaaaacattttttttttatatattatcatttctacattattaaatattaataaaaaaaactaaccaaattaatcaggaaaattaagtactataacaattgtagtactcttgaatctaattccttgatattcaagctatatatctctgttattaaacaatttagtaacataacatacatatgaaataactatcaaaagttgttaaaaatgataacaatatattcttcttattattaatttcaagtaatatataattctatgaaaaatgtgatgtgttgtcattcaaaattatatatatgatccttaaattaagtgaaaaaaaaataataataatataaaatcgtcttggattaatttctagggattatcatcataaagttaatttaatttgttgtacatataatattaattcataagtggtgagatcactattttgactagcattttatttcaataacttgactagttctaatttatatatatgatttcttgtaaacatggctattgagtctgtggtaagttattaattataatccaatataatataatgtaatttatcaaaggaataagctaattgggtcttgtagaatttctctcccttgatctctacctataaatacaataaaaaatgtcatgtaatatcgatcaaattattaggtatatattgattaaagaaaaatctcatttaattctaagaaatgggttcaaagaggccaatattgttgaataatatggtagcactactagtgttaatcttattagctcttgaaattacaagtactaaatccttagccgaagaactttctccaaacttctacgaccactcgtgccccgccgccttaccggtgatcaaacgggttgtggaggcggccgttgagaaggaacgccgaatgggagcctctttacttcgtttacactttcatgattgttttgtaaatgtaagcaaaacgacatgtcgtttctcccttttctataactatatatatgcatgtatatgaattatattaagctaattagacaattaaaacttttctttttttggtaattaatgttgtcaaaaattatttataactagggttgtgatggttccctacttcttgactcatcggagatgatcgatagcgaaaagctagcgcttccaaatgtgaactcagttcggggatttgaggtcatagacaacatcaaggcggaggtggatcactgttgcggtcgcccagttgtctcatgcgctgatatcttagctgttgctgctcgtgattctgctgttgcggtgagtatatatattcacaatttgttcaaagagcaaatacaa

SEQ ID NO: 24891 - DNA, 2914 bp, Cannabis sativa
tttgaatgtcccatgttcacaaaaattccatacttttacgtttcaaagtccatatataacgcctacgttatcgatccttaattccaatttccaaatccaaagactgctaacttatatatttccacattaattaattacgaaattaaaagttgaaaagtaataaatatcaattacaatatgttacttatacaatacacccttttaaaacgaatatattgatgtactgattgatgcagaattttttaagttttaattgttttatagttgtatacattataattatttaagatattttaaaaaattgtaatttctttggagaaattaaacacgccgaaaatagagtttgaacgtttttgcatgcgtgactctttattttatacgcgtgtgaaataaattgtttgaacacgtttttttatatggtaaattatttaaaatttcttaaaattttatagaatgtctgaaataactataacgtatacaactatacaaaaaaattaaatgaaataattaaagggtgcaatagtgcacttttttttaggggtgtgcagtagcactttttttttttttgccgtaatatcaattagaatattagatattataatattggaaatctctatacccctctaaatgattattttagtagattttttctctttcgacattcaaagttttttaatcatgttttcaatatggcatgtgttgtagttatttaagatttaagatcacttttatttaaaaaatttaaataatttatagtgctaaaaataagatttaaacaatcacatgtcacgcatataattgtaatttacttttaattttttgaaaatttataggtcctaaataactatagtgtagcactaaaaactctctttatcgaaagtacactataaaattaccatataatattaacctatttctaatattaatggttaacatcatttttgttacctatttcatttttttaattgattgtcattgttaccattaattgtagcacacaattttgatgaaaaatcttacttatataaatataaactaccaattttcaattaattatattgttatgcatttaaattatattaatctaacatatattaaaatctttttcagttatagagcttttataatcaatcaaggttatgaaaatagacttttatatttgttgtgaataaaattattattagttgactataactcttcaactctaaaataaaataaaatattatttagagacagagaaaactgtcattattaatcaagttgaggcctccttagaagaagagagaaagtcttattctatggtccatcaaaagaagaagaaagaaaagcctttcatggctttttcctcacaattctctctctctttttctctcttacatattttatttaagccaatttttctatagcaaattccattacaacacttctctctcttcttcttcttattcttcttctctcatcatattttttacatcaaaattaattccatattatgtttcgtgttatagagttatttagtttgattcatcgttttgttaaagtcactttttctttaacattttatttcatcttatacttgtaaaaagattacatttttatatatatttagtactattctttattgtttcattcatttttcccaattgggtatctgaaaaatctcacttttttctcattttttcattttttcaattgttaccaaaaatgatgaaaggttcacaaaatcacaacaccaagtactcatcaatggctattctcacaagactcacaaatgttgcccaaatccatttcatcaacatgctcacatatataatcctatttggttgtggtttaacctttggaattatcttaacaacttacatgaaagaattctcattcaatctccaattcacacaattctcaatctcaacttctttaccaacttatcaaaacacaactcaattaagtcctcctttgatgataagtactacaacaactactactactcaaaatgacactactaaagaagaagaaaaagaagaaattgttataaggccgaatatcagccgtcgaattggattggatgattatctgacaccgccaaatgtaacacacgatatgaccgatgaagagttgttgtggagagcttcaatggctccaaagattccacaatatccatttgagagagttcctaaggttgctttcatgtttttaacaagaggacctgtttttatggctccattttgggataaattctttgaaggacatgaagggttttactcaatttatgttcattctaatccttcttacaatggatcagttcctcaaaattctgccttttttggtagaagaattcccagtaaggttagttaacttttctcattattattattatttatttaaccaatttatttgtctttgtccttaaaatttggtgcttgtctccttattgctttttgttatgtttagtttggggaccatgttatagaactaactactaagcaaaaatgattagaaaagctaatgacaattttctcccaccaaaaaaaaaaaaacagggggtgttaagtaacacaagttaatcaatattaataagagaaaaactagtgagaatgtttggtttagtaataaaagttagaactaggccgactctaaattaaggcggattaggcccgcgcttaggattcactcaccttaagacccaaataaaaaaaatgtacatatatttttaataatttttaaaaatatcatttattcttataataaaaattcaatttttttacaagacccattcgaacatagtgtcggccctagttagaactagagaaatttttcctcactaagtaaaaataataataacagagaaactaatgccaattttctactataaaaaacaggggagaagggatttaacacaaggtagaaaactagaaat

SEQ ID NO: 24892 - DNA, 2208 bp, Cannabis sativa
  modified_base (152)..(152): a, c, t, g, unknown or other
aaactttgataggcctagaaatatcagttcacatgggtcaataaataatctcttatataacctaaagaaaattaaaaattaaaaaatcaaatcacatggttgacatttgacaagaaatattacgatcaaaacctatgtattttttttttttntattattattattattatttctgtcaaaaaaggcatgtcgacctttggtcaagatttgaattttatggaatattatatagttttttctatattgtttgatcaattgtgtcaaaaaaaaaaatatattaatattatttaaagggtgcttctaagcacctcctttattattattttttttataacttttgttcaaccaaaaaaaaaaacaaaaaacctcctttttcttttgttttctctctatgtgtttcgaacgttaatttttaaataaatacatcactttccatttgcttccttaaaaaagaaaaaaaaaatacaaaaacacatttataattttataaaaaaaaattaagtattttagtactctcaattaaaaaaacaattttaattatttaaaacttaaaattaaaataagtatacacatgctaatattttttaaattttttaatacctcattagaacaaaatttatatttgagtacttagcaaggaattccaatattcgagtgtatatagatcactatcgaacaattttttttttgttttggttattaaattcaaaatggtcatcaagcactattgatcgatacatatttgcatcaagttttatctagaaaaattattttagtttcataaaaaaaaataattgtatggctcatgatcgagatggattatgcactatcaagtaaaatcaaatttatacagatttaaatttcacactgaaaaaaaacaatagcaaaaataaaataagagcatgcccatacatgttggaaatatataatttttttgagatgaaattgtaacgtcattaaattaacattttgaatacaaaataatctgaaaatcaagggggatagaaggctctagaatgctacgaccagttagtgatcgtgcatgcctaacaacaaagtgggtcgtgggtgttaagtttaaatcatcaaaattatatcaaggtattttatttgttgttttagtggaagttagaaaaagatgagaaatacaaataggaaaacaaggtggagggtgcgggtggcgacgttgggtcgggttgggtcgagtcgggtaagattagagttcaaaaattgaatatagagaaaaatagaaagactgatgaatggggtattcaaaaaataatgtatatatttataagtaatgatacaataagaggcattaaggatgtgctgggtattggctctcagaaaggtgtcattaaatatctgggtctacctctttttagatctagacagaaggatgcggatttcaactttatccttgatagactaacatctaaattatagggatggaaagcaaaaacgctttccaaggcagggcgtgcgaccctgattaaatatgttggtctatcgctaccaatgtatgcaatgcacaccaccaaactttctgatcgtatggttaaaagaatagatggtcttgtcagagatttttggtggggttttgagaaaggaaaccatggcatgcatctaagagcttgggataagctttgtctcccaaagtctcttggaggcgttggttttaggaaaacaaaagaaatgaacctgactttcctggctaaatggggttggatgatgctaaatggttgtcaatctttatgctgcagagtcgtagaggccaaataccttagaggtaaagattttctaaactgcaattataaagattctgactcgtggttctagaagaatgtgatcaaagccaaggcaatcttaaaaaaaggggcttgtaagttagtgggtcatggtagaaacacttgcatttggagggatccttggattcctcacctaaaaggtttcattccgaaaccaataagagaaattctgcctggattgaactgtgtggctgatcttctcacaactcatggaacttgggacatttctaaactaaataatatgtttgacaaagaaattgtctctgctattttgaaaggaggcaatccttcggggcaggaagaggataaatggggatggacactggagtctaatggtagattcacttgtaaatccgcttatctaactcaagcgcaagatagagctagccattgtgtggta

SEQ ID NO: 24893 - DNA, 3429 bp, Cannabis sativa
ctggtagttgtatttcttcttcaggctcatccgaatcttccacatcagaaccatcctccaagatgtctcttgaaattggctcataatcaaaattttctacatcctgataaatgccaattgctgtctctgggatgttggcaatgtagtcagggccgaccctatgttaatttaggccttaggcaaaagtaaaaattggggcccagtgaaaaagtgaggttgttgagatttgaactctcaacctcttagttgttaaattaatcaaattactactaggctgcaacacatatttagtataaaaagtattattatttattttattactaactatattttttttcgaaatgggggccctgatcggtggggggcctaaggtggtcgcctccttcgtctcacctcagggctggccctgaatgtagtagtcatgatattctgcccccagtttatggttatggttgagcaatgttctcacaccttgctcattcatttgcacatccaggacagacaaagtgttgaggaatctctcaattgactctttatacttgttattaacttaaatataaccaatttcgttcacttgtctccatattcgatctaggtgagctcttgctttcttagacctcagtgagtatgacataactatatatttctcgtgtgccattaacaacacacgctctctcctcataattacccccatgcattgattaattttattcatatcctctattattcacctaaatttacttcccttcttagatgtcggcaagtgtctcaagcccttaattgccttaactacgtttggattcattattaactctgcacaacccaaaataaatactagattgaaattaaccaaacttaacatataagacataacacaaataaaacatacttacttgatgacaagttgatcctttgcagcgatggtgtgtatgtcgtgtgaattcaagatcaatataactatgataccattttgtaacgtccttatttattaaaataaaatgccataaataactagcgtcaacgtactaatgttgcctatatttaaaaataacaatttttaaaatgtaggtacccagttgaaaacaaaatgtcactatttaagtaaatgtaatagaaaactaaacgacaacatctgaatatattttagaaatttaaaagtgactttcagcgaaagatggccaagatcacacgcagttacgtgatcacacgagatacaccccatgctgcccagactcaacttgccaacaaaagtttacaagcttacttatctacacatggagagtaaataagggatgaactgcaaagcctaataaggaaaaaaaaatatcatgtacaagcactcacacatcatagcataatcatatacatcaaccatacaacaaatccatcatgtttttaaatagaggcagcaacactaatacagaaatatcacacactcacactctagcttccttacaagtctggatggtattactttcttaacctgaacgtagtaccaatagccagtgcacccttacgtacactgccccacttaccacatcatcatacatgtgtggtttccaaccacatccaagtacatggaacgtgattaaacagccatatacaatccatcgacatagcactatttcaccgaaactatcacattccacagtttcaatacaatttattcaaccagtcttactaggtactcaaaccatataaaaagtacaagtataaagtataactatttttccttacctcaattccattgtaattaactcttacaatatcttctaggccctatcaacaattagcgaactcgtagaccaccgataaactcaatatatttataattgttaatataaagcaagtttaacacaaaatttgactcataaaatgtttgaattagaaatcctactgctcacaaagctttagataatcgaaagacctttctaacggtataaagatcatcaaaatcgtagttataacccaggagttatggatattttattaaaacagtttctttaaaatcctggatcatgctgatttttggatacagtcccaaaataataattttaaaaatagttacatcacgatcgaaacaacacttcataaaaatgtagctcttttcttaagcttaaaatgagataaagatcttttaaaatgaattaaaattgagagagattgagtttttactaaggacactttcactgaaacaaaacttaaaacgagatatcctaaccgagtaaagatatggatttctgacaagtaagaaccctggatttctaatcaaattatctttctaacggttttagaatcgctggaaaagaatagatttcgagagagatgtcgcacttttactgaggcaatattggaaggaaatctaaaaaaactgtaactcgacagccagcatgaaaacatgaatttatgacactgaaataattagaattagggaaaaggctcttcatacaaaatgtagatcattaaattatttttaaaacggtactgagatcactaaaaacggacatacgagcagagagatacaattgttttacaaaacactctttctctgaaaacgaaaaaaaaatcatacttcaagaaaattacacaacaaggaaaagttgcataccttagaaatcgaatactgtgaaaggcttccaatcaacaaacttgagtctctcaaaacctcaattgttgctttacttttaaccctttttttattgaaattttcataggtatcaagaaataagaagaagcaactatgatagttgagaccaaggatatgaggcttcagatgagggtctagagagtagaggataattgattggtacgtgatctcaaaatatgaactaatatttagttaatgtattagaaaagttaattaaatattaatagaaatcaaatttgaaaaaaaaaaactatcatatcttttctcaatttggttacatataaatttgctatcaaattttatacaatggaccactccaccaatgcatctatgcattttaattaatttttaataataaattctattagtgaacaaacctatacaagcactataatcacctatactattagcacactatcaaaacttaataactactattaggcaataaaatataaacgatatacttttatataatttttaaaaaaaattatttacaccaagatagcccaaatactatttattattcatacatatttatacatatatattaatgaaaattaattgtgaggtattacattttactccccttaaagaaaattttgttctcgaaattagatttaccaaaaagttcggggtattatgctttcatgtcttcctccatttcccacgtcgcctccctttctaaacatttgctccaaagaacttttactagaagaatacttttggaccttaactccttcgtttccctctctataatatgaactggtcgcacttcataactc

SEQ ID NO: 24894 - DNA, 2194 bp, Cannabis sativa
tttattgtggatcaacttaaattacaactaagagtgtgtgattctctctttttctccccatggttaggaagaaaaaggtagtatcgaagtctaaggtggtggccaccgttgttggagctgatgaaccagtgaaggatctcccttcaatccttgatgatggattgtgctctgagactcaaacggaggtgttcttcctctgtgaagacattgaaactaagatttcacctggctgctcccaatcaaaatctgctacgagatgggcggaggaagtggaaaatgaggagagcgaagcaggttaattagatttgtactccctcaactcgattagatttcaccgaacctatgaaagttggggatagactcgtggccaaactggacattgatgagattgaatctaaagctgccttatggcattcatccatagtttgtatagtcctaggagccaatcctccatttcgtgtttttgaagggttcgtgaagaggatctggggacacttaggcattgataaaattattcgtatgcactctggctttacgttgtttagttttagagatgaggttacaagggatattgttctagaaatagaggttgttcacttcgataagaagccgatggttcttcggccatggtcagttgatatggatactgtgaatatggtccgatcagtaccagtgtggattcgattgaatagtttcgggcttcaatattggagtcgaaataatctgagtgccatggtaagtatcataggtaagccgattatgattgataaggtgacgaaagacaggtctatgattttgtttgctcgagtgcttgtagacatgaaaatctcagataatccacccaaaatgatcacatacatcactgaaagaaaccaactaatggatcaaagtgttgaatatgagtggcttcccacaaagtgcactgcctgtgatcttttaggacacacagtggctaactgctccaaagataaaggtctggtttgggtcggaaaacaaaagggtaatcataatggtgaccaggaaaatggtagaactgaagctagtgcagcagctcaggggaaaaaccagaaaattgttcgacctaataagaaagataaattagtaacagttcagaaaaatgttataggggaagcaaaggcaatagaagcaagtcaagaaatagatacaggggcaggaaacgattctgatgcaaatagtaagaatgaagcaacaactagggagggttgagattggattactccaagaaagaagggatctaagggagatttgacaaatgagaatttgattgccacaataagcaatggttatgctgtgctccaaggggcttaggttaggaaattggatactaatttctccaccttgactcatggaactaagtaatattttgggttggaacgtttgatgcatgaataaaaatagcaaacaaaaagctattttagatttgtgtaggcagaataaaattggtttaggtgctctctttgagactaaacttagatatgatagaattgagaaaatcataaagaataatttccctaactgggaatattactctagccccactattgctagcacaattttgctattttggcagaaatgttttgttaaagttcaagtgcttagtgaagatattcaatatgtgcagaacagagtgaatatatctggccacaacacattctagctattttacaattgtgtatggcttgaattctttaatggagaggaagaccctttgggacaagctgctgtgtttagggcctttgcatgaactgtggcttatgataggggattttaatgctatgtttgttttcaacgacaaatgggattggtgacctgttactaataatgaaattttagatgctcaagcttggttagctcaagaccatatggatgaaatgagatattttggttttaattacacctggtccaacaaacatggagttggggacaaaattttctctaaacttgacaggattttttcgaatgaagaatggtttgatagattccctaacacggaagccttttgtaaatgggatgacatctctgatcacagctattgtattattaaaaatcataaaatcggtaaggttggaattaaacctttccatttcttcaattgttggatgcaacacaaaagcttcaaagaggtgggtttggaatgttggggccggagcatcagcaagaataatttgacagg

SEQ ID NO: 24895 - DNA, 4835 bp, Cannabis sativa
gaatattccctttccttaacaccaaacacctcctttaactgactagattctgccagtagctcttttattgtgttctgaccctgttgaacctcatttgaaagttctgagatttgtgcttggagtcctacattgtcctctgccagtttgctagcttcgtttcttgctctcaatctgcacttccagctctcttttttgaccttcaacggacttcagctcacgctccagctctgccacttgagcctcaaattcttgtattcgagttgatgtttcattccgatgtgtctcatgtgtctcggacagagttaagtattccctttccttaacactaaatacctcttttaactgatcagattctgtcagtatttcttttattgtgtcctgagcctgctgaacctcgtttgaaagttccgagatttgagcttggagccctacattttcctctgccagtttgctagcttccttttctttactcccaatctgaacttccagctctgttttttcccctttaatggactgcagctccagttccaaggctgccactcgatcatcaaactcctttattcgagttgacgtctcatttcgatgtgtctcgtgtgtctcagacagagatgaatattccctttctttcacaccaaaattctcctttaactgactagattctgccagtagctctttaatagtatcctgggcctgctgactctcttttgaaagttctgtgatttgagcttgtagtgttacattgtcctctctcagttgtttcgattcagcttctttactttcaatctgatcttccagatcttttctctgaccctgcaacgaatccagttcaagtttgacggatgtcacttgtgtctcaaattcttcaatttgaactgatgttttgctcccgtacgtctcatgtaactcagagagagtcgagtattccctttccctctcacttaatgtctcctttagcagaatcgcttcagccaaaagttctttcactttgttctgtgacacttgaatctcatccgaaaactctgatattttcaaagttagagatctgttctcttcctctctatctttcagagtgttgtttaaatcagagacttgctgttccgtcgattgcagttgctgtttaacattgagaaattcctctttaatagcttccagttctaacacaagtgctgatttctcgctgtttagctgatcagccgaagatcttaattctgctgcgacctgttccccctcttgaatcattctgattgaagattctttctccttgatcaagctgtttttctcattctctgactcttctagctttttactgagatcagcttctaactgacgggaagcttcgagctgttgctttaattctctgttatcagtaagaagctgtgttctttcaccctttagctcctcagcttcactctttaactccacaactattttctcagcttcttgtatgttgctcaaagctttcaagtactctgaatttaaagcttccttttcttcggttgtagctgccaatttcttctttaattcagcaacttgtaattgtgatgcttcaagttcttgcttaacaccatcaattatttcatgtagttcactttccaatcgtccgtttttgctgcctttttcttttgatgaagtatgatcagagtcagaatctgagctagatgaagaagaagagttgtccttttcttttttgccatgaatttttttcctcagctctccagtcaaattatcataacgtgcatatagtgattggtactgcttatggaaatccttgacaagtagttgaagtggttcttttttggtttttgcttcagtattactgccattatccgcagcatgttcttcatctttgataagctctaagatttgactcatcttatcatccatttctgtagtacaaagcaaaatttattaagttttccatttagccatttataaatatgcataaaaactttagaaggagtctaaagatctgataaaaatttacccaatttagttccttccatgtcatctttttcttcttgaatatgatttccaaataaggatttgatagaatccttcacacgtcgttttcttcccatccttgcaattttccgatcaccctaacaactccttagcgacaaaagacaatcaccatacccagagtctgaaacacaacatacattttttattatcatttgtaattgaactaccagaaaaagaatatttaaaatactaacatatgaacaaatggaccaatactattcttattcttataagtataactatggtgaaatatgagtcatataccaaatctaggcctatccgccatacttcagagcattatgttaagttataacgcctataaatatcagttgacaattttagtactgaattagctaatttacggctttctttatagtcatttattatttgatgtatttacacaaacaaggtatactagcagttattcatgtaatgaatcgttaaagtacaataaatttgacgttttggtggattaaaagagggaagcacagaagttaagcaacgtataatggctcctctttaagaatatacacacataataatggtccccagcatattcgttttattaattgaaccaggtacttcaaactcaaaattcttccacagtccacacacgattcaaaaccagtggtggttactgcttactggttaatttcatgaacacccaatcacattaacaaccaagtaaaaattaagtagcccactcaattaattctaccatgtcccaggctatttattcttatgtacctaactgggctaaatagaaaaaagtactgggcaaacgaagcagagcctaacgccaccttaaacaaggaaatatataatatattaaatattaaactaatatttttgcttaacttatattaaattaatattgtttggaaagaaaaaaaactgaaaaaagagaaaaagaaagaagactggtaacgtaggattcttaaaacaaaaaagctttacaactctgccacgtcagattttatttatttatttatttttaaattcaggggaatcactcaaaggctcagaagaacatgatttttcattcagaaaagacagatatcatatcagaggaaaatgagctgttctttttgttttctttcttcctcttgttgtaattttttataatttttctaggaaaacctcttctttttgttctttaatctttattaattattactcatataccgtattatgtcacctacactattaatattattatcacaaattttaatattaaaaggaaaaataagaacaaagaagaaaaaaaaaaggtaccaaagtaaatttattgctgtaattttcacaggaaatgattaaatgaccgataagccctttttattacacacgaagagtcaaaatcgggaagaagagactatttacctgaaattttctttcactttctctttcaattttcctccggaagtttcttaagaatcgccaaagctcaatttcctgaacaaaaatgaataaattaattgagacagttaagctaaaactcaaacgaatctaacgcagttaatactatatgatcatttgagaaatttatattcgttgatttgagttatcagaaaacagtgatcgagttcgagttcatgtttgagaagaagaataaacacaaaataatcagatttaaatccagaaccatgaaaaacagtcaacaaagaagtaagacaaaaagcactaaagcaaaaaaaaaaaaaaaaatcaaaatattcaggcaaaagagccacgatctaataaaatccaaacaatcagagaacctccgtgattaaaccaatgaaaaaaggaaacaaagaaatactttccagagctcactttctcagccgagaaaatcacaactaagagaaagaaaatttcattgaaacaaaaaattagaattcaaatactaaagctatcaatcgattgaaaagtgaaaaaacttacctgtgattctgatacaaaggaagtagaagacgatcatcaagaacagagaaagagagcactgaaattttgaaatacttgaattgaagctctccaatcaaaaaatagagagagagagctagagagagaaaataaattaataaatgaaaaaaagaaaaagaaaagtggttttgtatggattaagagagagagatgttgaagtgagtcgttcaccattttctagcttcaattttttttttttttttttaatattgttagttaaattcttttagtatttataattattacacatatcattttaataaaaaaaaatataaaaaaaaaagtttattttaggattttattatactctaacaaaattttaagataaagtattttactgtttttttttattagtcatatctcatatgtataattattataaatactaagaaatttcgccacaaatatctcattttttttctttttaaaattttattactccaatattaaaattaattaagtttaaaacaatttttaaaaattagcattaatattttttaatttcaatacttattttaattttattatttataaaatattttaaatcttgtatttattttttgtttaataagattattttataaggatataaattgaaagaataaaattttaagaaataatatacttaaatatatatattttatgaaaataaaaattattaaaatgaggtgtatttataaatttttagagtgtaattaaatttttcctttttctaagggtggaatgttttggagctatttttagtaaatttagccttggttttgtttgttatttactgaaattgccatttcgaagcttttatataagatatgacctggcataacgataattttggttttgtttgttttttt

SEQ ID NO: 24896 - DNA, 5024 bp, Cannabis sativa
gttttaaaaaacttgtgccaaacaacattaaatttttaaaatgacaaaaaactgttttctattctcacttttaaaaactgaaaacacaaccaaacaagctctaagcctcccaatttacttacaagctgaaagaatctgaaactagattcaagacagagagaaaaaaaaaaggaaaagaaggaaagagatgaaaatagatttttgctcaatcaaaatacggaataagcttccatttatatatcaaagactgttacaagaggttgttacaatagtaaaaaaactaacatcaaaatagtaataactaacttttgtaactgcctaaatttgttacgctattatcccccctcaagttgtactggtcaagaccatgtgctaacttgtctttaagaaaatggaaggaggatacaggtagaggtttggtaaataaatctgatatttgctttgcagagtccacatatctaacatcaagtttttttgcaaggactttgtcatgaataaaatgtagatttatttcaatatgtttggttcttgtgtggaatactggattgaaggccaaagaaccagctctcaaattgtcacaccaaagtattggacactgaggaactggtatgccgagttcagtaagcagggactgaatccaaaccagttcaaagttggccagagcaagagccccatattcagactcagtgctcgatcgagcaactgtagtttgtttcttggagcaccaactaaccaggtttcctcttagaaaaatgcagtatcttgatttggactttctgtcatcatggcaccttgtccagtcagtattagtgaacccctgcaactccatcctgacagctggtttgaacactaaaccagtatccaatgtccctggtaagtacctcagtattctcttacaagcactccaatgctctgaggtaagggcctgaagaaactgattgaatttattgacaggaaaggctatgtcaggtctagtcattgtgagatattgaagagcaccaattacacttctatacatggtgggattttgcattggagttcctgtttaagatgacaactttgttgtggagcacataggaattgattggggttttgagtcactgagttgagttttatgtaataagtctcaaatgtaattcttgagatagatgttatgaccatccctagtaatttcaaaacctaggaaatagttgacaaatcttagaaccttgagagcaaactaactgtgaaggacaaatatgacatgttacacttgggatggttcttcccttgttatgaggatgtatatcatccacataaattagaagaatgagaagcttgcatgttgtttggtgaagaacaaactggtatcagacttgctattgtgaaaaccctactacagtagctggcttttgagcttgttaaatcaggttcttggtgatttctttagcccatagatgaccttgttttacttacacacatgatgttgatattcagggttgatgaaccctaatggtagatgcatgtagacagcttcttgaagctccccattcaagaaagcattattgacgtctacttgttgaatgtcccaaccatgagtgtcaacaagagtgaaaattattctaattgtgcaaggtttgatgactggactgtaagtctcaaaaaaatcaataccatgaacttgttcaaaccctttggttaccagcctagacttaaattgatcaatagagtcatctttgttgtatttcactctaaaaatccacttattgtgaactattgtcatgtcggatatgtaggaagagccaaaacccatgttttctttttggtaagggcaacaatttcatgattcattgttgcattccacttagggtcagcaagagcagctttaatagacttaggttctagttcagtgttagtgctcacaatgtaggatttaggtttgaagatgccatgtttagatctagtaaccgtgaggtgattgtttagagtttggggttgaggccctgttgaagtgtagttatggacagaagtatttgtggctaaatttaatgacatgggagaggcagtgtcagcctcaggaacaataggggtggggaatgagactaccttgcagcctcagagctgctagaactattttagggagtaagagtagtggtggttttggagatatgaggaaataaactagaaggaattcgaaagtcaccagggtttatgactttaggagcacattcactttgcttttgagggaattgttgaggataggtaaatttagtttcattgaaggtaatacttcgagctacatagactctaccactaggatgtaggcatctatatcccttggcaggtatactttagccaatgaatagacattttgaagactagaatgaaactttgtgagattcataaggcctaagtaaagggaaataagagcaaccaaagacctttaacatattgtaatttgggggctgttgaaacagtgtttcatatggtgaaacaaagttcagtagtgaaagtggaagtctattggttaggtaagcggtagatgtgaaggaatcccaccaaaaatttagtggcatattggctttggctaacatggtaagccctatgtcaacaacatgcttgtgctttctctcaactttcccttgttgttgatgtgtgtggggacaagaatttctcctaacaagccctaaatatttgaacagattatataaaggttcatattcttttccagtgttagattgaatacttttaatcttagtttggaaatacctctcaacaaaggcattgaactgttgaaagatagaattaacttcagatttggctatggaaaatagccacacaaacctagtaaaatcatcaatgaaacttatgtaatacttgtatccttcactagaagtatgaaaagatggtccccatacatcaataagaacaagttcaaaaggaatagaagttttattgctagaatttttaaaactgaaatgattcattttgccaatttgacaggcatcacaaaactcagactgactactcctagcaaaaggtaaaactgtggaaagaactttgcttaagatagcttttgagggatgtccaagcctgcaattccatgtagaagcgagttgacacttgtctttgacaggattgctagtggtggtgaagttgtaggcagaggaactaggatgagcagacagcacaggactgtttggtgaaacttgagacttggtgtgagaaacatgttgcttgtaaataccttcactgagatggccctgaagaagaacttgcttggtgttcttgtccttaataagacagcaaacatcatcaaatttaagggtaacgtgattgtcttttgtaaattgagatacgctaaggggattcttggtgacattaggcacatgtagaatgtcatgtaagattaaaggttggtttggaaaatttgtaagcattgaactatgacctatatgatgaattgggagagaagagccattaactacaataactttgacttttcctttgtaatctgagatagagttgagattctaagtgtcattggtcatgtgatgtgttgctctactgtctaagaactaggttgttgacaaatctgaagaagaatttgattcagtaaggaaggcctgaggttgttcagttttagaggtggtggatgaagtgggtggtggaggtccagtgaaagaaatattgaatctgtgataacacttaacagtagcatgtcgaactcaaccacagagttgacatgtgggtttagaacctcctcctcctcctcttccattgttggaatattgtctaccgcctctataggctcctcaatttccatgattattgtacaaacccctacctccattgctgtaatttgagttagccaaatttgcttgaacattggcgagggaatctattgtgagttgttaaattcgtatttcttaattttgaagcatgaattgaacttcttgcaaagtgagaggttttgtgcgtaaagtgagattgaccacaacagattcatatttagatcctaagcctccacgaaaatacagaaccatatcatcattagtcatgggttgatctgcggctgcaagagcatcagcatactgcttcatcttcaaaatgtaatcttcaatggacaatgagcctttgttggtggattgaagaagatttcacagctgaagcagtcttgctctggacgagtggcaaagagttgagcaaaagttctctagatctcaacagatgtttgacaattgatgacatgacctagcatatttttagatacaaaattcattagccactgcattagaaactgatcaaagtgtaactattattgacgcgtagggttaaggacattacctgcaataacaaatagaggaagagggtgttgcctgaggatatatcgatcaagatcatatgcacggacagtaacaagaaccaaagatctccagagtatgtagttatttcaatcgagacaaaggttgagaggaaggacattattgtttgggagagctacttcaacttctctaatttgttgattattttgtggagctcattcttcaagtggaggatcaactcgagctctttgagcaccattgtctacattgttagacatggctctgataccatgaaagaatctgaaactggtatcaagagcaaggcatagagagagagggagagaaaaatggagaagaaggaaagatatgaaaatggatttttgctcaatcaaaatactaattggccaagcttgcatagtcttgcgttaaccaataacttattctttgtatagtctcgcattaaccaataacaaagaattataaaagtcctaaaagttttggtaacaccctcttgaaaatccctccaagtctcttcttgatctctaatggggtagattatattttgtggccttctaaacctctgacttgcatgaaacattttggtgttttcatcactattttttaaccaaacaagcttatttttctagctaaggtattggatgtaatttttgtgagcaacaatgtaatctttctatgcagtatcttcctctgtagtcaagt

SEQ ID NO: 24897 - DNA, 2700 bp, Cannabis sativa
gagaggtcatgggttcgaacccaggacctttaagctattaagttaatatatgattataaaaactattaaaaaaaaaaaaaaaaaagttcaatctttagttctccaaactcatttaatccaattgggtaattaattacaattttttttattacatatagttatatataatatatatatataaatcaattatttattataaactgtctggtccgatttaaccgttagctatttattacgaaccagaatcgaatcattaaacaatgaacgaacagtctaaattaatcagaccacccaaaacggtcttgccagttacagtctacaactgttcggattgtcagattgttgacttctatgaacaaccctataatctacaagcaacattaaggtatttagggttgtttatataatttgtaacctatggtattaattcggactatattatttgagatcggactaaataaagtttatgtgtaacggtttggtcaatttagattgtttataattttttggtttggtcacagttttaaaattctcgataacgattcaaaccaaactagccgcataactcttttagatatacttaatatattttatttagtgtaatattaatatttgaaaacaatttttgtacactgtaattatctacttattagggtgctagatacaataatattttgattaaatttaatttaatttggaaactttttttttattgatgtattataaattttgaaaactaaaatttttagtaaaaaaaggaatttttttttttaaaaaaaaataaaataattatgaagttgagagttatgatcatttattttttctctgtcttttctctattgaattgttgcgaatggtttacgggtgtgtgggctttataacttggctcattgcttatttagattgacaagtttggaatagaaagttggggttttactcgtgttgattgctctaatagattttctgtggcatatttcatttgagttagtagaaatttttgtatctttgaaaattattcttatactgttaaacatattagggagttgattaaacatgacatataaactagttttaattgtttaggaagaacgaaaatgtattattactaatattgtaaatagttggtacttggtagcgtttcattttctcctatcataaaaataataatattaataattatgaaatacaatatacattcctttgttcttaaatggattgttatcagattgagttttaaaaaaaattaaaaatccaaagaaaaagtgaaataaaattaatatgtaaaaggaagttaggaaaggattcagttatttgggtaaaaattgtattttttaccaactaatgaaaaaacaataaaaagtagtggtaaaatggtaaataatagaaaaaagaatgtcattatcaaatggttggcacaaaacccactcacatgaatacatacatcctttgcttattcactcactcacttagacacttgccctgccccctcctctgccccaatttttatctgctctgtatctcataatataatacagagcaaatatatatatttatatataatataatatataatataacctccaaaaggaagaagaagaagaagaaggaaaaagctgagaaagatgaagcatcatagaatctgaaacaaaaaaagaaaagctttcatttttattctttgtttgtttttatttttcttcaatgggttttgaatgagaaacccattgaaaatctcagagtcaatttttttgtttgttgttatttgttaatggcagcttcgactttggggtctgacccaagtccagaggtgttttcatggctaaaaaccctacctttagcaccagagtaccatcctactttggcagagtttcaagatccgatttcatatatatttaagatcgagaaagaggcttccaagtatggaatctgcaaaatcattcctccagtgtctccatcgcctaagaagactgtaattgcgaatctaaacaagtcgcttgctgctcgtgctgggtattctgaaggttcgaatcccaaaacacctcccacattcactactcggcagcagcagatcgggttctgccctcggaagcctcgtccagttcagaggccggtttggcagagtggtgagcagtacacgtttcaggaattcgagactaaggcgaagggttttgagaaagggtttttaaagaaatgtgggaagaaaggaggagggctttcgccactggaaatcgaaaccctttactggaaagcgactgtggataaacccttttcagtcgagtacgcgaacgacatgcctggctctgctttcgttcctgttaatgctaagaagagtagggaagcaggggagagtgtgactcttggtgagactgcttggaacatgagggcggtgtctaggtcaaaggggtctttgttgcggttcatgaaggaggagattcctggggttacttcccccatggtgtatgtagctatgctattcagttggtttgcttggcatgttgaggaccatgacttgcatagtctcaattatttgcacatgggggcttcaaagacgtggtatggcgtaccaaaggaagctgctgttgcgtttgaggaggtgatcagagttcatggctatggagcagagatcaatccccttggtatgttttggtgttttgtattgaattgtggaaactacagtaacccttcccctgtttttcttttctt

SEQ ID NO: 24898 - DNA, 17037 bp, Cannabis sativa
ttttgcacatattttgtaattaactaaaataatgtatacaaaattgtaaaatacccttaaatatttgtaataaaattctttataatttaaaattattccacacataaccttaattaataaagaaaaaagtaagaatgacttctaattagagataattttacactcaattttattttcaatacctttaaatgctaaatcattatgttagtctaaaattggttcaaattatttagttttttgtcaaaaaaaatgaaaaactaaataaaaaatagttaaaaatgtaataacaattataaaattaaagattagctaactattttcgctcttcattgaaatcattttcatcaatctagtgattttaaaaaaataattactaaagtagactatcaattaatattgagatggtggcttctttttcacaaataagcataatagtacgaaaataacaagcaaatcactaaaaaccaaaaagaaatctaattgtagctggtggattggagaaatggatttgtgacagagatgtaggagattgcatggaagtaaataattcacatgatgttaggttgggacacgctgaaaccttaatttttgaaattgagattttttttatacataaaagcagttgttgcaaaaaaaaataattagatgtttttaaaaaaaaataattaattattcaaaaatttattttagaagggttagaagtctaatttttgttaaaaatattatagttaaatggtttaaatatttaaaaattataataagaacttaaattaaaaataatataatttataaatattaattgctaaaaaaatcttgttaaattagaaattaattatattaagaaaacagtatattataattaatttaattctaaaaaaatttaacctattagtaatttgatattataagtaaaaaaaatataaccaatatgaatacaataaaaatataactattgagtagtaatatgtatatattacctgtcacaagaaggaaggttctcaaatggtattctcattctgagatcagaacattgtaatcttataaaacgaccaactgctagtacaaaggttatgtaaagaccccatatactgaatttgctcagtgtttcaccaagaatgccctctgagatcatatatcaagtttgttaataccaaaaacacaaaatactaaaattcatattagtagattaattagggtaaaaatattttctctcatattttattctatactcaaaacagtgtatatataactttacataagtcgtccatatataaagaaaaaaaataaagatacaatgaaattatgcttataactactttcctataatagtgatatggcagttatacaagaatatctcccctagaaaatataagattttactccactttcccctcaagctggtctaaaaatgttatccatagcgagcttgtcatttaggaaatcaaactacttcttggatagtccttttatgaagatatttgctacttgctctatagtaagaatgtaagacatgctcattagtcaaatttctattttttcattgataaaatgtttattaacttcacatgtttagtacaatcatgtaggattggattgtgaaaaattgcaagtgacgctttgttatcacagtataattttataggatacggttgttaagactttagttcttccattaatcttcttatctataagatctcacacatatcgtgagcaacaactctgaattcagtttcagcactacttcaagccacaactttgaattcagcttcagcactacttctagccaccacattttgcttcttgctgcaccatgtaactaagttaccaccaacaaacgtgcagtaaccaaaggtaaatcttcgatctactaggttcccatctcaatcaacatcaatataggcttcaatcttcaaatgtccttgagctttaaataagagacctttaccaagtgttccttttaggtagcttaggattctagacagcatcaaagtgatctggacatggtgaatgcataaaatggctcacctatgtccctgaaaacgcaatatcacggtgtgtatgtgagagataaataagtctccaaactaatctttgataatgctcccgatatttagcatggaccactttcgtaggttttagcttgacattggattcagtaagagtttcagcaggtttaaacccaacataaatgtttcactcaacaagtgaagcacatacttttgttgactcacaaaaatacttgctttagatctacaatttccatcccaataaaatatttaagaactcctaggtctttaatttagaattcttcaccaagcttaactttcaacctttctaattcacaaacatcatcaccagttagcacaatgtcatctacatacatgattataatagctacctttccatcattcgaatacttgtaaaacatagtgtgattaacttgacgttgtatggtatccttgaagtttcaataccttgccaaatcttttgaaccatgctctaggggattgcttaaggccatacaaggatttctttagtttgcaaatgtttccaaatccaaagtgttattcaaatcctggtggactcatatacacttcttattcaaggtctccattaaggaatgcattcttcacatctagttggcataaaggccaattagaattgactactaaagacaacaatacacgaataaagttgacttttgctacaggagcaaatgtttcttgatagtctactccataggtttgagtaaatccttttgctacaaacttagctttgtatcttttaatatttccattagcgtttctttttattgtaaacatccatttgcaactaacaatttttatccattttggtaacttaacaatctcccaagttctatttctcctcaaagcatgcatttcctcaaaaattgcttggttccaacttggttcacccagtgcttcccgtatgtttctaggcacaacaagttatgaaatattagtagtaaatgttttatatgtttcagatagacgattgtatgagatgtgtttggcaataagatatctagtacaagcacgggttccttttctaagagcaataggaagatcatcttaaccagatgctactgggattgattcagcaataggtttagtgtgaacaactcaaggatttaaattaaattgagaagaaagcaaagtagtgctaatatgaaaaatagaacttgggagagggcatgtgattggtcttgtgcaaggatgatttagtgatctttatttttctcaaagataattttccttaaataaaccacatgctcaaggttattgcaatttttaattaatcgtagtatttattttcctgacaaaccaagcttagattcagaatcagcaagttagggcagagtcttttctatcgaaacatcaagaatagtgtttggtaaaggctcactaatttcccaaaaattaatttctactatattctctcctaaattaaatatttgtataaatatggggtattctccaagaaagaaacatccatagtagtataaacaagtttagtaataggatttaaacatttataacattttctattaagaggataaccctaaaaaatacatttctcagaacgaatctaacttggacctagatcattttgggaggtgaaaataaacagagcaactaaatattttaaaaggtaaatcagcattaagtcttgattcaggtaaaaacctttttaaacatgccaatagagtaagatattgtaacactttagtaggtatcctattaatcaaataagatacagtaagaacaaaatcccccataaatattttggaatatttatataaaacatcatagcatgagcaacttcaagcaactgttaattgtttcattcagctatccaattttgttcggaagtatctagacaagttgattgatgcacaatttctttttccattaaaaaagttgccaaagtatgattaaaatactttgtgccagttctaaaatacttatttttggttgaaatttatttctattattctgcacaaatctgtaaaaatttgtgcaatatcaaattttttcttcattaaataaaccctgcaaagacgagtttggtcgtatataaaagtaacaaaccacttctatccaaaattagtggtaactcgtgaatgctcccaaacatcactatgaaaaagataaaaagattttgagggctgataagaagttttaaaataagattttctttggctcttggccaataaacaactttcacattggaaagattaattcaatcatttaaataatgctggaaataaatgttttagataagaaaaacttggatgacctaatctgtaatgccaaaacaataaagaccaataatcatcttactaagcccttgagcaattttaagaccaataatcaattttatttgatcatgaacagaatgagaacggatactactaagcccttgagcaattttattaccaaaaaattcccctttaaaataataaaaaccaatattcatcctagcactgtcaatcgtcttctacgaaggtcctgaaaaggataatgggattcatagaaaatcacacaacaatttgagtctctaaataatttggtgacacataagagaacaaatttaacatttatctcctcgaaaagtttaattaaactttgcctgtaatagatgaaaaattaccatgagttattataaccgtttttgtctcatgaacaaggtatataagagtcaaaaaggttatacgaattggtcatgtgatctaaagctctggaatctattatccacagaatagatgatatctgaaaataatttgaagtatttatctcatgtgcaatggagacattaggaatatcttatgagttcaagttagttttcaacaatgcatgatcgatctgctgctagccttatcttatctcaccacgtttgagattcaactcaaatatctgggattggctctctaaattagagtatatctaagttacttttcccaaagttcctttgctgtaaaacaacacatatagttagaactgatttcctccttggaattcaaaagccatgccatcacgattgaattctcagcatccgaagtcttgtatatcagatccccctgtgttggcttcttcttctcacttgtcaagtacctcatttttccatgaccacgcatgtaaatctgtaccaattgtgaccatttgaagaagttatcaccattcaaccgaatggcggtgatttggatagggtgagaatcaaaaggaaggattttggttggaacaatggctggaaaagtggtaggtgtgactggaacagtgtagattggctggaatgtttattgattaatttgaggcatcacacatggtgaagaaggagaagaaaacgattagggtgagggttagggttagaaggtagctggctctaatactaaggaaacatatcactattctaggaaagtagatgtaggcataatctcattgtatctctatttattttgtttctttatatagggacttaaagctatatatatatatactattttgtgtatagattaaaatatcagagaaaataaaacaataatcaagaactgaaatgataattgtttctataaaaaagcttacgtggtgtttcttcagacacaacaatggccaaaggtcctgccaaatctccacatccaccaatgttcgatacatctatgtcatggaaagaccaccattctggattgcccctattcagaaaaagttctccactgaccaaatcaacctgaatattattcagatatagtatataattatgctaagttcttggaggtagatctatagtcaaactgaattagattatgtaataatatcagaacatacataccgtattttcaagaaatctcacttcacctgagccagtgaccctgaagtatcttggatataagttacgtattgtgaagctattggcagtaccatttaagacttcccttacttctgatgatttaggaagatcctgatcttgaacagttagttcatatttcactatttcttttccttttggcctgtccctagtaaatttccaagagaagacaatgtccatgcttctctgaagagaattcatgtatctggcctgaacaacgggagggacaagccataaggaacttgcatcagcttggcagcatatcaattgaatgtcttgctcattgtatgtactcaaataattatgtgtatctaacttagtatttgtgtcgagtttgctccaagatatcttttcacacaaagtagtttcgaataatgtcagccttccactgattgtttttatttcaatttgcacactggcatctttaatggggtttgctatgtttgtggggtttccactgctgtacatctgttaagaattatattcaaacaaatgaatttacgggtacaattaattggatgtattaaaaacatacaaatgacaaaacgaaaaagttgatgaaaaaaataattaatatgaattggaatggccttcttcttattggaaggaatagtcatgccatcaaaatgataaaaagtcattctattagaattgctcataatttgcaaccaaacaaaagagcagaatgaaaaaaaaaaaaaaaaattccacgaccccaaccaaacataggttattgagatgatttgatcttggtgtatttaattttgagctgaaggaccatgtatatttgacaaagaaagaaaacaacctcaaaaggaatatgaaagcaggtatcaacaaattttatggaaatatgatgtcttctaggattcttaccagcataggagcccatataacacatattaataccaaaaataagcaaattccattgcagaattttgtcattttggattgcctttgcccttgttgatggctggctctattgagttccacatcacactttacaagaaacaaacttccatgtatgtcctccaacttagagaaaaacacaaacgagatccgtaagtaataataacaccagttatgaaaatttcctaagaagaaaatgtagtagacttactttcaaccaatcatacatggtcaaagatgtagttgtgcaagaccaatcaagtacacatcgaagttcatagaggaatggaagagcgcgataacctcgaaaaccaataaaattaatctgtgaaatactactcgtcaaaaactgtctgtacaaagcgctcttgtttggcatcccaaaccgaatttgtatggcttgaagagccaaagaaatggcctttgttagatatacagcacgcaatgctaatcttccagcatattgatgcgatggctccatgttccaagcataccttgtgatagaataagtgaagagaacaatgttggaaagatagaagatcactttcccagtggcaaatgatcgaagataaattattcgatcaagcacaattaagaaaaagattgcctgcaaggtaaacatgtgcatttgatataattgtgccaaaagtactatacgatgaacttttaaccaaaagaacttaccatcaaaataaatacaaactcttttgggaactggtcttctagctgataaacttcgagaaactcagtgttgttctttatgacagaattgtagaaaatggcaactaagaagaaaacagccaaatcggcacagaatgtgtaagcatataaatccacttcccttttcccaccaccaatcacagagagtattgggtatgggaatcgtatccaatcaagaattccatcatgttgagcttttaagatctcattagcaacatcagcagctggagttagtgatgtgtaccactctgctggtgttggactggattctaatgaaggagaggcatgcacaacctccaaaacaatcaaagctacatcaacattttcctggctactttcaatgctttgaactcgaacacgacttggtgagtggaagcggttcatatgtttttctttgcatctttgatcatgtaaaatcttaagcaacctattaattcctgattcaattttctctggctggatactatcagcaggccacaatgtaacttccaaagacagctgcacaaagtaaggtggagtttctgcttcttctgtaagtgatttccagtacctatgcaactttctgataaactgtctactgacatctcttacggttaggaataatctttgtattctctgagggcaattgtatctctttacatgatcttgttggagatggttttttctcttactgaagctgaattctgtaaccatgtttccccaatcgttatcttttgttgttatggtggtttgtaaaagagtgaataaatacactaaaaaaaggggccagttgcttgtaacgaaagacgacacaattttgtcagccggaaatccaaattcttggagtaagcttacattaatggtaaacccacaatgctggataatgatttgatatagatactgaagtagtatgcagaactcagtataaataagcataacaacccaaaatatatgacttggaccggtgtttatacaaagagcatacaagaagagagccatgagatataccatggataacatactgaaattccataagaacacaatgataaagctgcagtaacaaacaacatcattatttgatctcatctgactccacatgtaacgtaaaatgataccgatttgggagtatgtagcatcagacatgatcttgtcactacttgatcgcactacatgagcagtttgttctgcttgttcattacatatgttctcagtttctgtttcataatacacctcatcctcagaagaatgctcatctgaatcttgtcccttgtgttctatgtttaagaaattaataagattatggactgccgaattcccaagggacttaactagagaaactccatcaccaataagatgaactgctgaaattatgggatttccccttgttttcaacttttccctacctcttccttctgaatccacaaggctatacaaatcagtggccttaaacttaagttgaggcatctcatgaagattatctatcatatcctttgaggattctgctaacaaactgtcagctccttcacttgttggagattcaattgtatcaaaatttgacaaagcatcagagctcaaactaaggtcttctctctttaactcattttctccacttccccatattccattcacactatgtgaacgcatggaggattttattctttgaaaactttcacttcctggagaattgttaccacaattcccagaaatagtcatgctatcaagctggattttaaggttgagcatctctgacttcatcttttcaacttgcagatttctcaggcacttttgctcttgagatttacatatgtgctgcaaatgttctttcttccaagcagctctcttctcctgctcatgcactatggcgccaatttgctctgcctcaaggtatttcgatacataatcaaactctttggatgaaaacatgtatgattgaagtgacactaacatgaatatgacaatttcaacaagagcagatcttgaagtgattcgaaaaccgtagtcatatttatagaatccaatcacctgactaatgtaatctgtggtatcacatttcccttcagtggcgctccctatgaagggagattgataagctaaagagataacaattagaccaaagttatacattcttaagaacctgaagattttgttcttcttcttcaatatctcaagcctcattcggaaaaaaacaagtgcaaaaccaagatatccaaggtgaaggacatcgtactcgagggtcccagtgatcaaaatcaaaacaagaacaagatcaagtaagtgacaataaccgtagagcctaaggaagtcaagatatgtccataaaccttttgtttcaaatgagagatcacttaaaacagaggctttatagcaattaaatatcatttctctgtatatttgggatccatagggaatagacaaatggtcagaacgaagcttgaagcatgagaacatgaacacaacataatagcttataagaattctgggatcatcagctatggttcctgcacaacgtaacatagttgcaataattatcttcacatcacattcataagctacgaaagagttaatgataatataattttaaggaaaaattaatgatgaacatgttaacttaaaaacttcatattttatacattcatattttacagcaaatccaaaacttcatattttatacattcataatatgggcatggtgggaacttaaaaacatactatattagtgtgtgtggaaaaatgcactaaaaggtaagtagttgttaagcacgcacatactaaagtgatcactaatggttaaaaagaatattagggttttctagttgtgttcatgaagtatgtgcttgcctatagagcataaagaaaattttcaattaacctgaatattaagacatttcttgagagggatacctagccagcacttttgacagaagctgtaataaacctcgaaagatctccaacagtcatggcagggcacttgtgcagcaggctgcttcccaacagataaattctgccaaagaaccaagtattcaatgatgacaatagaagcacacaggaacacaaaaacaggccacaatctctttataatacgtcgatgtaaaagaacacaagcagcaagtgaagcaatatacaacaaagagattgcatttaacactgcaaagctggcaagaagtagtactatcatgttcatctcaaggccaaagagattgaacatattctcaatccaaaacttcatatgtattctcaaactagtcttctgcatatcgagcctatcctttctcaaagaaagaatccttcttctattccacttacgactctctttggaactttcccagaaatagttgtataagtatgccttgttgatgccatcagaagacgctttttcaggaggcacaacgtttggcccttgaaaaagggcagagtttaaagatgaccaggtgtggcttgttagtttactttctgttttattttttgttgcttcagtaaaggcaaacaaagtgcaaggctcatcccatttgcctctgtttccattgtcatgtggaattgttttcatccaatgaaaaacattgtatcggagcacacatgcagcgattaccaaaactttgctccgcaagcctgattctatacccaagaatcctggcttgtacaactgcaatcccaaaaataatgacagataagagtgcttttgaccagggaacatttcagcctggttaccccacatctggaagagatattcaaccattgctaaaaatcctgaatacagtagtaatagtattgaaggagttctagaagtttttggtaacactgaacttatgaccagaccaagaagataaactaagccaaatgcgctcactggagaaactgatgcgtagaatgaggccagataaagaatcttctcactgtgccatatcagaagacgtttgataaacgagagtgctttcatttcaggcccatcaaagtcgttttctaaaaagttcttgttatgactcctctcatagctatatagttgcattacaaccaatatagctagtgattcccaaatattttctattgttgaagctttatttttataaccaaatgcagaatcaagatcgactatacttgacaaccatatctgaaagccagtgaagacactcatactatatatcaatacaaggactacaactgcataaactttcagaggaaaccaaagctgccatcttgtttttcccaaaatttgtcttccaatcaaccaaagtaagaggaagaatagatgaccaaatgaagtgtaattaggtattacaaggtatactgtaaaaagaatagtcgaaagggcaatgtaggttccccatgatcgatatgctgagagacacttttgtcccattgcactcaaataagatgttatctttctctctgaaaataacataccaaaatcattagataatttgcaggtttcgatctgctcagagtaacttatttatgtcgttttgagaataaacatagaatggaattataccattagaagaattgattcgatgatactccctagaagaacttagagacagaagaactgatttaatcaaaccagctctcaaaatgctaaacccaactggagggtagggagcacgttgcacaattgctgagaatgagaaaaccatgtcaaacccatgattgtgaatggaacagaagcatgcaagcaaagccattggaaggaattcgccactagtttggttaagaaggcctgaaataagcaagacataaaataatatgatcagttgaattattgatacaaaaaatattatgaatttggacagattaaattgtttacccaagtctgagagaatgtccataaaagatgagaatttctggctgaaggtcttggatactacatgaagttcaagaatgtacaatagagaaaaatgtgtctggcatagtagaattaaagaaatgcggagctttttaccaacggtatctcgtagtagatgaatcataaagaaaatcactgtggtataaagaaaaggttggcatcagtatatcagcaaaatttcatatcactaaacatagaagttgctctacgactacaagaaccaagaacaatattcaaaagaactgatgcttccaggatataccaaaaaattgatgcaagtaacacaagcattgtacttactgtatacaacatgtatcatgccagattttgttgacatcagaagtagtagagctaacactataacacgagaagttttacgcagtccccatgcaattgtagcaacaatgaaaactatagtttcttctttccctaaaagtttgaacagaatacaatgtacgtgttaaagtaaaatgagggaaagaataaaactgtattaaatataaaaatagacaaaggttgaactttcagttaaaaagtaagaaacaaactatctacatacgacaaaaatgaaaaattttaaacaaagaaaagttaacattgtttccttacatcaccttctacattagaactttcaattgtagatggtccttcttcatcagacaaataagagataacagaattgttaaccagatttcccatagcaacaaggacaccgagaccaaattgagccagtaaataaagccccggtgttgagtaatgccataagcctatggtttcccaaatcaccatgtcctgcatatattttcaaaacagatcaccataaaaaaataagtctggttccgaaaaacatgagaccaaagcatctgaggacaatgagtttaccttgtccaactccttgttaaaaaatgtaaatgccacattaaagacatatgtgctagcaccccaaaaaagaatgaaaacaagaagtgaaccattcagccggtgcaaatgaagcattggaggaaaagcatacagaacgtagccaacatatgcaagtaatccaaatgcacataaacttgcaaaatggaaactccaaaatgtgagagcaagcaaggttatctgaaattatataaattgcattaagcttccaaatgatgaatgtaaaaattatggtttgtatggataataatgtgagtttgttctaagataaaagtgagcataaaaataagaagaaaaagttcaaaagcaaataaaataatatggcatgcctaccggaaatccataagtgaaaaaattgatgctaaaagtacgaaagacagctctctgcaaaaatacattagtatgcctcactcctgatctgcatgacataaaaaaaaataagcaagaataaaaccaacatttgttaataattagctcataacgaataagaactataaaacaattgagggagtacatctaacaaaacaatgaagatgatgagataaatgcaccttgacttgcgaataaaaaacgaatgccttttaggaagaagctgctcggtcaagttgttttccccagtggatacaatgaaatccatttcttctaggtcacatctaatccaggatagctgtggaattaaaagaggaaagaaagtcacgctaagtattcttgtaactataagtaagaatgataggaaccactagacttgtacacaaaatataagaacaaaccagcaagaaagattaagaagatgatgaaacctccctgagttttatcaaagacatagcaaaaacattataataagaaaatggtcagtatcctctccaaagagaaaatgctcactcaatacaaagtccatgatgtccttatcagccctcacactatctatatatacatatacaaacgtcttccctaactaactccgtaattataatacagtcccactaaccgcctaatacaatatgtcaaattagcccttaatgcttatttgacaggttgcctcactgagttactaaaaggtttaagtaaatgataagacctgaaccttctggtacagttaatagcaaagaatactagagcaatggtagaaaaaagatgaactcagtgtattatatgctgctactgcagcaagaaagtacgaaaatgggcctaggcaattcgagaggcctaggatctctccatgatgcaaatagagattcaatcaatacactgcataccctctaattttccttagtatcctatatatactattgtattctctcccaaacactacccttaatacaaagacccaaataccctttttatcaaatctcatgtatcctattctactgacttggggtctatcagtaaaacattgatgatgaatacattatgtcaaacaaaatcgttacataccacactaccaaatccagaccaagcatacttgtgagtgagacaggtaactatttagacataacattggtagacaaataaagccaaacaaaacccttactataatatagaaaaggaaaagagacacaacagaacaaatttccgaccaggccgagtttgcagatattctaaatagaccaatgaaatcagcaaaccataaaagtttctctgaatattcaattggaagttggtaagcatacaacaagatgatgttgaagcctgcatacaacagaagatgcctccaccaccttaaaatccataaaataaataaacttcagtaaagtagtaactccttaatttggccaattagtaatgatcctccaaatataataactttaaatgtgtaccggaagaggccgagaaaattgctcgttagagaccagtcgacaagaccaataccactacatatgaaaaatggtaaagatatccaagaagggtgactgatacccacaattaattgtaatccaggcaacaacaagcagcataaaaccctgacatgggaacctttccatgaagcaaatcagaaaatggccacaagttaataatatatctaattatttgaaaaccaaatcaactaatgtttaagtgcaaattacccttgctccatataaatgaaaagttgtactcaaattagtttatattattcataatgctgctagaggaacacaaaatcctaaagataaacttatgaacaatgcaagtggtcagatttttaaaggaaaataatgttcaccaagtaatctaattactaacctataagtacagcagaagtgtcaaggcccctgaaacaagagtttctccatggatccaaaccagacatactcccatggatttcacatagagcaacacaagcaacgagtacttggataaccacaaagtagacgatagatggagatatccaagattgcacactgcagaaccatgccacttcagttcggagtttatgttcaaataaaagaaaaattaaaatcatgcctagcactgaaatttaaaaaataaccaaaagtaaagaaaccattacgtactgtaaaaatccaattaatctggcccagcaagtgtcaactacactccactgatcccccttaatagccaaaacaatatgaaatattgcttgtgaaagaataaccaacaaggaaaatatgatagcacaccatgttaccaaaggtttcctcaaatatcgagaacctggtatataaccttacatttagtcttaagaaacactggaaaaacaaagaacatataatataagatgtaaataacacaaacatatagacagcataataatgtcattttgttcagagtgaataaaaaagcaagtactcacccaagaaaattaagatttgagattacaaaaagctgtgagcagcttaccaattttcggagcagcatattgaacgaagagaaagactagcaaatcagcaagagatatcaaactccaacttagtaaagccgctgaatgaatcaaataaaagaaatgtcaatcaagtttaagaactacattattcactatgatcatcttgaaacaaaaatgaaacttgtaagtaaacatgggataaatttgaaactaatagaacaacaaaaatatatatatttcttttaataatctttacttaatttaactcacaaaactgcctcaaatgatattttataaaatcttcctaatgaaacatccttaaagcactaagtatcaaaaaaaagtaaaaaatgtagcaaaattctctatatttagaactacaagctgcgattattaccaaacaaaagcagcataggcaataggaacccactaagaaatctacccatttcagttcttgcaaacgtgttgaatcaaaagaaattctaagatttctttttcaaaaaacctagaggagaactacacgagcccatttgagaaaaaccatgtttgaagcataaaagattgtgtataaacattaaatcaatcttgctttcttcctcaattgtattataacctcaatgtcccatttcgagaaaagaacaaaagaatcattttttccttttcaaaagacaattaaaccacctcgtactttgtaaaacatagaagaaatgaagaggccgccaatattggaactttaaggtattgatacatgacaaatgtcagaagcattgtaaattcttcaaatgatggaaatttcagatgcaaataaccgacttctacgcttatttgcatcaccaaaaaatagatacataataattacataaataaaattaaattatttattccgttaaaagacacatttcaatgtctatttgttcttatgttcaaaaaaaaacaatgttgttataaaataatataaagtagatga

SEQ ID NO: 24899 - DNA, 3259 bp, Cannabis sativa
actccaatatgacaatattttttttaaaaaaaaaaaaaactcaatataatttttaaaaattactattaatatttttttaaaataagtttctcatattattttgtattaatttcaataattactttaattttttttcctaatttttttaaaataatatataatttttttaataaaattttacattattctttattataattttttttgttataatatttaaaatataatgtatacacattattatatatacataaaaataatataattagacatcaaaaatacaaataatctactttttaaaaaaaaaaaaataaacttaagtgtgttcacctagtagctaccaaatttgaaataaaattttggtgataggataaatggtagtttggtgccttcaaaaattaaaaatgtcacccaaactaaaaaaacacaaaaatgcaccatccccatatgttgatgggcttttgtttgatatttgatggtggagtagcagcccaatccagcatacggcgcccgccgaccctattcgttcacaatcacaacaacaagagcatagagaatccgtcgttgtagcatttcatcgaacacattgtcctcaagcgcccacgactatagtatcagacagagaagtgaaaaatagcagtatctggtctcgtgagtcttcctttacacttttttacttttcatattcctgtcaatgaacttcgtcgctaagcgtctcggtccagttaatctgtccgttaagtctacttcaaatcctgcttttttctattcacacattgcgaaaattgaaattctttgttatgggtttcagtttttgactcctggggtacgaattaatttactgtttatttctattttatactattactttgtagttttaatggggtttcggggtggctttatttttttgtccaactgatactgcattaactgtataaacagtggcaccagccacaaattttaaccaatttattgagaattgtaagggaatgttgaaatgagtgtagtgtttgagaattaagatggtaccaaatgcattgatttaggctgtatgcatatttgggttttggattaagagtatatgtacacacacttacttggcaagacattttgaacaagtaggatccatcttaaataaaaatgatcggtttaagtatcatgtcccataggtgtttgttaaatttgtgtttgatttgcgtgtgcacgtattattactcgtttaatcttgtttgctgttgtgtctggaaggtattgcctgcctcaacttcatgcaatgtacttttatatgttacttcagcgaattgattttatgttagatcttttacgtgtttagcaatgaccaacacaagaataagttatttgattgttatctagatagtttttctttgtacatgtgctatgctttagttcttacgtgtgcataaacttatctgtcaattgcctttgtgtttttagcacagcccccttaaaatcaaggtaaggaagccttcaatggaggccactcaaaatgagaaagatgcactcgagaaactcccaaattcagaagtagctacttcagagataccccagcaacctttgtccaagaacgcccaaaagaagctgctaaagcagcagaagtatgaggcaaagaaagcagagaagaaagcacaagcaaaggagcaaaagaagaaggatggagaaaggaagcgaaaggagtgggaagaaatgctggccagcctccctgaggaagagcgctcaaagcttattgagtctcgtaaaagcatgagaaaagaaagaatggataagaggtcagaagagagggagagtaaaatcgagagactcactaaagctaaactatgtggccagaacattatcatagacatggagttctctcacctcatgacgccttctgagatcaacagcttagttcagcaggttttatcttcttggtttccctctaaccaccatttttgttatgatgtttgtttgtgatacttgttctttgaaatattttttggttcacatatttgtgtcagcatttcccttttttgtttcaaattattcttataaaagtgtatctttattgtttgaggcccattctcaactacggggtgtttggagaaaattttgataagtagttcatctaggtggccaattcaaagtcatttgtgctctgtgttctaacttcatgtgatgtcccttcatattgaacaaatctgcagattatgtattgctatgcagtcaatggaagatgtaccaaccccggccatctttggttgactggatgcgctggagaggttggtactcaattgcaaaggctcccaggatttgataagtggataatcgaaaaggacaaccgaccatatattgaagctttgcaagaccaaaaggaacatttggtgtatctcacagctgattcagaaactgtgcttgatgaacttgatccaaagaaaatgtatatagttggtggattagtggatcgaaatcggtggaaagggataacaatgaagaaagcacaagagcagggcatccaaactgcaaagctcccaatagggaattacttgaagatggctagttcccaggtatgaagttagtaagaggcactcttttattatcataagaactgcattcctttatatatccattaagtttgtttttcatttttacacgctccacatattgaatacggtatatgaactcatttgataccatgcaatatgcattagcagctacctcaaatggcaccattgttgcctttaacagctgtttggtcttactagtactactagtgccaacaaacttttaaatgcctaagcggaagccatcgtgatatgatggcaattggtcttgaaatctgaagagtattcttgttaagatctctggccaagtattgtgatgcatgcaagtagattatttaatacttcaactttcagacaattgaattttttaaaactattaataataaatatgatttgataacaagtaatatattcagtttataattttccttttaaaaacgattaatagacatacatgtgaggaatgcatagaggcttaaaaataatggtcagtgaagattactatctgggacgatgtaatatgacattgtggttttgaatgcaggtcctcacagtgaatcaagtgatagagatactcatcaagttcttggagaccaaggattggaaggattctttcttccaagtgattcctcagaggaaaatatgtgaagctgacaaagaagaggaacaacatcatgaactagtaaacttagaaagcgatc

SEQ ID NO: 24900 - DNA, 3194 bp, Cannabis sativa
tttttttttttttttgaatattggatttaattttaagaattatttcacaaatatacaaaataaaaaagaattataaaaatataattgtacagaattttaaacgtttttacaacataaaagtatttttatgttgttatttatatatttattattcttgatttgatattgttagaatgttattttcatgttacttttacgtaattttttaattgtttttatagaatattttaaaaatataaaataaaaaaaaaatttaaaaaaaaaaagaaattttgcacttaaaaatattgtaatattttatacctagttataacctaaattttaataagtatctacttatttaaaaaaataattgaatgacaacaagaataagttaaataatacagtagattaaaggaataatgtcaatttatcatttattaattcatactatatatatagtatatatattacataaacaaaagtgggtgctataagtatgatccaccttaaaatattcagttgaatatttgtagctaccgtatatccccaaagattagtataacggagatttttccaaggattgggtatagagccaatcaaactaattatagtcgatcaatttcatgacttaatattataaatccaactaataaatagcttcccccattcttatgggagaaatttttttgtttatgctgatcctttcattgggtatgatgttggtatcgtatttggtcctaccaagatgaattgtccttatccatattcaatttttggttatatttttcttcaaaaacatttacataacaagaaccctacaaagactttttttcaacaaggaccatccagcaacactaattgtgttaagtgtaacaataattatttcattttattaggtaaagccaaaatagtgaaacaaaaatcgcagcattctccaaaatggaccaacaataaacaagttttcgaaaacactataattttttgaatttttttttttatatatatatatatctatttaccttttatatttatttaaatttttgtcaaaaagataaatatacattgaaatttcgacatttgttgtttgtcctttctattgctctacatttttgcccatggcgtcgcaagtgaaaaagaattatgataacctctcaagcaagagaagaaaaagactatcaaaaagaaaattaaacaataataataataataataaaaataaaatgcaatccaataggcctatttgacaagttgagcacataaataacagacaaatgacctaaaatgtgtagaaataggatgacgattacttgaaaaatgttgaagaaatagtagtagtatttatttaagagaaatttattaaaatatggtaaatttaaatttaaatttcataaatatagaaaataaattaatgccaccgaaaaatataatttatttattttttctaaaataaacaataatttaaaagtaactagctatagtatatattacaatggtttttctttcttttgtgatgtagtacttcaattaattttacaattgaaaaaataaaaatactattttgaccgaagtaatcaattactatcatatcaatttttaaaataattaattcgaagaagtatgcataaaatcataaaaatatgtaaaattgaaaatgcagtatttatcaagcttataggaaaaataaaagtagaacataaaagtaactttctctttattcaacaaatttaaatctccatacaaattgaggaaattacactctatatcttttcatattgtcctcttttatttgtactctcttttttaaagtctattatttttacatctttttttttaattattatactaattttgcccctgtcacttcaagatactctctatataactctcttatgtcagggtattttgggtacaatacatataaaaagagataaatataaatagtttgattaattgattaaaaaaatagtatttttcaacttaaccctaaaaaatttgctccaatatgtgtccacccagttaaaaggaatatgcggtagtaacaaaaaaaaagccatttaagtattaacatctactgtaaaattattaatattagtactaaattaactccttttttattggataaacaaagattttactaaagatgagacaccgtacctataaagcacattttaaaatgattacttactctttcaaaagcgaaaaattaaatactaagcatttttacatttacaaggaatttcgagtaccatagaacccaaccttctatttttttctccatgatatatacatggctgggctgaacagagctgggatgggctgggcctggtggttggaaaaatttaagactacaaatttgaaataaattattaaaatacgtcaacatgaaaaatttctcatttttactttttaaattttttatttataaaaacaaattttcagtaaaaataataaaatattttttttttgattattttatagtttatttatagttgtcatgagattgtttttcaggttattttatagtttatttatagttattgtgaagttgaaatctcgttattttttagttgttttttaattttttgctgaataatgtatatttttataattttaaaactttacaaatatatttttataattaaaaatttcaagccatataactataaataaaacataaaagagtgtatttttaaaaatttcccattttgttatctagctagaatctacttgttaatttagttatagtgttacatggtatcaaatttagttatagttgtgcaaggtatcaaattttatttattctctgttttttttttctttcataaacaaattttgttattaattgacaccctaataaattatagcctcaatatttagtctctccaactttccaacttcctcagtagagctagatcgacttagtggcttcatttttagatctttattacttcaaatggagaggagcatccctggttacgtcttcacaccaaattttagtctctcgctctctctctcactgttatcaacatttccagtaaaaatgttctgggcttttgaacatggaggtggcaaaatggcccaattgcagaattataatgagactttcttttttatgtttttttttcgaagtttacaaatatgatttaattttttgaaaaaatttgtttttagaaaaattcaaaagaaaaataaaaataaacattattgaaata

SEQ ID NO: 24901 - DNA, 5624 bp, Cannabis sativa
agaaaagaaaaagaagagaaatgaaaaaaaaaacgcaaatcccaataaaaaagtaaaaaaaaaaaaaaaaacaattttttagttaacaattctctaatatattatctattaattacttatttttagggcataaatcccaatactacagtcactacccttgcaactcgaaaccacctgacaccagacaaagatacaaggcataagagcaccatctacaagatgtcaccgtgtcccttgggaccaccaatgtatcttaggcaattagagcctacaaatactattttctcaaatgtggtaagggttgaaaaatcattgtaatacttgacctaaaaaaaatatgtacttctatctttctccatagttattctgcacttttttttttttttttcatatttttagatcttcatcttaatcttaagtcttgcattcaagtttcaatttttcggctataatttagttgataagttttcacaatcaacaattaaaatgaggatagtttaggaatattaaaatcttaaatgcactcagggtttaaaaatgagtagtttttgcgaagagagagtaataattgatcattattcaaatatagagtactaagtgcatattttaacaaaacacaaggcactaaatgggcatttatccttttacaatcaaagacgaaggagtgcctgctcacaaagggggtcacagtaatcagggctgggcagctgtttactgaaaatacaggtctccacaaagtcgtaagatcatgtatgagggctgacatttgaccagtgccaaaaggtctaaggaagttgatgacatgatgacagggaagtcggcgatcgaggctctagtgaacggcagttgtaactacaacggtcctaaggtaaccaaattttgacctacgaaaggtgtaacgatctgggcactatctgggagagaggctcgcaactattaaatttgaaatgtttgtgtgaaaaattgcccccacacgcttttatcttttttaatataaattggaccattttgctgctcgtactctggtggtcatggaagaatgctcaaccacaagacttgagacgttgaactcaggaacgagagtgtcttaccaataccacaccagggttagaccatgcgattttctgtatgttttcttataaaccgaacccaaaacctgtcctctctctttcatccaacctaataatatgtcattcttctccttcaactccaacccctacatttccatctgtcaaccgaaccaagcaatcccatgcgcgcatcatcgtttctggcctcgtcggccatgccaacctcatggctcatctccttctttctctcgctctttccccttctcccccacttcgatattctctctccatttaccaaaatttcaagtacccttctgtcttcgccaccaataacctgatacgttgctttgccaagagcgattctcccagtcactctattgttttgtactcctccatgttgcgaaaacatgccaaacccaataaccatacttttacatttttgtttcaagcttgtagcaaggctttgggtatggaggaaggagctcaagttcatgctcacgttgtgaaatacggtcttgctgatgatttgttcattcgaaatgctttgatcaacttctattctgcttgctctagattagagtattcgaaaaaggtgtttgaggagagcttgagtagccgagatttggttacttggaatacaatgctggcgtgttttgtgagagatggaaaaattcatctcgcggaggaagtgttcgatgaaatgcctgaaagagatgttatctcttggagcaccataataacgggttatgtacaaagtgggcttctagagcaagcattgaagctttttagagacgtaatggaaaaaagattgaggataaatgaggccatgttagtgtcggttctctcagcggcagctcaattaggtttgcttgaatatgggaagttagttcattcggttgccaaatcgttgaaatttcctatgactactccccttgggacatcgttaattgacatgtatgcaaagtgtggatgcattgaacagtctaaacttttgtttgacaacatgccccagaaagatatttggacgtggaatgttatgatctgtggtttggcaacgcatggacttgccaaagaagctattgctctcttcgaaatcttcataaatgaaggtttcgctccagccactgttactttcattggggttttgagtgcctgcagcagagctggtttggtgaaggagggaaggcattattttaagttaatgactcaggattatgggattcaaccagagatggagcattatggatgcatggttgatctcttgggtcgagctggtttcgtaaatgaagctgttgaattgattgacaagatgcaagtgacgccagaccctgtattgtgggcaacattgcttggtgcttgcaagatttatggatatgcagagctgggtgaagagattggtcataagttaatcaaattggatccaagccacagtgggcattatgtgcagttgtctacaatatatgccaagtcaaacaaatgggaagaggttattagagttaggagattgatgattgagagaaacactaataaaactactggttggagcttgatagaagcacatgggagagttcacaagtttgttgccggtgatagagaacatgaccgttttatggaaattcataaaatgcttgaaacaataggtacacgaattgcagaagccggttactcaccaaacatttcttctgtgctgcatgacattggagatgaagagaaagagattgtgatcaaagaacacagtgagaggctagcgattgcttttggattgttagtaattccggatggggaatgcatacgagttgtaaaaaatttaagagtttgtgaggattgtcatgaggtaaccaagtttatctcaaaagtgtttgaaagagagatcatagtgagagatgggagcagatttcaccattttaaggatggaacttgttcttgtggtgatttttggtagatcagactttgggaaaactctaatacattctttttattacaccctaacgttttgggtattgcccttacactttcattctttgtaaaatgttcataatcagcatgatgaattcgtcacaactcacaaccattactaaaaggtctaaaaggtactgattgttctgttatcaggaccaggaagaggcaaaactatcgacagatgattaaaggatttattgaaccaaaaccaagtatactagaaaatcttggattcatccagaaagagctttacataacaaagacatcatattaatatacatatatatgtataaattgtattcactacacacattaatatgtccaaaatacatataataagtacttcatgaagatgtataatatgtagtaacaggtaaccagagacaggagactcaaacgaagaccctaggaacagtcgtattatggacatgtggacctggagcaggcccacagtcggtctctctgagaacagtcttcaggccttttcctcctccatttgcttttggatgtatcccatgatcaggtcctttcatgtaagccctcttctctctctcctcctcatagttaactccgaaacgtttttgaacatctgatatcacgttgttatttatcataagcatcatgattttcttgtaaaaacaaaaagtactacaatttctatttggttagtcataaaacacacaacattatacatcattgaattaatataattagtgtgtagtaaacataattatatataacaaagtacctttggcaaggtgatcatgaagctggccatcttcggtgaaggacatcatgagttgagggaggccaagaggaagagcatcaccccggtcgacctgccaaaaatggtaagtcttgccataagtcttggcaaccttttccaagtccttgcgctggatggggccagggatccctggcatgaacaggatcccgctcttcacctcatactcgtgggagtgccacaatggcttctcctcgtctggcagcgtcatgaatagattctccgacacaaggtactccacaccaataagccgagcgtccgcggcagggctgtcgtagatcaggcactgccgcatctcttcgttttggtgtgcgcaaaagtggtgcgcctctacttgtcttgtcatgtcatcgccatagtagtggaatctatagatataaataatttaatcaattttaattcttaccaatttgggagaaaggtaagtacatccatgcatgtatagtatttataaagttaaaattattttttaaaaaaaaaatcaaaagcgaaaaaacttaaaaactgaatcgccaagaaatcattgtctaagaatcttaaataatatgttttaaaacacatcacagtagaggttgtactgaagtagtattctccattaataaatatatacatgtatacttacgcgcagaggtgctggtgaatttgattgatggggccgaaaccctggatggcggcagtggcagtttcgaggagggcagtacaggtctgagtgggctctccggcaacaactgggtgggggcaggacatattcgatcaaattattagtaatatacctatatacctgataatatatttgtgatgagatgaaactgttaagtagtgtttggccttatgaagaagcatagactatgatgatagtgttgcatgcaagggtacgcgtggaagtagacatagaagagaagacgtcgatcaatgcacctgtcacgtggctagctacctgctcttttagatagaaaccatccgtcagtacatagacacttttttctttgtttctttggtcggatataataagagtaaaaagtatagtgacaaaatattcatagaattagaattgtgcatgtgttgtcggattgtggtggcagcagctgcggcgactgatacgagtagtactcaagtaaaagattacgattactcaaatcaaacaacgataattcgataaactaattaaatatggaagttgcttatgagtttataatgggaaaaagcacactatattagatgaataattactcagcttgttctgcaggaatattttagactttgtacacatatacaatctataacaaatcggggtaaaaaatcataaatcataatatcctaatggtattgtactcgccatcattacaaaattataaattgtcctctttggagtgttgtataaatgactaaaatgtacctcttgtatatttattttcttcacatcacctctcaaactaagggggtttggagcatatcaagtttggttacaagaaaatgaaattgagcaaaagatagatttttgatcaaacaatctacaatttggtcacttgaacgaatgtatttgattttcaaaaaaatttccagcatcttttcttgtacataatcaacatctagctcaatttgttttctttaagtgagaattgaggttgttaggttatatttagcctatgtttcgggtctgaaaagtaagtattttttggtctgttggtatcttttggagcggtgttacgcttgatttttcattgtttcaggtttccggggtgtcaaagttcaaattcagtcaaatggtgaaaagacgggacaaactggcgaaaaattggaaaaatctgctc

SEQ ID NO: 24902 - DNA, 5378 bp, Cannabis sativa
aataaataaataaaccctaaaaatctcttttcttctcaataattaagcccttacttagtgaaacttcataaataagacataatctaatttaaatttataattgattaattaaaatcaattaactaagtctacaataagtattatctcaactagtgtggggactatgtgcctatataatcaagcttctaataagcagttctagaatttacttattaattcttcctgattccactatagattcggaattacactctcaattatattgaacgctctatatatatgtttcaagatatggatatactattaattatccattgttataatccaaataatcaaagatcctctatagatgtttacatcgagtaaggacaaatttatcgttctacccttcaatgtacgtattttattcttaaaacacttagcttcttataaatgatatttaaataaaataatataatattactgaaataagagttcttccatttatctctattaagtcaagctgaaaggaaattatcatttcacttctatgtctatatggaagctatagattccatatctatgattagtgctctcactcaattgtaatacggtaccatattcccaagatgtaagtattgggtcgatccaacttatcagctttaatgaacaactctaagaacataaataacacagttgatatacctaaccatttcaggattaagatatatattgatctagatcaactaagtgatattgacttcgaaagatacaatgataattttataatatatttaccgagttcaatatcggtccagtctgatgtatactccatacatctgatactagcatactttactaatgctctagaaataacataacacttatatggtgtaagtaaactttatcgttgattatcacaacagtgataatccagtacattgatgaataggacataaactttgaaacatataattaatcacaattaccttctactaggatgatatcattataattaatgtgtgacaatatgttatgaatttatcaaaaattgtaaactaaaccaccaacatgaaaactacatgtaaacataaaataacttctaatcttctattgataacaaataagattatattgaaatgaatattatttagggcataaaattctaacacggctgtcttgtagccattacgactctagtgaagaaacaaccccttgactagcgcctttctgcagtgttctattctattttgtctttgctttcaagtcttaagttttatgtctttagatttatcaatcgtgataagctctccgttaacaatttggctgtctttgttaggcaaggagatgcaggcagggccgaccttgagttgaaatgggccacaagcaaaaaaaatgtttgggctcttactataaagataaatggtattttttaaaaactattaaaaaaaatatgtataatttttaaaaggtaaaaggtatttttgtatttttttttttttttttatttgagtcccttaaatgagtgggccctagacgcgggcctaggccgcctatccctggatatgcagagatctgacttgtattgaggaggaattgcccctgtcaatcctactgttttaacctaactcgatgaactgaggttctctttcaaaaaataaaaatgcaagggttcaataatttttttttttctttctaagacccaaaaaatctcaaaatcgatcgacttagttcgagcttaagtgaaaaccctaagtgggtaagaggtggcatcgatcattactcaaaattgattgacaacattgtcaattttcttttctttgatctaattgttgatggctaataagactcaataaagtggggtcatatacttatataaatatatatacctataaatataagtgtttcttatcacacaattactcaatatacatactttttactatctaaacaccacaaattaatattcttaaattttaatatataaataaaagtagatgaatatacataaatgatcatgatgatgatcatgaacaagtgcattattatatatgttttgattctaaaaccacaagtacaaaagatgaccccattagagtcatctcttgtatatataacatcgaaacaataataataattatgattattatgatatattgttgtgtgacagatatccttttgtccacattttcatcaaaattattgcccccaaaaaccttactagatctaccataaacaaaaaaatacaaaacaaaaacattattactcatttagattattatatagatacatatatatatataaattatgatttatcatcattctaaagtggaccccatatcacaaacttatctcctatggtccatacattacaatataattttacttccatccaaaatattcttctgtgatcaaaaactaaacagatcaaaccatagctaataagactactcacattcatatatatatatataaatatatacatatatattataatgattattccagctacataaatgtatacacatactctttttttcttctttttctttgagctgtcaatgttttgatcaaactaatcaaaaattgctcacgtgacacacttttatatataataatatttgtggaatttttaattttttttattattattattggtctcttttcgaagtgtgttatataaatttgatccattgatttataaaaatagcaactttatattaattagataattaattaagattttcttccttaaacttaattaacatgtactaattaataatcatatcttatttgcttctaaattattaaaattatttaatttaaatttttttgtcgatctgtttaattttactaacaattgacaagttcagggatcctaataaatatatagctatatataatgttggtttataactaattaaatggctagcttaattaatcatacattactatatttattatggtttttaagtatatatatactaaaatccaaaaaccctactaaagccatcaaagaatgagaaaaaaggaataaaattgttacacatattaattatttttataaaatggtttttgattaattaagtaacatatagttataatttacatattaagtgtacgacacgtgatcatccataatttatatataatacattaattcctatgaatcataataataataatttgttttcgtaaaaaggttgttattaataattatttggatccaaagtatagtgtaaaataatataatccaattccatatatgatatgatgatgagttaaaaaaggggtattttggagggtttcaattatattaaactttttcttttggctttttcttcatatatgctagttggctgtatcatatatttttttaaatattttttaaaataataattttatttaatttttacaatttaatgaccattttacccctacttataataatatcattatagaagagaaagatttcttgtaactttggtttttcttgaaacttcccattataactaactaattacacaagcatatacacataacatacatatatatatatatgataatttatagtatatatatataaatatatagctagggaaacccacttatcctaactactatatctctctctagtctatatatatattaccaacctttctctctctatattctctttaacttcatcaaattcccaaataaacataataattctcttcttcttcttctattctttttctttttcacttacacaaataccataaatatataccaattattattattattattattattattattatggggttaagagacattggagcaacactaccacctgggtttagattttatccaagtgatgaagaattagtgtgtcattatctttacaaaaagatttgtaatgaagaaattttaaagggaactttggttgaaattgatttgcatacttgtgagccatggcaacttcccggtatgtatttattaattaattctcttaattaatttttgttaattatattcatctcttcttgtttatttttagttaataataatattcttttttttttaatctctatatatataacatgtttttggttgatcatcatattaattatatataaagtttaaacaattaattaatatttaagttcccatttttagagagagagaaagaagattaagctttatatattaattatactttaattatttatttttgttgagtggtgggaatgccgacttgtttattataattatagtttatcttgttcagttgatcatcatgatcattatattaattaatatgttaatatgaatattaattatccaataccatttgctaatcacgccaatgatttgctcttcttcttcttcttcttttttttatatataaaaaaataaatatataaatgtatacatatatttatatatatatatatatcttgatctgggcaacttctgttttttcattctttctaaacagtggagaatcacactgaaattattggacacaaaagaaaaatattataggtgaaaaggaaataaatttaaatatagaaaattttgttaattataaattatttagccttttatgtaaatatatatatgtcacttttcggctgaatatgccaattttcaattaattattttgaaatatacccttttttatttccatgcagttaaaaaatatatatacatacagatcaataattaatatcattggctttataatatttttatttttaataatatatatatatataaataaattgatgatgatgatgatgatgatggctttcatcttaagttattatgtctttatcaaaactgttggtcacaggaatcttattattacaattttacaagaaaaaaacagtcctctcctcatcaaacttcaaatttacaattattaatacaaactcacaattatttgtagttttaatcaattaaccatttttttagtatttttttttactaaaagaagtatattaattagatatagatgtagtaaataattaatataggtaagtggtgtacgtatctttcaaattattattattattattcatatatatctaaaattttattcaataataaaaatgggaatatttatttattaatattcgctggctttttattctacatgtggtgaaatatatacatatacatcttttattaacatatattcctctttcactacatcatatatatatatatatatataacgtgtatatatatttacattatggtacttgacaatatatctaattatatatttacatgtatgtaaatatacatatataaaacaacatgacaataatttataataatattaattaattaataattagtagtaattgattttatatacatgcatgtacacattaattaattaa

SEQ ID NO: 24903 - DNA, 1708 bp, Cannabis sativa
ttctataaatttaaattttattttctgtattctaaattattctggatgcttaaattatctgaatgttgaaaatagagcaaattacaatacatacttctttcaactcgatgcctttaatttttacattatcttttaaaaattttactcctatcatttcatgataaatttcattcttctctagttaaaattttgctcaaacttttccacaaacctggacatccatctataaaaaacataaatctattatgtttgaaattatgtgggtatgtgaagataatttatgtacagtactcataaaaagaggtatatttgaattaaattttatttgaaggtaaatttggttaatgtataaaaaaaagtattcttcaacttttcccttgaaaatacgagggagtgtatatattgatgcacttttttaagggtgcaccatagaagcacctaggaacaaaaatagttatttagaatatattataaatttttaagtattcttttttattattttattttttcataatcgtgtatattatagttatttataattgtaaatttttcaaaaaattctaaataatttacaatataaaaaataagattaaatattttgttatacgcgtagtaagcaattatttgtatatttatttttggactgtaaattattcataatttttttaaaatttacaaatagtcttaaaaatactacaacataagcgtacataaaaattattggactataaaactctcatggatattgaaataaataatatctcttcttgtttatttagttttaggaaaaatctaatgtacacctcctaaaaacgagattgtttcactacactttttatctatataacatctaaaagaacttttttagtctttataatcacatacgttttaatttcttaaaatcacttttaaatttttagaaaatttcgaagagtttactctgctaaaaataaagtttaaatagttatttactatacgtataaaaaaaaagttacatgtgcatcaaaatatttaaatcttattttcggcactgtaaattatttaaaatttataagcggtcctaaaataaagtataacatacatgatcataaaaaaatcagactattttgaatttcgaaataaatatgggccatgccaaaataaatattttaggagtctttaatataattaccctttatttatataggtgtaacatattttgattatgtgtaattagattggtttagatgttgcctaactctaatgtgctttaagtaaaataataatattcattcatgtaagtttgatttggcaagaacatattatattgtatatatttatatatatatactaggtatattacacctatacttagttatatttttaatttttattttggttatatatatttttagttgtataattattttttattgtgtgtggatgtttttttttgattaagaaaatattttttattaatcaaacatgtacaaatttacagctaaggggaaactcctcaaaacaatattttacaacctttttatcttattgagaacaactctatctatgctagattaactcctttctttaacaagattaagtctacacattagactttatttaattctatcatctacacatcttggactcaagtatttgttctcatatatacaagtattctgattcagctatataccatatattatacttgttacgacaacaaagaaaa

SEQ ID NO: 24904 - DNA, 1625 bp, Cannabis sativa
  modified_base (1392)..(1396): a, c, t, g, unknown or other
tactgtgactagatgcatgaaaaattatgtactacgactagatgtatgtaagagtatgtattacgaccagatgaatgcatgacatagtatgcgctacgaccaagtgtataagagagtattacgaccagatacacgaggaaatatgtactacgaccaaatacattacagagtgtactatgactatatatgtcgatccttgtacaagattcttgtattttaactagttgtaatattcttgtagatgttgaatgttagttgaaataacatcttgacagctttgagttcataaaccttaaaatccttatttagatgagttctaagtttattcgacttatcttatattatcactcatattcacacatctttaacttcaaaccaatgtcttggacacaattattacacatatattttaaaaagttaacctaatttttgaacactttcataattagttttattttaatgaaaaaaaaatcattaaaattaattaattataatagtaaattttattatgatgttttttttttaatatgtaaacttttattatcatgtggtgtatgatgatcatatattatatttttattttaaaccacttagatcgatagatatgataatctttacacaaaacttttacaaccattcatgtattataatttttttcactaataatacatgtattatacaatattcaaaatcggattagagtaatggaaaaatctaacaaaataaataaaaaataatcagaattaatattcgtaatatattgtttactaataattacctggtctttttcttatttatagaaaaatatatatccacataccaatgcatcattttttttagaactatcaatcaatttttgccaagtcatcttatatacccaaaaaaaatatcacaatttacaaaaaaattaattttttttttctaaaaaaaccatcatttccctactcgttgccatcactataaaaattattatttcaatctaactcaataaaaaatctagactataagaaagaaaaagaaaaaaataccaaaaatataaagtggggatattgtgttggaaaatggattaggtataggtgtgaaactcataaaaataaaataacatagatttttcaaaagagcattattatttgatatttgtgttacaaatactttgtaattagttagcgatattctataaaaattaattattatattaaattatagggtttttttttattatttatacatttgaaagaattttttaatttatttttacagaatatacagtgcaacccacaaagcaacttaagtcacaacctaaattgcaactcaattcaaatcgcaactcacattacaaccttaatcgcaattaacgaaacaatccaaatcgtaaaaatgaaaaaaaaaaannnnnaaacaaaaacaaaacaaaaaaaagtataaaatagaaaataaaaagttaaaaaagtgatatatataaggtgatttctctaacttatatgagtcttaatagttaaatataccaacaataatattaacacataattaaaaagtgggtaaataccattttggactctttgttttacaaaagttatcaattggaccctgtgttttattaaatgacaaaatggaccttatatttt

SEQ ID NO: 24905 - DNA, 4338 bp, Cannabis sativa
aaaaactataataactttatttgtatttttaaatttttattttatttttaaacattttaaacttatgtggatgacaacatgctacatgtgtactcatgtacacatcaacgatctattttggcatttaatcgaagaaagtaaacaaaatagtaaaaactaaaacagaatagcagtttcaaaaattttgtcgataaaaaaaaaatcaatttataaaattaagtgtgacaaaatgtataattcgaataattttgcggccaatattctaaaaataaataaataaataaataaatagttacaaacaaagttatctttcttaatttctttttctttctttaaccaattatatgtaagagacaaaacaacaaaacttctttgtcaaaagacaaatggaaaaaaggtggagccttgtgtaaagtttaggccttttgttttgtttgattgttttagaatcaaactgtggtagaatatatagaaatagtaaatattgttttgtggtcataataataacttacacaaacaaattaattatatgtacttccatatagttcacacctataaatatatataaatatttttaaattttattttattatttccagaaagaaaaagaaaatacaatcataattaatgttgagttcaaaaaattgacttttttttttcttcttcattaaagttagaatgaccaaaatgtggcaaaaattgcaattataattaaatttatttttgaatacatattgaatgacgtaataaattattttgcttatattttttatataattataatcttagtttttaatatgagaaagtataattatgaagaaaaattaatttttaaatacaaatatttatagattttcttaagagagaaaaaaaattgagaatcgaaaaatactaaaatgataaagaagaaaaaaaaaataatctttatgagaatatgagaactaatttttatgtaaaatgcataaatgagtgatttttctttttttttttatttgttaccaaagtttgtgttatcccatatttaggtaattaagaatctcaaaattcacatattaattatttatgaagaaaaaaagcctattaatttaaatgcaaccagcaagataacatattatataaagcaataattcctaattatattcttctaataaataatcaattcaatatttaatgataattataaatttagcaatatattgacaaaagcacctaatgcatattcaatatatattttacacaaaaagtcaagatatggatgagagaaaaatacaaatataaataaaaataaataaaacaaatgaatcgtgttaaacactactagaatctcatttaaatagaggatttacaaaatataattaaataaaaacacataacattttagaaaataaatactatgtatcttattttagttcaaaattataatattataattaacttactagaagagttatcttgtggctcattcattagatgtaaaatataaatagttaagtaaatcttgatgacattaacttcattaaaataaatataatttatttattgtgttgtttaattttttatattgttttaaatttgttcgaactattacaaaatctacaaatataccgaatcatgttcttctttcgaaatttcaaaaggcaaaatttgatactagtaatagttcatagggctgtgaaattattacaaagtcattttttgctatgttaattcttaatttagacaaagatgcacgatttaatagttgtaaaaatttaaggagaacttaaaaacaacgtaaaaaattcaagggactcgatcaaataatataaattttttgataaaaaaatcatatttatttttttaaaaaaaagctgattatgatttttaccctttaaactttgacatgtaccaaatcatgtcccttgaacttttaagaccgttaaaaattctccctgaactattgacattgttggatttaaggacttttgtctaattttagtaaaaaaagtctaacatagatgaaagtttaggaggtatgatttgacatatgtcaaagtttgaagaacttgatttggtagacatcaaagttcacgggagcatgatttagtacatggacaatcaccgaattagtaaaattaaatgaaattggataaaagtccttaaatcatacaatctcaatagttcaggagaatttttaacgaccaaaaaaattcagggagcataatttgatatatgtcaaagtttaagaagcaaaaatcctaattaatcttttaattatatatatatattagtaattaagcacacaattaatttcttacaatttttttaaataaatatagctctataatttattaaaaaaagagttgtaaaaataaaacttttaatgggccttgagcacttctagaactcaattagtatctctctctcaaatatatttaaaatgggaccaccaatttgaaaaactaatatatttttgtggatttttacatgcaaatattaattattgatcatataatataataaatatatatttattataaaaagaaaaaaagatatataagatttaatgtttatagtttatagttagtaggtagaaaaagagagcaattaataatgtgatgtcggcatgcagatagagactcattccaaccatatgtatggtttctatttaatgcttaattagttataattttttcaatcgctacaaaaagtcttacacttttagttacaattaaatttattataatcaaaaataaaaaaaaaaaattgtaactaattataaattattattcataaattgtgactaaaaaattcgtgactaaatgtattaattacaaaattaaaaatttattgtaactaaatatgtttttaatcacaatacttgttgtgactaaaattatattagcgacaacttatatctaaatactatagtcacaaatagttttttattatgattaaaggttatataaaatttatattgtgactaaaaatttattactaaaagtatcatttttttagtagtgtgtattcaaataataatcttatcttattattattattttttaatttattaagttattatatattacaactgaattatataatatacacacaacatgttaatgaatctcttttatacataaactttaatccaactaatctgtcgaagtatttataacttataagaagaagaagtgtagaacttcaacgatattaaagggaatatgaagagtaacgatactattacttctgtcttacatatatatagataaaagtttatgtagtacattctttaaaaggatattctggtagactccttatttattttttggcattcaaaaaagtttttgatctagtttttcttataattaatcacatatgttgttgctatttaagattgcctataaatttataaatattgaccttgattgatccaactaacccatcagaatatctataagaggaagaagtgtagaacttcaacgatattaaaggagataagattcataggagcaagaatactactatttctatcttacacacatatatggaagtttatgtagtacaccctctcagagtactccctatctttttctcggtataaaaaaaaattttaatctaatttttttttataatcacgtacgttgtagctatttatacatttctaaatattgatcccacttgaattttctactatatgatacaaagcaaagagtccccactaaagtgcttgttggtactcttataccttctattcacacataagcacacacaactttcttgttattaattattagtctattcataaataactccaagtctctaacgtacaaactacttcaaagttagttaacactttaatatgactttgctaaaataaaaaaactttaatatgaaagatccactatgaaaaaatcacactttagaagctattcatttatttatttgggaagagtataaagatattacaaatttacaattaataacaaacaccaatggaccaatatgaatttaaaacaaaagaaaaaaaaaagaccatgaagactagtatttttaaaattccaattacttgacttgatgcttttcttcttaaaagaaagttatcaagttatcaaatttaacccatcgggaatggtacccgaggtattagggctagggcaggagacacaagccatattttgaccccgagatgaggagggagtgaagaagttatccccaacctcgtcccatggtcctgtttttacatccttattttacttaaaacatacttcgccaaaaaaaaaaaaaaaatactgcatatgagattagttgatttcaattttttgaaaatattccaccaattttgaattaactttgatt

SEQ ID NO: 24906 - DNA, 4575 bp, Cannabis sativa
ccctaacgcccatgatctcagccagttcgggtgacactctcccaaactttaacccagcaaaggcagcaactaactctcccactgtgttcctcacaacacagtcgaacccatgctttgaagaatgctcaaaaatggcagcatctacattaagcttgatacctgaaaccggtttaacccaaagctccgaaccatctccatctttgagaggagacgataaaggaatgttaccctttccttgagctttcaaccattgatcaagacttgctgtagcaaatgaaaccacatccttcacagtacgaacctgatgcttccaaatgagatcgtttctagcagcccaaatagcccaacacaacataacaactctgcccgtggcctccccagaaaccagctgaaaagtgtccaacaaccacagctgaagtgaggttgcatctctactggtagcagctaaaccagcgtaattccaacaagtccaagcaaaattacaagacacaaaaaggtggcattcagtctcagcaaagatgccacagaatggacaaagattttcagttaacaccttcttgatacacagatttgacttagtagcaagacaatttgaagccgccctccaaacaagatctttggctttgggaggcactttgagagaccacaaaatcttccatagaccattggaaggtgaaaaatctggtgtgaacttcatgctatgcaacatgttgtaagcactacgaacggagtagaaaccattcttctcagcaacccaataccacgagtcatcaatagccgaagcaattagaggtataccaagaatgagagcagcgtcttcaggagagaaaagatcttgcacaacgtcgacatcccagcttctattattagcttggaaaaggctgctaacggtgaagttttccaacccctgaacaatcgagtttggtgttggtctgtcaagaacagggagccacgggtcagaggtaacttgcatcgataagcccgtgccaatccttttcctcaaaccagatttaacaacatccttcgcatggatactactccaaataaaactaggattcgacccaagttcagcggtaagatagtctccttgcgggtagtatctcgctttaaaaactttgccaaccatagaatcatgtctaaacaacaatctccaaccttgtcaaactgccttttttaattttgcatcgttgactaaaaatagtgttaataataataataaatatttatttgtcaattatatataaattaaagtactagtaaatatttaaattcaaataattttaattattattttttaaagataattatctataataattattattagaaagttatataaaagtaatttaaattatatataataaagtatataatttagtagttaactcatttattgtaataaacataaaaaatcataaaatacaaaattgagcccttattaaaaaatgaactaatctacttaaaaaaacagaaagttgcaagtaaatataatacaaatcagagcatagcatgacataaaaacatacgtatcatattgaataccttgtaaaattattgacatgacattgtatgactcatatattttttttgattcgaatcgatacaacatcatattttttattgaaaaattaacataatagattcaaaaattttaaaaaaattacaaaaatacatcagcatgaaaaaaaaaaattatttttacgctttaaattttttatttataaaaacatttttaataaagataataaaattttctttggttgttttacagtttatttatagttgttatgatgttaattttttcagttgttttatagttatcgcgaggttgatttctattgtttttttacttttactaaaaaatatatattttataatttgaaaatttttataagaatatttttataaataaaaattttaagtcataaaattataaattgaaaatgacaaaaaaaaaattaaaaattttccttttttatttgtggaccggactattgttatgaaagtatttgagaaatagcatagcagtgagtaggtacatgcgagtacgcaagcatcgacgaaagtacgtctcaaaaagaaaaataaacaagtacaagtgacatgattgggccacaacgacaataaatcaataaacgacatcaaccttagaaaacgccaaaatatattattcaacgagatgtcgtcattgtttgccaagaaaaaactatcattttgtatgtcttcatagtcatcctaaccaaccaccacataatacttgctttggtttgacaagtcaaattgaaatttctttttcatcttaatattttaaaattgaccataatttttaagggtgtatttgatcggtttgattgcgttataacatattttcattaactcaatataaatatcaagttactaatacttaattgtaatccgtctaattaaaaattagaaaaagtttaacccgtctaatggttttgtcagtttggtcggattaacctgtccaaaccgttattcaattttttttataattattattattactttctagtatttaaataattagatttgaaaaaatatatattatttatattttaagttaaaaaaagtaatagtttaaattaattttaagaattttaatataagataaatataattgagtaaacataaaataattgaataaaataataaaaaaaagtaataatatggtatagattttaaacttcaattttaatatttaaatacaataaaaattactaactataaagtctaagttttaagttaaacattaaaatatctaaactttaaatacaaaataatttaactaataaacataatttatgtaatataatatatacactttcattaaaatatatataaatcggtttagttcggtttattcgagttaattgcgcagtataaaataatttgtaaaccacccaatatattcattgggggatttggattttcattgtattattttggattgtatttcttgtcggtttattcagtttgggtggtttattcgagttggacagtttgttaattttgttgaacacccctaatacttactagcctattatgtcttagtaattacataataactttcaaatacattgttagtatttttttggaaaatttagcatagtatgcttaaatataaaacatgttgttttaatataccacctaattaaaaatagtacatatattatacttttaatatttttttctcccaaaaatacctttacatttcaaaaaaaacttctctctctaactctctcactctccggcattaaccccggcctagaatccataccgtcgaacacacagacccagaacctcagtcgcaaggcctcgtcgtcgtcttctctcacagcctctctcattttttgcatttttttcttttggtttactaatttttttgcgataatttagcgatgtatttacaatgatagaataaatttgaggttagggatgaaatttagcaataatttgtgatatttggcgatgttttgcatatttagtgatatttagcgatgcatttgtgatatgagactaaaaaatgcactgtacatcgctaatcatcgtgaaaacttgagtatgatttcgcgacatttagcaatgtgtttagcaatgttgtgaattggagacatttagcgatgtttcatgaattcacgatatttagcgatatttcccaacatcgtcaaaaatcagaagaaaaaaatgcaaaaaacaagcgagttgagaactccaacgatgggtagggatttcgggggtttcagggtggttgagctcatagattttggggctttgggtttcacgatttctctttgtggttttgcgatatcctcctcaattttgtcctacgtttcgtcttcagagtgggtttcgccaaaggtggtgtagtggtcgtgggtttggtctgggtctagtttggtctggttcagtggttgtggggatcagttggatttggtgagagttagagaaagagggagagagggccgagaagaagaggaaaggtatgaggagggtattttaggatttaattaattttagagaattaaatttctatgcattttaatatgacatactaaaagaccatggataatttttaagcatgaattgtcaaatttctcattttttttaaatggacacagtagtatttaaaacacaatatacttaaattgtagaaaaatttactagaccaaaaattttaaaaaaaaattataaaaatacatcaacacgaaaaaaatttatttttacattttgatttttttttatttacaagaatatctattcaataaaaacaataaaccgttattttagttattttatagttttattgttgtattatagtcgtcatgatataatttttctggttatttttagttgttttgtaattgatttatagttgtcgtgaagttactttttcgttattttttagttgttttttttttattaattttggttgagcaaagtgtattttataagagatatttgcggcataaataccatatgttttcgattttatacacttaaataccacatgttttttttttcgacggattaaataccttaagttacatttccgtt

SEQ ID NO: 24907 - DNA, 6307 bp, Cannabis sativa
  modified_base (50)..(61): a, c, t, g, unknown or other
  modified_base (6271)..(6271): a, c, t, g, unknown or other
tgtgactaaatgtgtttttagtcataatatttattgtgactaaaactaannnnnnnnnnnnttgtaactaaatattatattttagtcgcaagtatcttttttgttgtaactaaaagtctcatttaattacaaaaaatttatattgtgactaaaaggttgtcactaaagatagcagttttttttttgtaataatgaccaactatatgtaaggcaagaatggtgataatgcaatcccttttcatctcaccatttatgtctaattaccacaatattcttaatcatcacttattgtccaataaaagaatattgtgtaacacctttcaagcccgctaacttggcaatatactcaagcctaacaactatgagagtctaactaccatatatgttattaatttgtagtttctatatatttatttgtcaaaatatatgataatatatttttggagataactaaattagaaaagtgtaaattgccaagaagtgaacaagaatgcattgtacttattaattcctatttaggagaagaatgaacgagttgatcatttgataacaacaacttaggattggtcaaataagctaaatttatcataaaattttcaataaatttcagttatcattatatataattgttgaattcattttctcatgaatgtcctttagataattccataacaaatatccaatcctactcaatttaattctactctccaaattgacggaatcttatgtatattattatgttgattacacttttactaattttatgtaaattttagtgaattaaagtatgtgaaactgtgtggattttgtcaaattattaagattggttctaacacatgttatgccgaagcgtggtggagaaagtagagagtgaacgataggatttcattttaaaattaattgataatgaaatgagtatttcaaaacatactttatataaaaaataaattaagctcacacacattgtcattatatgtgcaagatgaacatgaacattctttttggctcactatcttcaaatcacaataagtgacttttttagttctacttcttggaataatttttagattttggtgaccccattgtctctattatatttttagattggatacgagttttgtttttagctatatcatgtagtttcatcttaaaaacaattttcaataaaagaagtgttagaatttgggataagataaatgaggttccatctcaaaactaattggcaatgaaaagagtagctcattcctcttatatatatattttattattttttcatacattagggatgtgggataatttaatatgatatattaagctgtcacacattatacttttttacaatacaaattttttctaaaacagttataatacatggttaatatatttatactggcacattgaaaaagtaagtgtagtataattaatatggagaagatgtactaattaatttaaaaaataacatacattataattcaacagaactatatatagttatagatatataaaatttaacctatatatcagtgacattaattagtatttcatctcttcatatatatatgaagacgaaatctttaaacctagccactgtatatataacatttctcatttaaaaatatacaactggtataacatactttattagtaatccaatttggtggttctctaaacaacgacatatgaacacagcctggagaaaaaataaaatagaataataaacatattaattaatattatgcataattttataggtttagtaattggttgaagtatataattaagtacataaaattagtctcttcaatcttaaaaaatctttaagtagtggtgagtaaaaatagtttttctagataagaatgttaatcaatattttgaataatatatcacaaaagtcggccagatttacaatttttttatagtcataatataaataaatatatatagtactctgtcttattcttgatcttcgaatatatgcttattaattatgctgttagactaagaagtttgctttttatattctattttcaggaaaaaaatatacattgatttacaaaccctagttacttatataattagtttaatataaaaaatatggttagtattgtaacgtattaatgtcgtgaaatgtaatgtatcatttaattaatgatatcttaaaggctagtgtccattgagttgtcgaaatatcattggataatgttattattttaataattctaattaatattttacttatgaataggaggcatgtaaatatcatcactacaaccgacaaagacttttacattgttggtaattttgtttttaatcagagttacattatacaaaaatttatctaaatttaattaatggaattgcagatgttctatgccgtttgtaaattttctattaagagtttttaggtcggttttctgatgtaaaaatcatttaaggacttcatattaagagtttttaggtcggttttctgatgtaaaaatcatttaaggacttcatattatgatgtcaataaagtatgtagtgacatcaattttattgcgcaattagcgtaaaagattataaacaaagcgtcattaactttttttttttttaatttctcactttatcttaattttaatcacccatgatcattatttgttcgaaaaatacaaaaattggctcttgtgtttagtgcgaatacgtgataaatttcgtgttttgttaaataataatttagatgtaccatgtttttggtaaaataaatcaaattgatatctcgacctcaatttaattaatttggtcaagtaatttttcaatatgtctaaatctgagaggtttttgttcgacctaaatcaaaagtcatgatatctgaaaaattaagctcacagtaccaatgtattaaaacattgtttgatctaaattgagttaaagatattattttcatccatgttttaaacaaaagtgtggaaatcttcacttaaccaaatacgaagagatgaccatgaagagatgtcaggataggccgggtaaccagggtgacatgagaccctaccaactggacaaagacagacaaagaagagagagcaagcctccaaacaggttgggctatgctgatttcattgcttatgcaacaacagttgcagaagaagttgatagcacaaaacctaacagttataaagaaataatcaattaattgtaaagatgttgcaacatggctacaagcaatagagcaagagaagctgtcccttttgaaggaaaagagatggattatggtcactactgcaaattaattttaagataaaaggaaggaatttctgggattataaaagcaaggtataaggcaaggctagtttccaagagactcataaagaaagaaaaagtggattttaatgagattttttcttgagtggtcaagaaaatttcaataagagtcatgatggctgaagctaccaagcttgatttaaaaattgaccaaatgcatgttagaaaaaccttattacatggggaattataagagaatgtgtatatgcaactgcctaaaaggtttgagagtgaaaatcctgataaggtgtgtttgctcaagaagttcttatatggtctcaagcaatcttcaagacaagtgtaacttgagatttgattctcatatggttaaaattggagtcaacaaaagtaagtacaatagatcaaagatagatgaactcaagatgaaactcaatgatgagtttgaaatgaaggatctagggaaagccaagagaatcctagggattgatataaaaagatctaggctaaacacaataactttgttccagaaaagctacttacaaaaactaatgtgcaagtttggcatgaataaaatcaaggctatctctactacctttgctcaacagttgaaacttaattaatgcatctcactccctaaccactgatgcattgaggctaaagatgatgagtaaaatactctatgcaagctgtgtaggacgcttaatgtactccatggtatatactagaattgatctagctcatgccataagtgttgttagcagatatatctcagacctaggatttgaacaattggaagccctgaaatagatcatgagataaataagagaaactctaaacactggtctagtgttcgacaatgagagcaaatacagggaggatgttactagttttgttgatttagattttgcagtcaatattggcacaagaagaagttgtacaggatatgttttcactgtcctaggttggtgtgtcagttagaaatctaacttgtcaaaattgtagctttgtcatgaacataggctgaatatatagttgcaactaaagccatcaaggaggcactatgattgaagggattgaccattgaatcgaggtttaagtcaaaaaatattattgtctactgtgataatcaaagtgtattacgtctcatgaaaaatttaatattttatgagaaatccaaacacattgatatcaaactatatttcatttgagatgtagtgctctcaaataagtgcaagtaaggaaaatttacactcatgataatcctgcagatatgtttacaaagattatctgcaatgataaactttgccacttatgtcttgaaatacattattcttatatctagttgactgaaataattcaagtgtatttttttgaggaattagattactaaactagttgacataatcattgttctattttgggaaataaaagttagttattttctctctcggaccaacaaaaacctatacctataaataaatatcaacacatgcagcttaagatggatctcagcacctagaagaatcaaactatctcacagattcagctctctcccttttaagacttgtccaaaggagggttgtaataaagttccacgtgtataggatcaaggttccttagtgggagattttgtgtaattagtgttttccaccattaatggttgtaattgagttataaactctcattgtaatgtgctgagcataaaatccattcattttctatcatcgaaatcgagctaagtatttttcagttcttgttcaattttttgattcttaatcaattctacgtacctctgtgtttaaattgctattaatggttataattaacaacaactgaaacgtgaagtttcatcacatcaagcatgatttcaactagctagaagatgatcaagaataagaaataaaaattggtctaacttgatgaaggagattgtgaagagattgattatgggacaatgaatgattgattgaaaaatcaagcaataaatggtgattgagggtgtgatcattgtgttcatattggaaataagggaatagtactggctttagttcttcatgattttcacacaacactcaagttctcttagtcatagctctcttaattttgctcgttctatcttctactcacactaggtgtaagctctagtactgaggctagtgctcattccctacacaccaatctcttctatccctctcccatttcccatctcctctgctagatttgaaaccctagctagtatctccgaaggccaaaagcatgcttcagttatcaacaagattcaaagctttgaagttctacacaagtacgactagctagggttagcttgggattcaaggtacattttccatgctagtttgggtttagggttcatagatgtattcaggtttgaatattctatttacttaaagaattagggttaaatattttactgcttcaaggcttgtcgcaatctaagctagtggatacccattgaagaccatataaatcgaagtacatactatactctcttttttgtatttcttttaaatagttattgatgtcactttatgctcaatatatatattggatgtgacattatgaaatttagttttaaacattattatttatttatcataaaattacttaccatcacattaacatagagaaaagtacacaaaacatattattaagcaaaatagccctaacttattagactgaagtgacacgctctttggtttcaagttgcccattattatcaacgttgctcatcattcgacgaagtttaattgacaaagatggggatataatgggcttgcgttcactcaactgaataatcttgtaaaaccatgagcccattaatgttcccataactgggcccactatgtatacccaaagccctttgtactctccactcgcaatcgctgggcccaatgttcttgctgggttcatcgacccacctgatactggcctgtttatacaatatataactattttggttagataaataatataaatatatatctttatatantaaaagtgtctatctaacggcatttcttggtttaac

SEQ ID NO: 24908 - DNA, 3983 bp, Cannabis sativa
gcacagacctaatcattgacttgatggcagactccaataaataggctcggcttggtgggtttgaaaaaaaatcatcatcaactgaagtttcaactccagcctttctaagaagtatagccctttggatagctgacaatccttcacctacaacatcttcaagaggtgcagggggaggatgcaaaccccaataccggtttctcggaaccttaatatcaccaaaatacaaagtaataaatcaaacaaaattcaaaatgctatgattcaaagtttagcaatatctgaaattaaagttataatacaaaatggagaaaattgtcttctgcataatgtcggtatgaggaagaacgagaacaggaaagtaaatcaataaccaaaattctctttgagatggtctctaactacatgtttatttattctgctacaaaagtacaccacattttttctgaaaataggttactttgatccaactagcttcaaggataaaataaaatacagttctgaggtgttacatacatcatatcaataatgttacagcaaaacaaaaatgcccccttcccaactatcatgtcaaacattttcaaaacaatgagcaaatattcaaagagagtgcttcccctgtttccttccaaaaccaaaattcaattcatttcaagagaaaaaagacattttgaccattgacattacaatgaaatatgaggacgtcagaaagcaagcccggtaataaacttcctgttttctatcctatcagttcttcatgtttttgaccgttgacattacaatgaaattgccaacacgcaagactcttagggcattgagatcaatataacatgtaataacctataatttctcagtaaacacaacaatcaatttgaagaattcaaataaaaaaatgttaaaaaattacttttcttccttttctttttcactctcttactttaagttcaatgacaaaaaatgactaccaaaacaatagagaaaataccagtaatgaccatcgatttggatctcgcattatgaatggaaacaattcagaaggctgcaagatatcagagagcagaaagtgattcactgcttcctcaaaacgcaagtcaaaaatcaagagaaaccccacttgagcatgtacaaaggagaccatgttctttgttatttcaccttcacattcaagctcttcaactaacgcaatagcttccttgaagttcttttttctcaaaaggtctttaatttgttcttcgggagacaatttccgatagcacataacctagatatataagacataataaaaacaacatatcactagaacattaagcaaagaatgcgaacaagtgaagttcatatatcactccagtaggtgtggcaatcatttacatatacaaaaaagcataaagttcataaactcttctactttgaaatttcgtacagatactgaaatccaacagcattgttgccataaggcttaacaaatgaaaaaacatatcttgaaaggaaaaggatgcatatttgggaataaaccagcattgatgccataaggcttaacaaatgagctatcataccagacagcaaacaattatcacaattcattcacacaatacaaacagcttaaatttttttcatctgaaaccagaaataggtaaatatgtgtaaaataaaactcatagagctatatactaaacagttagaaacaatttcacaaaccttggtaggtgatgcaacaacaaaaagttccccttccgaatcttcctcatctgcaataatacaaggcccaccaacactctcaccacccaaactaattctctgaatacaagtacccgatttcttatgatacaaatccatctttccatctttaacagccacaacatataaagacacctctccaatcgaatccgggtccaactgaaaaacaatgctcccggaaaccggttgcccatcagcattaactaccacaccaacattgtccaccagcaatagcacattccaatctttacataaaagtttaagctttggcaaactagaaacatcaggcaatgaaaatatcacaccactctgtccactaacacaagatactaaactatacccattagcagtacctataattatcgaatcattaagccaaaccatagtcgaaatcccatcaatacactgataatccttaagaatcgaataagaaacatttaactcatcaacatttgaatcaatcccaaccaaaaccaatctattaccaacaacaacagcaaaagcattactaccttcacaattcaacccattcaatttattttcactacttctcatccgcttagtaaaaaccctaacccctttcaaaaaactcaatcttttcgcgggttgcaacaaaaacgaatcgtacagatacaaaaactcaccggaaagaacaataactttcccaattccaccaaaaacctgtacggaatcaaccgatgaaccatcgttgactgtaacggaacgaaggagagagagtttggagtgatcggggtttgcagagagtaaaagaagggtgccggagttggttccgaggtagatgagagtttgggaatttgagagattgtaaagagcaatagatcggaatgaagtagtggttggagtgaggtggaaattggagagaggttggaggactgtacgagccctagaattggggttgatcgccatgggagaaggcattgatgaactccgttcttcacgccttcaatttatcacttctttttgcttttgttttttttaaggttacacttaaataatttttagtaaattgttgcaaaaactctaatagttttactttgttaataattaattagtaaaatttaaattttggcggtaaaatttttaaaactcgtaatctatgagcaatttattatttttatttttatttaagtgttaattgtcatgttaaattattatgtgtatacaatgttatccacatagatacattatacatgtagtataattttattaggataagtaaataaatatttaaaaaataaaataaaatttataatcatataaaaaaatcatctcatatacttttttttaattttaattttatttttatttttacaatttgggtggctttggtgattgttacgtgggtggatttgagttacgatttaagttgcttggttgttctgtaagttgctccgtacgtgtatttctgtataaatacaaaaaaaaatatttttaaaatgtaaaaataaaaaaacccctaaaaaaatatgtaaaatttgttgaaaaatgatttaatttttttcccttcttcctctcttcgtcatcgttcaaaactctctctctctctctaatattaaaacatcggccatctctaatatcaagaacgaccgctagttgttgaagaccgtcggccaaacccctttctctctcaatcttgattgtctcttcttctctgtctcatttcggtctctcctcacgaactccgctggaaattagaggcccgaaactaagatctggtctggttggtgctacggctttagtcttcttgtcacctctctctggactccactccttctccatcatgaaagccccttgaactctgctcctccccgtgaagatcatctctgcatttctccactcacaatcactcggccagtgccttctccggccacaagaaggtgcaacaaaccccaacctcaaaacttcatccccattttgctattgtatgtttctcatcaaagtctatctctttcagtcatgattttccccctcttagtcttttagaaatatatttgaggtttggggtttagatttgagagagtttcgtttattgtgtgtgtgtgtgtttgtttgtttgtattgtggtttcattttcaattaaaataagaacaaaattgtgtgattttagaggtggtggtgttatggtggtggttgtaaagaccgtttagtttaaatttggaaattagcagataactaaggtttaattatgaaaattatttattgatatataaataataatttatgttgattta

SEQ ID NO: 24909 - DNA, 1173 bp, Cannabis sativa
aaaattttccatatgtaattgaatcattttcggtttgaaggggttaaaccatcataaaaatatttgacaagtctccatttttcaaaacaatggtgggggcattataataataatctttaatctttctcaataatcataaaattcttcattatctttttgataaaattcggagatttctcttcttaaattatcagttttggacatggggaaaaatttggcaagaaatttattaaaaatttgatcttaagtggttatagtttcggtaggcaatgagtttaagcaagctttcgctttatcttttaaagataaggaaacagcctaagtttgaccgattcatccgaaaaatttgaaaacaaaaaaatgagcaaatatccaataaatcttttacatgcatgtaagggtcttctctttctaaaccataaaatgaaggcaacaattgaacgatagatggtttaagttcaaaatgagtgacattggtagtaggcaaaattatgcatgatggagcagtaaatgaaataggtgaaagctattcaagtagcattttttctttgcgcaacattaggttcttgttccattatgcctaaattttcaaaatcactttcaatttcacctaaagctactactctttttaccaaacaattttttgaatcacgttgccaatgatgcatgcaatgtcacaaatttcaccaagtaacacaaataatctcaagaaaacaattttttgatgaggaagatcagtcatacgaattttgagatacttgaagttaacccctgagaaaggaattttgttttctagaaagtcataggaacaaaccattgatgtgtacacagatgctgactgggctggtgataaaaatgacatgcgttctacttctgggtattttacctttgtaggtgggaatcttgtgtcttggaggagcaaaaaacaaagtgtggttgcccgatcgagtggtgaagtagaactacgaggattgacccttggtgtttgtgaaggactatggttgatattacttcttcagaatttaggctatgttacaactacacctattcagttatactgtaataacaaatttgctcgtgatatggcctataatctggttcatcgtgatatggcctataatctggttcatcgtgatatggcctataattctatttttggcatatttaattgac

SEQ ID NO: 24910 - DNA, 1891 bp, Cannabis sativa
ttaatcttgagaaaagaatggtcgcgagtgtactggaaggagtacctaggtgatctagtaagaataactataagcttatcaggctcggagctagtactgtgggtatgaatcttccactaccataagactaggagcaaatgaatgccatgaagtaagagattgcctgagtggcaagatattagaatttacacagttgatcccgagcagcgtggtgatgcagaattacactaagttggaccgattggtagagttttattttgaagaagtggctactaaggccgttagagaggctaaatccaatcaagggtggaaagagtatatcactcggaatgtggatataggggttaaatgattagaagttgtctagtttttatgctcaggtggttgagctaaccattactgttgagggtgcagggattaggttacactagaaatagtatgaggagatattcattgaaacaaacgtttggtgttggtttcggtaagggtgttgaccctagtgaccgtaaaagaaagtctaagaattcattagttactggattgaacaagagatttcaaagaaatcaagaattcaacgtggaggaaacggaaattggtcgacttatctagaatgctgaggtgcaaaagacaccattagcgcaattgatcagttaaagcctactttttgtgtgggtgataagttatttgaaaagaagctgcttacggttgtagtagtgggaatggaaggatgtatttaagtagttatggtacctttcagtctactggagaactggttattttccagtatgtggtttaaacccttcccagattgtgagggtaaggaaatggttgtttgtttcagttgtgctgaatttagagaaatctaatattatactagggttgaactaatttgaaaggtataatgcagccatcgattaaaaagaaagatggtaattctggaatcagaaaatgaggcttcattgttcttgggcaagttcaagggttctaaaatgcatcaatctcgacatttagggaagaaagtacactatgggatggatgtatcaatctttagcagtatggtgagtgatacaagaggaatatctgtggaaccggagctcgatcttgtggtccaagagtttctatattttttctagaggagctaccaggattactaccgaagaggaaaattgatttttatactggaagtataaacttacacttaaaattttgtattgaatggtaaccaaagatttcaagaattgaaagttcagttataggggatgcggggcttaacattgctagaccgagtacttcattttagagtacgccgattttgatttgtgaagaaaaaggatgaaattttatgagggtcaattgaccactaggggtttaataaaataacggtgaagaataagtatcctttattaaggatagatgctatattaatcgattatgggaaagggtctccttctctaagatcgatctttgatctagttattaccagttgaagactcgacagaaggatatcccccaaatagcttctcgtacccaatgattttatagttgtcttcattaatggtatttcggtcatgatattgaattgacagtaattgttttgtactgaaagttgggcacattatttgtatggtgtgaaaatatgtgatctataccagaacacaaaagcctcaaatactgtttcttttaggagaatttagataggaggaagtggcagttagagttgatttaaattctaacggtgtgattttctaccactttgggaagtaaattagtagtgaatacttaaaaccaaagagatcttaccaaaggttactgaaaatgtaatcagaacaaggattgagatcataattggagaacttgttaatattaaattgtagttcaatttattggaaag

SEQ ID NO: 24911 - DNA, 5837 bp, Cannabis sativa
agatttatgaacttgttaatacttggactaattttacaatatttgtgtaatatttaattgtaatttatttaattacttctatgaaatgaaattaggtatataggccaatcataaaattaatttgaataatatttaatttaccttttaaaaaaacaaatatctaatttaaatttaaattaaataatatataaattaaataaattgaaaaaaaaaataatcattacagatttggcgtcaattgttaagaggcaaatggcgtcagttttgggtttatatggcgtcggttatttactatgaatcgatgccatagggcacatatggcatcacttcttagcaaataaacgaagtcatgaggcacatatggcgtcggttgttttagaccctacaacgtcacctggatcagcgtcggtagccaactttgccaaaatcgacgctgaaaggccttaaaaactgcctctaaaaggcatttttgtagtagtgtttaaaccgaaaaattggtatatataaatttcaaataattaacaatttttttctcaattaaaaagttttcaattttaattttaattaagcaacatttgcataaaaagtgttgctataggcatatttttatatataaaattgttgtcttaaaactttacttttattaacaggcaacgcttatataaaagtgttgcctttaaatattttttagttaaataaaagtgttgttaatgatatttttcctagtagtgacgagtctcttgacctctcaagcaaccaactttctggctctattccaacaagtatgtcaaccatatcaacactagctcacctgatcaacttgtcacataacaggcgagacagattccaaaaggaagtcagttgcgaactttcaacaatccttctcattttaatatatagaaaccatctttgcgaggatccactgcctaataaatgtccaagcaaggtcaaccaattgaacaacctaaagaaagttctagctatgaagacaatgatcatgatgagaaggcaagtaggaaaagatatgatcttactttcttctattgtctagatatgctattggtttgtggggagttattgggactttaattgtaagaaggagttggtgacttgcttatttacgtttagttgacaacaccaatgagcgagtactagtgaaagttgaagtggaagtaaccaagctgaagaagaaaatatcagagagaaccatgctggtaagtcattgatagaggttactatataccaaaaaagagtcttgcatatcatctttttttgctcctattttgtggattatgattttttctattaagatataatgttttacgttgtgtggtatgtttttaattttttttgttgaactcgttgtgtgatgttagttgttatggtgtcatgagaatttgaaagatattgtgttttgcattatgtaatctgtggtgattgttcgcccacttaagagtgatttgatgtggcagctgagtttgcttagggctattatgttagctagtcctattgtctagctataaaaaggaattctctccttcacaacatttttatcagctttaaaattaaaaacttcgatgtaaagagagtttgagggttgtaatttgagattgttcttccttgagaagacttctctcaatgtgaggacatttgtaacaggattgtaaaggagtttaattctgttatttccgttattggttgttgtactttctgttttagtagttagtagttggtttgttattagtttgttattttccagttgttctctactgtaatagattgtatataatcctttacatctctcataatggataaggcttctctttcagtcttcctctttctctctctttcatcttcttcatcgttctcttcctctgctctaatttttcttccatggccagatataataccagatcaaacatggtatcagagccttttccaccattggcagcaaccgttgttgttaatggccctggcaatggctcctccaatacgtaggtccctcaatcgacttcaaatccctttgcaactctgtggaacagaactcgtgattcaaagaacaatcgcagtcccatttacttcagtcataccttatccgtgaagctcaatgaccataacttccttctttggaaacaacaagtccttgctgccattagaggacatcagctccagaaattcattcaagatgttgctcctccacctcaatttctttcagacacagatcaagctgctcagagattcaatccagaattcttgaattaggagattcaagatcaacttcttgtatcatggttgttgtcttccatgaacgagacccttctcttcagaatggttagctgcaactctacaagacagatctggtgtgccctggagaaacactatactcttcaagtgtcatcaaaaattctggagtttcgaactaaacttcagaacttaaagaaaggctcatcatctttggatgagtatttgctcaaagtcaagcaacatgtggatttgcttgcttcagttggtgaatctctgtctgctcgtgaccacattgctgcaatctttaaaggtctgccaagtgagtatactgtagcagaaattgataccttcgtcatctcatccaatactcggattgaagagtatactgtagcagaaattgaagccttattgctagcttcagaatcgaggatcgagaagattgataaggaaattgatctaagtgctaatacaacaactgtgaacacgacctctcaatctgaaaacttgcagcaactagaagccaatcttgctcatttcaacatgaactttagaagttctggcacttcaagaggtcactactatccatctcaccaaaatttttcttctcctcattcaaatttctttcatcctaattgaaactttcatcctggcacattctctcgaggagcacccctgcctttcaatgttgggagaggttcatacatgcacaccagaggaggaaagatgcctcaaactcagaatagaccacaatgccagctttgccataagcttgggcacacagtcatcgactgtttctatcgttttgacaagagttttacaggtgtggctacacctactgatgctccctcgatgcaggaaaatgtagctcaaaacaccattgctgatgatggatcatggtaccctaattctggtgcaactagtcattgcacaccagacctccaaaatctcatgacagctgctgaatacattggctcagatcagctctttgttgttaatggtacaggtctgttaattaagcattctagacaaagtcatgttatttctaatgatcctactaagcctttgattttaaataatctcctccatgttcctaagatcacaaataacttgctaagtgtctctaaatttgctcttgacaataatgtcttttttgagtttcttgctaatgtttgctatgttaaggatcaagtttccagggatattctcttgactgggactctccacaatggcctatatatttttgatccatgccaattcaggatgctatcccaatctgccaacaaaaagagtccactgtcgagttccaaatctgcttttactgtcatttctgggtctcagaactttggctctagttccaagacctattctcaaccacttctcattgagtttgagctatggcataaccggttaggtcatcccttaagtaaggttgttaagtctgttctaaaatcatgtaatattccttgtaatgagatctctaaaacggtgtgtgaagcatgttgtttaggcaagatgcataaatttcctttccccaaattttcaccaactgtctactctgagcctttacaattagttgtttctgatttgtggggaccttcttacattgtatctcacaatggttatagatattacatgagctttgttgatgcatatagtcgatttacatggatttacttgctgaaaaacaagtttgaagctcttaagacttttcaaacctttaaggctgaaactgaacttcaattggggaagagaatcaaagtttttcaatctgattagggggtgagtttaggaactttactgaacctttaaaacaggctggcataatccataagcatcctttccctactactcatgagcaaaatggattagttgagagaaaacatagataaattgtagaacatggcttaagtttacttgctcaagcttccatgccattgcaattttgggatgaagcttttagatgtgctgtatttttacataataaactcacacctgttctaaaccaacaatcaccaatagacattctgtttcaaattcagcctgaatactctagtcttaaagtctttggctgctgtgttatcccaatatccgaccctataataaacacaagcttgattttagatcctctccatgcaccttttgagggtatagtctcaatcacaaaggatacaagtatcttgacaccaatggcagactatacatctctcgagatgttatttttgatgaaaccaaatttccctttgccaatgaaacaaaaaatcgcgcaccatgtccaactgatgtgttttctcaaagtgtcattcctcttgcatcttccaattacagtgttgaaactttgtttcccactgatgtatccccaaagtgctcagtccacacctatgccagctaatgttgacaatacaatcatgcctacttctggagccacaccagtcaacatactagtgtctattcctatagcttctaatgatcttcccaatgttgtgtcaacaaaatatgatgttcctaacatagaacaacctgtctctactgatccattaccttgttgtgagtctcatagcctatctggtgttcctcagtcgcatcctacaaaccccacagttactcaagttggtttcatcatgaacaaaaatagtatgtaaacaagagccaaatcaaggattcactagcataaacttctcttagcatctcaagagccatctaatgttaaagctgctcttaaagaggaaaaatggtgcaatgctatgtatgatgaaatggttgcacttaaaaggaataagacatggacatatgttcctctgccacctggaagaacaccgattgggtgtaaatgggtttacaaagagaagcttaaccctgatggcactgtaaatagaaacaaagcacggctcgttgccaaagggttccatcaacaggctggtttcgactttacagacacattcagtcctgttataaaaccagttcctatacgtgttgtgttatctcttgccttaacacacaactggtcaattcagcagctggatatgaataacgcattcctaaatggagatctaaaggatgaggtctatatgacacaatcctcggattttgaacttcaagaagcccctcatttggtttgcaagcttcacaaagccttatatggccttaaacaagccccacgggcttggtttgagaaacttcatcattgtttggaactccttggtttcaaatcttccaaatctgatcatagcctcttcatcaaacacacttcttcctctgttactttgatattggtgtacgttgatgatataataatcacaagtagtgattctaccataattgatacattaatcagggacctacactcaaaattttctctcaaacatctcggccagctgcattattttttgggcatagaagtcaaatctacctcaactggtctgcatctctctcaagggcatttttcgtgatctcttatctaaagcttaaatggatggagccaaatctatgcctacaccaatgattagtgggctgaagttatctgctcatgaaggtgatcctgtccctgatccaacattataccgttctatagtaggtgctgttggaaattattttac

SEQ ID NO: 24912 - DNA, 3594 bp, Cannabis sativa
tactatttcagtgattgtttatgtactaaactatgttccccaaactttgatatctacctaatcgtactgctcgtactttgacatatattaaatcatgtctcctgaactttcatctatgttagaattttttactaaagttagataaaagtccttaaatctaagaatctcaatagttcagggggcatttttaacgaccttaaaagtttgggggacatgatttggtacatgtcaaagtttggggaataaaaattaattaaactataaataattaaggtgacatttggtttaatagaacataactgttatgataatggaaatgtaaaagtatttcgtactatgctccttaaacacgtttattagttaaaataaggagtgaaatttaaaaaaataaattttaattatacaaaaatgactctttataatagagatattagagaatgaatagaaagctctctattttttttacttaacatttttatttaatttatatttaaaaaattcaaattatatgatattattaaaataattaaaatacagagcaaaattggaacaactacaataaaaataactttctatttaatttctttagctatttttaagaatagtaataggaattaattacaatatttattttggtattgaaataaatatcagagtaagtgataaatttacaaaattatctccactttattttttaaaatttatataataaagagagtattaaagttattttagttttactttatttagtctttgtaatgtaattcttattacataggtttttcagtttattggaggttcatttatatgatgccatcatcactacattgtaattttattacatcatttttaaaagtaaatcaaacattgtaatggtaattgtgttttcattatgattactattacaacaaactaaacattacctaagagtattgatattaggtattttaaagtgtccaacactagactgatttgacgcgttgtgaatggttaacaccactatcaggtagcactttataattagttagcgagtttgtataatctttattaaaataaaataactaggacctaatattaaattgtactaataaagattacacttcacaaaaatgctagacatcatagtgacgttatgtatagtgaaaatatctaaatcgttacgttttaaataattaacattgtactaataaagatttttcgaagacttttaaacaaattttcaaataagtgcaaaagtaactatgtatagtaaaaatatctaaatcgttacgttttaaataattaaatacttttttttttttttttttggtatagtaaaattatgtaagtagtaacaattgaagcccctaaatctcaaatcaagtgtattaaatgtaaaagatacatgataaatatatttaattgaattatttaaattgcaatgattcaattatttttacaaaatatttatagaatacttttcattgttttagatatattttattaattttttgaggcttaattttattttttttataagaatatgtgtatatattaatattatgtctttgaaatgaataaaatatattaaaatttgaaagaaaaaaaaattgtgatctataagagctaaattaaaattctatcgagtaactgagtcaaagagccgcttgacgagctaaaagagccgtttgtgattcagagaattggttttgaaatgaaaccttatacactttactatacactttcatatattttactaattttaaagaaataaatgtatagtgtagtataaatatttgaagtaaaatataaaaagtaaaattttagtgatatattttgaaaaataaataaaaataaaaatgactaataattaattacttaaatatttaataagtattttaacttttgccaatattacaaaataaaataattgtagttgaaggtgctctaagaactatagtgaacataaacaaaaatctcattaataataatacaaaacaaatgtttaattcgtattattataattattattttgttaaagtacgaaaaaaaaaggtcatactatcaaataaataaatatttttttttaaaaaaaaaaaataataaataactattttgtttaaaaaaaaaataaacaactattaattagaaagaataaataaaaagagtgataggtaggattggacacgggtggatttattaggtcaaaccagctactcagaccgtccgatctatgactaagactccttattatttatttagagagagagagaaagagttggtgccagctcagcatctcaatgttgactttttttttttcaatttctttttaatcattattattaataggactaaaaatttataggtatttccacaaaatactcctaaaatgtaagtatggatgtatttttatctgcattgtaattaatatatatatgttatggttatttaaaatattttataaaattttgagaaatttttaataatttataatttaaaaaataatatttaaataatttattttgtacataaaataaaaagtcatgcatgtaagaaacagtttaaattgtatttttagtgtgttaaatttttttgaagctctaaaaattttataaaatgttttaaataattataatgtaaataatcataaaaaaattaaactaaaaaaattcctcgtgtgacgaaataaataagaatacatcgatgcattataaaattttctaaatccatgctattattaattaaattcatttgagtctttctacattgtatctctctcttgccccactggtactattaatttttcctattttgactttttataataattcattaaaattatttaagctatcttcattacttgataaattcaaaatttagattaaaaacttaaaatcattaatttgcaaaaatatttgacgggtcaccaaaacaaaataaataaatatgaggtgtatatacatgcgttttttttttaaaaaaaaaatataagaaaatttaacgatgcacttttttaaaagaatatatcgatgcacctttatctaatttgatatttaagagaactttttagtctaattttttatagttgtgtatgttgtcgttatttaagatatcttgtaaaattttaaaatatttggagaaattcaacatgccaaaaataaaattcatgcatactatttttattttgtatgtgtgtgaaataaattgtttgaacattactttaaatattctaaactattccaaattttttaaaattttacaagatataacgtacacacctaaaattctttcgaataacgaaatagataagaatcatcagtaaatcttttttaggaatgtgcatcataaaagcacctaaaaataaatacctaaatagttttgactttattaaaaaaaataataataaagttttgacttagattattaaaacaaaataaagaataataattaagcatgatgattacgaaatctcaaccccatttatgtttggattttgtagcattattattcttattacattgagatccaaattagccattggatctaacaaattttaatgcaattttacgtaatcatttttctatttttattaaacaaaaaataataagtcaaacg

SEQ ID NO: 24913 - DNA, 1726 bp, Cannabis sativa
cagttcatggtagagttagttgataccttaaatttactaatagattagtagtttggagggttttccagctaaaatttaagctgaataattaagtgcaagtaaaacgataattaagaggatttaatcgctaaaaattcaataacaattgatatatttttcttggtgaaatttgattaaatgtgctaattttaaaaactgtggacaaaagatatccatcggatcttattagatcactatcagccacatcatacttctaataattttcttaaaatgtgatgaagtaagacccatcggaccattatacctgttatttttttcattaaaagttgtacaacaagtaaatcaaaatttgctcatgtaacaaatgaaaatacaatactatatttagcagagttgatcagaacttgctagtataatacataacagtatgattactaaaaattaaaccagtatttttaacatcggtacttgcaagactttttgttgtaccctttaccactacacttgttacaagttcgttgtatcactatctctttaccattataaagagttcactttgacttaattctttcaacattttgcttctttggtcgccctactagtttcttctcaaaagacacttcaactgtcatgttctttatgtcattaggtaattctcaatcattctcgtcaccaactagcataattgtacattcatttgtgctcctataatattttattgtgcaatatggtcaacattatgtgtacatactaatactttgttgctcagcagcagcacatgcatgaggacaagaaaacttcatgatttagaacaacctgcaagtgcaagttctcctgcaagtccactacgacaccgttctcaactgatcctttaaggtggacattcaatgtataaggtccacatctgtcgacgttcaaataccgagatttctcaaactgcaatgccaagtcctccatttctagtgctagtgtcttcgtacacttgtcagctttttcttttcgcgtagcaaaccaatcttggactttgaaccccgagaattcaacacaagcagtgactgtaaagtctcttaagtccttagttgtgttgttgaagcttttagcccatttactcgtcattacattgtaatattctcctggaaagtacatctgaacccatctttcaaatctaatctcctcaagatataatgtaaccaaaacattcattgcttctatcttctttaattctctttgaaactctgttttcgaatacatataggcacaagtgtaaatatgactcgtgaatacatcagttttgaacttgtggatgacgttcatagtaatgtggtggtagcatgcaccatggtgtgcatcaaggaacatgagctgcaaagcatgaataatgttttgatgcatgtccaacacaaagcctaagttctcaacatcaccatttgcttctttcaagctcctcatataataggtccaagaatcatgattttcactgtcaattaccgcgaaagctatcaaaaaaatatggttgcctgaatctaatgtcattgtagacaacatgtgcccaccatatttagtcttcaggaaaaatccatcaacgtatacaacaggtcgacaaaacttaaattcacacctacaaggacctagcaaaaaaaaaaaaacaacaatacttgaagcaaccattctcaggcgtaaaatctataatgatacatgttgctcctaaaatcgcccaatatacgtg

SEQ ID NO: 24914 - DNA, 3360 bp, Cannabis sativa
tttaaaaaatacagaatctattttgtcatttaacaaaacagaaggtctaattagtaacttttgtaaaataaaaggtccaaaataatatttacccatctttttataataacttaattcaattcaacattttttttttcaaaaaataaattaaatatttagttatttatggggacatggcaacctccggctcccttgtctctgttattagttttctaaatttttaagggcatcacattctaattttagtgttaatttcaatgttggggattatgaattggctaaatatacattttagttaaacaataaactttattagttagaagaaactcctccttccatttagtactcttctgtaagacatgtttacaaacacaatatcttattcttaacaaaatataaatatatttaaaaattcattttagaagtgacaaagaaatatatcattttcatagaatggctgttaacatctgatttatgactataaaattatattttattctacaaaaatatgtcacactaattattacacatgtttaattactatattaatattaaagtatatattttttagtatctattatatatggaatgctaattactataaaacaatttgtatattgttatgttattatgatgggtaattaatctttattataattattttaagtagcgatctcacttaataatttactttatgattgtcacgtttgtgttaattatgcatatttatcttcatattacagttgttacacgtgcatatttgttcatactagtaatatatctgtgaattgaaagaattttaagatggggatcttaattattagatgattattaattaaccaaaactacagcctaaaattttgttttgtttttcaggtcctactagtagcagggagtgatacatcatcagtgacattagaatgggcattatctaatttggtcaaccatcctcacattctaaaaaaagcaaaacctgaaattgatgaacaaattggtgaacataaattgatagacgaaccagacctttccaaattaccatacctccaaaacatcatctctgagaccttacgtctattcccggcagctccaatgctcctacctcacttgtcatcagaagattgcactattgagggatacgacattccacgtgaaactattgtgtttattaatgtttgggctattcatagagaccctacactatggaaagaccccgaaagctttaacccagagaggtttgagagtatagaagatcaaagtaatgttaacttgcttatgccgtttggacttggaagaagatcttgccctggcaatggtatggccctacgagtaattggtttaactttaggaactttgattcagtgcttcgagtgggaaaaagttagtgatgaaaaaattgacatgactgagggaagaggtattactatgccaaaatttgtgcctctacaagtattgtgcaaagcgcgtcctatcatgaactcagttctctcacaatgattttagagaataatatacatatatatgaatatgtatatttatgtattaataaggtttagtttttattcagcaagtgtgactcgctatttaatagtgatcataaaagaataaaagaggattttgattgtcttccaaaatattacctttatcaaagtggccctatttgaatttttacattaattaagagtttattcaaaacaaattagcattattaagttatcggactcctattaaattgtgtttacattagctaacataagatgtggcaatatcacgttaatagtatgtatatttttttttaattccctaaataacaccacctttcagaacaaaaaactctaatgaaaggggatgagaataagaaatttatttatcttaaaagcttttgccaaaatcaaattttgaataaaatcaagatagataggtcatcaaacagaactaactaactgatgaagcaatgtcatatttagctaagttgtaagctacaacattaataaatctagagcaatcataaagactaacatgcttgagatttgaaagactaagaacaatatctcacaacataaccaagagaatatcatccatgaaaatattattattaatcttttgcattaggctcaaataatctagttcaaacctaaggtttataagcccaaagatacaacattgatttacgttgtttctcaaagccaaagcctcgataacctcagcctcaaatcagccagcaaaacaccaagccaccaatgccataacgacgccatatgaaaaacacgagcgaccattccaaatatataccccatttttattgtcaagggctacatcaatattaactttgatgaaatcagtaagtggcagaagccattgcaatgcagatggcactgaaacatcctagtgcaaatcagtcacccacttgaaggcataccgtgttcaaggtccccaaggaacgtgcatgcccaattaaccaccaatgtcacttgggtatccatattattttgcacctttgtattccttttgtaccaaatatgccacaaaattacaagcacacaatctctatttagttgattgataagtgatcactattaacatgaataaattgataaaaaattcatacagtcaaattcatgtcccaaagcttgaaatcacaaagtttgcaacaatcatgaagagtaggacaaccccaaagggcatgatgagttgatttcacatgggtagtacacaccagacaaaggccatttgtaataaggtcgtgtttgatcaagtttattctctttaataggaatctaactcaaggaagttttccaagaaaacatcttcactttgggaggaattttatgactccaaaactttttccaccaacccaaaaaaaatgagaggtagaagcacgatcgaaacccaactgttgaatagaggtataataaccttaattagcttcatcgagaaaaataaaccatgaatgagatcaccatcccacttttgagaatttgatttcagcatggagaccacactatcaccaccaaggtacataggagacaaagccaaggaaattgaattgagagaaatccaattatcaaaataaattgcaatattctttctatccccacctttaatatggatccagaatcaaaaagctctttaacccacaaaatatgtttccacataatgaaacctttcttagaggaagatgttaggatttaatgccctaaacaaaatccaattttgttgtaatcttaattactttcaataaagatcaagggttactgaaagtggaaggctcagtttttctgaaagacaatctcatgaattactgaaaaactcttattttagtctgagccatcactttttatttatagacaactactaggttta

SEQ ID NO: 24915 - DNA, 2984 bp, Cannabis sativa
ctctctcattttctactcgtcaccaccataaaccctaaccctaatttttgagccaaaaaatgggacgagtgattagggcacaacgtaagggtgcggcgggctcggtgttcaagtcccacacgcaccaccgcaagggtccagctaaatttagatccctagactttggtgagcgcaacggttacctgaaaggggtggtgaatgacatcatccacgacccgggacgtggggccccgttggctcgtgtgacatttcgccacccctttcggtacaagcaccaaaaggagcttttcatagctgcagaagggttgtatagtggacaattcatctattgtggtaagaaagcaaatcttgtggttggtaatgtacttcctctaatgtctcttcctgaaggaactgtcgtttgtaatgtcgaacgacatgtcggtgatcgtggcgctcttgctagggcttctggtgattatgctgtcgttatttctcataaccctgataatggcactaccaggtttttattttatatctatattcatggacatgatttttagtatatataattgtttgatatttatatctatatatagtatattgatcgattataagaagtttcttttgtatatttaattatgtttcgattttgatatttgtggtatatgtaaatcaattgtttttttgacattttttggttgatgagatctggtcatatatatatatatataattttgatattaggttaattcctttgatgtagttcaagcttcgattttgatataattgacagtagtgatctaataatatgatatatatatatatatttatatatatatggttttcttttctaatttgatgatatttttcgaattgatgatcattaatagaatttttctgacttctggtttatatttttctaattgatgatcattaatatattttaaaaattaataaaatttggtttttattataaaaggtaagtttataaatgtctgcctaaaattaacatatttgtcatatatacataaattcataattattcttgcattgagatatgatttagaagatcttaattgtgatatgatatatcatttgcattaattgtttttgtaatttgagaattaattatcaatcttattcattaatttgttatatatattgatatttcatgtagagttaagcttccatctggtgccaagaaggttttgccaagtggatgccgggctatgatcggtcaagttgcgggtggaggaaggaccgagaagccgttgttaaaggcgggaaatgcataccacaagtacaaagccaagaggaattcttggccgattgttcggggtgttgctatgaatccagtagagcatcctcatggtggcggtaaccaccagcatattggtcatgctagtaccgtcgccagagatgctgtaccgggtcaaaaggttggtctaactgcggccagaaggactggccgccttagaggaacagatgcagcaacttccaaaggcgacaattaaatttgagaaaaaaataaactgtttttttttttgtttttcaaaatttgatgaacattttcttgtttgacttcaattgttgtttttattgttctacttggaattgatgttttgataatttctggaattatgattaataatttggttctatatttttgaatctttttaatcatgtgttttctcttttttttttttttttattttaatgaaaaaacgtaagaggtatatcataaatatatatataaatatagtaattttattattttcaagaaattgctacatttaattacatttgataaaataaagaggttttttaaaatagttttttctttttttttttgtatttttacgtaaaaattactttagcaactaatggaatttaaattgtagtcaaaattcatataaaaacgcacataaaaactatcaacagatctacaaaattaacaactttgagcatattatagactctataaaaaaaaaaaaaaaaccaaagcctcagcctcagccaccttaggcgcaaaacaacaatctaaacgccaatttttcaaagcaaacactttaactcgtctttttattggccaggccggtcgcaccgaaaactaattaacatcttatttaaaacacgacccaaggtattcattgagggaagaattgaatatgatggattgtgtagagattgtaaaaaatgtaaaatacatactaaacaacttctatagacacatcaaatccatccatatatactttctatttccacacttatatattataactcttaattacaaccttctattataactcttaatttacagtattgaaaatagaatttttgatattaattctagtttactacgtgtgtttaaaaaactttaaacctatttttggcactataaattattcaaaaaattttaaacatttacaggaatgtcgtaactataattttgtgttattaaatattctcttaacatatacaagaggcaaaagaattttcgagggagaattttctcaagtctcattttgagaggaagtaaacacataccaagaattgaaaggatttaatttctcggtgtcttccagatttcaaatcggtgaagtattttacaaaaagcttacgaaaaaggttttagagtaatccaaactatttgtatatattttttgtggtgaatcacaattcacctcattcaagaacatacacaacaaagaacaattaatatataaaaccagaactgaaaatgtgagttcaaaaaccagcaatgaatctttcaaccaagcatgaactatgagcaatcaatggtaataaactggaaacaaaaaattggcacattttctttaacgaggttcgaacatagatcaatgcaatctatgcctacatccgcgagaaacaatcagcatactttctttattgatgaatcaaagttgaatacaaagtgtttgatcttacaccaggaagatcgattacaaaggagtcaagctcctgaccctcccaaacactca

SEQ ID NO: 24916 - DNA, 3405 bp, Cannabis sativa
ccttaaagcctggtatgtgctctccctcattctctctttattttttattttatagtttagtatattataaatatagctagtagtagttgttatggtttttttattctaaagtctagtagtgtttgtttgatatgttactgtattattcagcttgggtgggctattttgctgctgtttactggagcagtgttgcgtgtagtaatgatctgctcattaaattatcaatgaataagaattgtactatttgttatcttctctataattaactatatataattactacagttgacatttttgttctgtcacattcttaaatttgggtttgctagccattgctattatataataacattttgttgtctaatgtatttactgtcagaaaatgaaatgttttcttgggtttttgctactgaaattgctttaatttactagatcttccatcatcattattcttatcaactgcggatcaaaattatttattgttacagttttttaattttttagatgaattaaatttattaactactttctttttcaacacaatccaattagctaagacttgatattactaatgtatatatagaatgtttaaggagagttgagatcgtgatgatccttccaatttcactgaaactgctcttctacatattttttaaaacgacatcaatggcaaacaacaataaactaattaaaatttttactttttatatgtaataaattatgttccttaattttattgatcattgaaaataccccatgaactatccgttgtgtgtcaacatagtagaaaatacacgaacaactatgacaacaactcatacaatccttttattaacaacaattgttttcttttaaacaaatcaatacaactatttgagaagggaaaaggaacgaaaatgacaagaaaagatcaaccactaaacaacatggactactgtgagcaatattttaacattctggactacacacaactgatagttgtggatatagtagaacaactaaataataacaacaataaaaaaacttgagaacaacagcgatgaattagcccttgttattaacaacccgcgataagaaaaacaatcaaagttggacaggtgtataaagataagaaaacattgaagaatgctctcagctacctagctgtaataaaatattttcaattcaaggtgtgcagatcatgcgccaactagtattgcattgtctatttggatgaggattgcaagtggttagtgaaagcaagcaacaataggaagattgcgaatttcgtgatgaaaaaatatactaaaaatcacacttgcaccctacacatcatatatgaagatccaaggcaagtaacatctaagctaatagagagtgcatcaaatataaatttatcaacatcaaaacagaagcaacacatatcattagaattgagtgaaaaacataggataaagatgaattacatgaaaatatgaataagctctaaatgatttgagaggtaaagcaaaagaaaatacacgtattttaggatctcaatatttccaaaactaagcaacataaaaatagtttttaagaaaataaagatgttaaaacataaactcaaaaaaatagttgttccaatgtagttgctaagtaatcctgcacatcataactcagttaagaatcaatcttcaacctgcaccacttgatctttggaaacaacgacctttttctttggagacttctacagtgtttcagactcagtaaccacaccatcatcaattttcatcatcccatacatgtaaaaagaacaacaagcctaaacttaagatctttaagaaaaagcttttggggtatctcctttctatcaatgaaaaactcaactaaagatgcagcaaatactccacagtcactgaagataaacaatcaaacaacaacataaacttgaaacaataattgagtactttaatagtaaacaacattataaaaagcaaaaacaattaaacttactttccagcttgttcaggcaaatcatccaccttaacaattggaaaatgagcttttaaatcagcaccagcttgtggagaatatgtcattgagctataaactaaatatgcctccattgcctttaatgctatagcttcaaatctggcactcttcaatgaaatttacatgtaaataaccctctccctcatggctaagcaagttataatctaatgactcatctctttcatattaacaataaacaacatgatctacccaagaccatttcctagaggagcaaagccttttaccctcttataaattaggcaatagaatgcctaaaattaatcattgactctttcttttgatgcttaagaaacttggcatacattatttcaatgctctaaccaaagtaacaatctgtagtggtaaattgtactctagcctcagctgcatatttacctttcttttgattgtagtgaaaaatggtgttcatgtgctgcataacatgtatgacaaaaaatatatatactcaacaacagtaaaacaaccaaattaaaccatataaaaaacaagataaattctcaaaaagaaaatatattataattttaaaaatgaaatagcattcgaacaacataataaaaatatgtaaatagaaaacttacagagttatccaagaattcaccaatatggagaagtttgtaaaacaacaatttgtcattaatttcacaaacaccaaactccaatgcaggattgaaaatattcataccctcgtcatatacaaggtttcctctaaataatgaataaataaaaaaatgagtaagatatttaaacaattgaaataatttattaaacacaactaacaaaaatttaatataccttggaactgacacttggccatcacctaaccaactatcaaactcaacaaaaagagtttcatccacatgattaccaatgtatggacataatatatgaatatatttcatagttttagaacttgttacagtagccaacgaccctacagaactaaaatcctgattgaaaggagactagaaatattccatttttggttcctctattctttaacagctgtaccatgaatttccctgttggattttttgtttggctcttcttgaacaacattaagatactcactacgtgcagtagagccatgaataatatcacttgcacataacagaaaaatatagcaaattacttaatagagtagtaaataatacaacatcgaataagaacactcacttacaattatgcgaatactcgcttaaaatagcgagtactcaaagtttagactacgaaatagacaaaaataagaacagaaaaataaaaaagacaaataagtatagtggttcagtgagagctcagtttacttaatctacttttgcagtagtttcagccgtagtattgagaaatgaagaaaacaggaaaagtttgtatttcatt

SEQ ID NO: 24917 - DNA, 1917 bp, Cannabis sativa
  modified_base (757)..(762): a, c, t, g, unknown or other
  modified_base (863)..(868): a, c, t, g, unknown or other
aaacaaagagtgaaaactaaccgaaaatacgaccctgaaacttagactaattttagcctaacaataagcaaagtgcaacttatttcaaaagactaagtctaagagctaccctagaaaggctatagtgagaataaacatcttaactagcatctcgtaaaatgcgactagctatccttgaacaccgttgagagatgcgagccatacttagaacgtgttacctcaacaacaaaagactacttccatataagatcaaaagacgattatcagcagttatttcattttacccacatattgtatatatgaaacatgtagatcgtttacatttcatgagcagttacctagataagatcaaaatgaataattgccataagaaaaaccctacaaacggagcgtgttgagcatctaaaacttaaaaattttcactcattgtgtcttacaactccaaaattcatgctaaatccataaaatttatcttatttagcatgttttttttcatttcaaccatatgacgtactcaaccattaaaacttaaaacaagaagaaaataagtgtaaacttgaacaataacaaataggctaattagaatttttgccccctgaactttgacatgtaccaaatcatgtccattgaacttttaatgtcatcaaaaatgcccctcaactattgagattgttggatttaaggactttttttcaattttagtaaaaaagtctaatatggatgaaagtttatgaggcataatttagtacatgtcaannnnnnaggggcatgatttggtagatatcaaagtctgtggagcatagtttagtacataaacaatcgctgaaatagtaaaattaaataaaattagacaaaagtccttnnnnnnaacaatctcaatagtttatgaggcatttttaacgaccttaaaagttcagggggcatgatttggttcatgtcaaagttcatggggcggaaatcctaattagcctaacaaataaaaactactaaaaatacccttaaaatagaatttaaagcacacaaaaataaacttaacatttatgtcgcgtacaaagttgaaattttgaatacttaatgcaattattttcctggtatctgtgtttctggaaggaggacacatgtcatatccaaatcagagataatcaattgaagcccaatcacaggcctaattggagtaacaagctggatccacgcgaagggacgggctgcaagtccatttggaatacagaccgcctacattccaatttggacctccttagtcccgtgaaagcatcactcgcagaaaagaagaattaacagagaccctccggatgagccatagggatacttacagaggggcattccaagagacgtcccgaaagccaaagctgatgtggcgatcctctgacattgaattccacaatgtgagggctttatcccttgcgtgagtccataaagagtgcgcacacaaccaaatggagcatacacgaccactactctgacagctatagtacgcagatgcaacacacacatgtcacctgtcgacatccagtggccccccttcgcacagaagataacaaccccacggattgggcctcagtctatgaccccaaagtcaatgtatttaccccattagtgagtcacgtttacacgtaaattgtagtgggtctcgggtatatccatacccggatcctgacctataaatgccaaattataccttcatgtaaagggggagaaattcaagactcaaatactatagcaaaaagctaggattcttaagcttgtcaagaacattgattaatatttcaaggctatttagcctaatgcaattgactcgtggaataacgttcatcaatactcgaaccacgtaaatatctccatcttcatctcatttatttgattctgttgctcctaaaatcgcccaatatacgtggacca

SEQ ID NO: 24918 - DNA, 1807 bp, Cannabis sativa
tttgacaatttattttaatatattcattaaaattactaacttagaaataaaagaattataaaattaattttatacccaatgtataaattttaatctgtattaataaaaattactaactatggtagttctgaaaataaataaattatttttcaaccttaggtataaaatttaaaattaaataaattactataaaaattacttaatttatgtaggtctgaaattaataaactagtttccaacccaaataaaataattactttagtatcttaaatattaattactaaaattaattttcaatacttatgcattaattttctatcaaaataaattcttgaaaaattaataacttaagtagatttaaaattaattaaaaaattgtaggttgttgttgctggcagttcgtagctttggtttgtaattggttttgtttgattaatgaagtttttccttcgtgataaaaaaaaataattaaaaaattaactattaacttaagtattatttttgtatatttttattttaatctataatattaatatatttatttaatttaaaaatactaatttagataaatataaattttaatttaatatttataaattaaaatttaggtttatctgaaaatatataaaatttatttttcatcctgtaataattttcaataaatattatgaaattacttaatttaagttagtccaaagttaattaagaaattgctcttcaacttaaatttaattctctataaatatattaattaattttcataatttcaatataataattaaaaatatatataaattataaaaaaatctatgaaataaaataaattctaaaaattattctaatttatgttggtctaaaatttattttcaatgataatatttttcatttaattaaatatcaaaaattatctaatatttaagtatcttgaattttaaagaaaaatttaacttgattattaaattttattcatttaaatacttagaaaaataccaactagtttacttagaaaataattatcttgaattatttcttaaactatgtgtatgtttctctaaattaatttaaaaataatttaatgaaaaattaattttaaatattattagaattaatgatgttgctaatcaatttttatgaggttaaacttatataattagtcatatacaattatttaaacaatgcaaatgggcttttacaattgagtttgttcatgtgagggagggctaggttcagtatgtcgtaaccactactatgaccccctaactcttacacaaggcccaaaagagagcaatttaacctttatttaaataactattattcattgaataggcccaattctaattgggcctagataatctatcaatatgatccaatttaattagcaacctagtccattttaattattaaaattaaatgggtctatatatatctaagtccaataatcaaacataaggtcacatataacaataaaatttggatatacttagcatgtttctatgttatgccacagatgaaggaaaaattacaaatatacatatttgcttcaaatgatttaacttatctatcatcaagtgtctatgattaatttagatcattggatcacatctatttagataaaattaaataatagatattttttaaaagaaataattaattataaacaattcaaataaaactactgatagcaaagaggtgggaaaataggataattatacaatttgattttttttattaaaatataattttttaaatttgattataaataaccaaatatctaatgttggttatatatgtaattttcaaatttatg

SEQ ID NO: 24919 - DNA, 2911 bp, Cannabis sativa
  modified_base (65)..(69): a, c, t, g, unknown or other
gtataataaattatttaaatggctataaataattttataattaatcatgattaactgctaatttnnnnnttaaactaagcggtctttacaggtccccaccgaattcatcaccactacaatcactaccatacagcagcctgcatggtgacaagttgggaacccaaacgtatgatagaaacaaaaagggtccatatattcttttaaaaggcaaagtaaaagaaacgtatgcgatgggccaaaaaaaagtaagcaaaagaactattagacactctaagaattttcctacaaaactttcataaccatggaacactcaaacctcaaatatgtattttagtttgggcctaaaagaaaatatctctctaaaaaccctaaagccaaaaatgctcacctatggactcagccagcaagtcttagacacaactaaccctaatccctaaaattatgttctacgcatgcaaaatgatcaattcccccaaacatgagggctacatttcgatcgaacatagaaaaaatagtttgaaagaagcggaatacttacttgtactacgaggaaagagttaggggtggtgatgatgctctgggaatccgctgcttgcatgacgacgatggtcttcctagttttgattattgattggttcagggtgacagtgggcgtcaattgaatacactggcagagttaggaggaagaaggttgattttagagcagaaatgtatgagagggttaaggctttctaaatcagaagttcgtgcaaaaaagaaagggttctctctggttaaaaaatgattaatgaagtgaacaaaatggcttcaatcgtcaacaaccccatttatatgggtggcatcggcttgaaagattttgaaattcacagtcctaatccattggattgaaaactagatcatttaacggttggggatatgaaaggttcatatttaatacatttgaaaaaagacaataatgtatttattattcatcatttcacaacggcatccccaatgccctgaggacaatcgtcttttcaaaaagcagtcatcattcaccttcccaagggatgcgcctaaggtaaagagtgtggacctcaaagctccactaaccaagcctcatgcttcagccaatccttcgggatatcaccgagaatatttattacggacactccattcagttttctgttaacctgtttgcatgacaaaaatactggaccaaccttcaggggaagatagaaagctcctgacactcttaagttccaagagcttgggaggtaaatgttatccctattcccggataggtctacgtggaagtagaaaaagagtgccacgtctgatcgtataggaatatcctgaattccccttccttttaaaatcggatcaaggaaggcatcaaagtatctgggagagtgcatccattgtgaaggaggaattgatccttaaagttgtaacataatgcttctggtattcagaggcatacgcaaggcacgggacctctgaggggctcttaagaatgggctattctaggaggtctcgagttgcacttcctggaagtcccatgtaacctaacccagagatacactcgatagttacacctcatctaacaccaagtcagatcttatcccctacgtcagaccgtggttatgcgcgtatgtgcctctgtagtgcttattgtccaatggcttgtctaggatatttcttttaaaggagaaacctttgaacaacacgtgtccatatccttacgtgacagcctgcaacgattatgcaccttacgatgggagagttacctaccaaatcaatggatggatggtcttgtagtgtttaacagtctcacttgcgtgatgagtaaggaaccctagtggggtaagagggtatgccctcgcccatctacgggcctataaatacctcaactttttatgtacagagggtgaacaatttttacttacaaaaactctgctgaaatttctagtgaaatttcttcttagataaaaacaaaaggaatacagagattactattgcaaacacttgtatactcaaatatttatcaaagaaagataatactactgacttgtggactaaggatcattaattccagaaccacataaaaatatgtttgtttattatttaatatgttgcatttccttaagctcttattaatcagttttcaaaaatctcggtaaacactaactaacattgaagatgcagctagcaatcttttgcaggattacaaaactgctcaatcaacactgtaggcaagagattggcaaccaacagaaatgtagacccaacctcgagaaatacctcaacaacactcattacaagcagccctaatatactccagaggcaatatgaattaaacgaggatgatgccttagacaaccaaaggaagtgcacaggtttaggggtgatagttactcattggaaaggaagcacagtatagcaggtttctcctctcccatggtgggccatgcatcacctctttatggcgaagcccatgccttgttctatgctctcagatggtgctccgcaatcacgataccaattgtactcataaagacagactatctccagcttaccttgaagattaaacacacatggaaagatcgctcatcggcctctgaattcatttccaagatcatagactctttatcatcctttcctaatgtatctctttatcatgttccaagaacctgcaatactttagctcacaatatggcaagagatgcattaagacaagatagggagttagtttggagagcatagctccccgttcacagttgcaattgtaaccttgttctcagtcttgcctctagttacaattacttttcaaaaagaaaaaaatacctaatatacattattcacataataataatatatattatcatattttaatcaatatattatagggtgcttctacaacacaccccat

SEQ ID NO: 24920 - DNA, 1328 bp, Cannabis sativa
ttttttttactaaagttggataaaattccttgaaactaacaatctcaatagtttaaaaagttcaaggggcatgatttggtacaaatttcaaaatttggaagtaaaatattaattagcctacgtacaattgcatcttttctttctttctaatgaagtcaacaaagttgcgttcggtgctaataaaaacgatccaattttcaaacaatggcgcgcactaagctccttggttccaaatataccactaatgaaccaaaagaaaaaaaaaagaagaagagtacgaaactgatgctttgttgtcagaaacaatcgacagatgaccaaagcatttaaatgatcaaatttttgctacggttgaacccatgagaaaaaaaattatatggtcatgtataacctatgatcaataagatttcaaatgtcgcttgttttaagtacaacactttgtgagacagggttgccaaaccaatggagtagtgtctgttgtaggaagaggaatgaaatgaaagtggactttccgtcctttcaaatgaagataaatcactcccgagttaggtgatgatcttgactagtgttttgagtttcatgacagaaagaaaataaaaagaaacagagaagagaaaagaggcaaaaattttgctctgtattcactctatattcagtgctcaaattggtacagtaataatgatgtgtatatagtacaatgagagggtacaaccctaaaaataaaatattccttattgctattatgctgacaagtgttttaggattttcacgaagaatgttcctaattttagaattctcttgggatacctgtccaaaagaatcagtaatacaatttaatatgctccctcaagcttggctggtataataacaacaacaagattgtccttgtaataatgaaattgatttgttgagatggctttagtgaacacatcagttgtttgctcagttgttggaatgtgtctctcttcaatcgggttctgtttaattaagtctcaaatgtaatggatattcacctctatgtgcttggttcggttgtgaaaatggggttggaagagagttgtttagcacctgcattttcgcaccaaattacaactggtattttgtgatttaagccaatttctttgaacagttcatgaagccaggccgcttcagtggctgtttgagatagtgccctgtattcagcttcggtggaggaccttgctactaccttttgttttttgaacatcaggtaattaagtttcctcctaagttaacatagtatccagttttgtcattgttgctccagaattcgcccactatacgtggaccagtcgagaggggacacgtgg

SEQ ID NO: 24921 - DNA, 2090 bp, Cannabis sativa
tatccaatctcatacggagtaggctggtaaagaacaaacatcactaaaaggtacttgataccttttggggtgatttgtgttggacacgtcccgaagtaagcagctatatctctgaaatatgggtgcaaaggcagcactgccccctgctggatgtggcgctccaaccatgccatccaatttagtaccagccagtgcgctcattgctccctctaaggcacctcacattggatgcctctcactagtccactctccagtatcctatcgaaagcctcgacaatgataatagatggaggagaaaccctctagtctccctgtgacccggcatcaagaacttgaggctccgaagactgtaccaagacatggtctacacctatcaccgagggctgacatagcctattcaatggcttcctgtcatcattgcacgagcctaaagggttgttggagaaaacaacacaagtcctatacatcctcctcctagcaggcgcagcctcttctacctcaaacatgttgtttggaatctcagcacccatgtcaaccacaggcacctctgcctggctaatctctagatctttaccatcaagaggttgtgtggcctcgtccactatgccaaccatacccattgttgccaccctggcaacgtggggattaaatggtggtgcactatagtacgactgcttagttctggccatagtgtatcactgtcagtacaaagatcactcagaaagttgctacaggatagactagatgatacctcacaaaagtaagactaactagacctattacaaaggggttgtcacctcccacgaccaacactcaatatcacctgcatagaagagacaaggggaggtgaacaacctgacaaagctacaaggtacacacaaagttttggccaatcgtaccgaaggatacttgccagataaattacattgtacaaggttgggtattagcgaagtaccatttaaaatatacctacttagacaaatggtgagtcaagttgtgagttcgactatattggactcactatcaagtcttatacaaagttctaaagtgaaccacatatgagattacagtggtatatgcctacaaggtcgtcacaaaccccttgccgaggtcaaaagaggacaaaaacttggctgcccgcttggaaccttggccttggttggctagggttcccaagcttagagagggtcggccaggtcccatgacctagctaagggttggccaaggaccatatgcccaggcattggctgactagcttttggggacccccttatggccgaccagctaccatgagaaatacctatggctggccaagtcttgaacaagacccccatggccggccagggtgtacataggatctaaatgtgtgcttttcaagaaatcaaacacgtttttcatgttcttcatgactcaagaatcacaacaaaggtcaaaatcagatcttttttgtcaagaaatgacaaattatacatcctaagactatcatgcacattaaaatacaaaaaagattacaatctaatgtgggaataaaaaaatattcaaagcgaagaaaagcttcatgcaaccttggaaaaataaactcaaacaagtgaatagcaggattggaaagcttacccactactagaaacctttggtgaagaggatgggaagcttggatcatcaaaatggcgcaaaaatctcaagagttgaagcaaccaactggttgtcgtcaaggcaaatctccatgtcttgtaggcggcgagagcgtctaggaattttcaatcgatggggtgtaaagaaacgacttggattaagcttgtcattctcgcagacggtgccaaactgttgacagtgagaactcatcaactaacttatggccagaaaaccaacttgagctttaggttcagagatgagatggagaaaaagatgaaacacaaacccaggttggtatcttgaaatggagagaataatggagaattttctattgcttttgatatggttttacaagtatgattttccaatcccattcacactgagattaggggtatttatacgctctaattgttgggttttatgccctaaataaaaatctttacaatctgattagttat

SEQ ID NO: 24922 - DNA, 5792 bp, Cannabis sativa
aaaaaaaaaaaaaaaaaaaagcggtttgaatttgagtttcatcatctcaaattattcagtagaattacaacttattcataccgatcaagagtccttcccacatcatccaatttaatgaacaccttccactcatcagtctccaaaccatgaacctcattaggcttcggtttttttttttttctcgttaagttaaacggaatgaaaataagttagagaaaaatgtatgcactagcacaataaattctttttgataacttttatataataggtaaaaatatatcatatatatagatttcttaaaattgttttgtgaaaaccttaattttaaattaaaggttacaataaatagaaaaaattcaccccagttgtacaaaattttatttactagattatagcaaaaagaatgttattgggataaatctcatttttacctttcaattatatataatcatggtaacatgtattgttgcctacaaaattttaatttaatttcacactttgcactgagtgtaagtttaacgtagcagcacttgttttatgttctctatcttattaatttgtattacttataaatcgttgactggcaagaaaattgttctaattgatatgttgaagtagataaattaatcggtaggcacaaattttttattatgaggtatggaaattataacaaatatgtccttgttatttattccaattgggtttaaaattaaatatcaagccccaagcaaaaatataattaaaaatataacaaccatagaatttgagtcaacaatttgtatatgctccacaccaaccctacatatccgtttaacactctttttaagctgtaaagttgtttttattgttataataataataataataataatatcagagattttttaggaactaaaaccacttttatagtaacaactttttaaactcaaacttccaatagtactagtctcttctttatttaaagagtcattctactataaatagactccttagttataatatcaaaactactaagcttattgatatttctcttgaaacagattttaataactactgaaaaaaaaaaaaatgaagcttgttggagttctgctacttatttcagtgtgtttgagcccttgtttccttcagttgacaatggccgatgatctaagtccaagtcctagtccaagtccaactccaactcccatggtttttccaagtaagaatgattattaaagtcatatatttagtttatagaataaagaaattaataaattaagtatgtatgtgtgtatgtgtgtataggtatttgcgatgcaaagtgtgagattcggtgtggaaaggcaggaaggaaggatcgatgcttgaagtattgtggaatatgttgcaaagcatgcaagtgtgtcccatctgggacttatggtaacaagtcagaatgtccttgctaccgtgacaagttgagctctaagggcactcctaagtgcccttaatgttatcatcacatatattatgccctctcatttattgcctttttttttttatgtattaatgaatttggaaagtatatcatcacattatttccaatttatacaatttgaattcttatgtttcattgatttatgatcaactactatgattctaaactccacctctattcaaccaaataaacagtaacataaataataataaaaatagaggtaacgttttaaaaaaaaaaaaataggtatttatttatttaatgagttaaaaaaatcaggtagcttgggtgacattattttgcaaattttattttatggaaacttgaatgggctttttgttgtatatttgatcttttgacattaaatttggagaaatactaaatggcacaatacatcacaagggaatgactcttacgcatgattttaataataaagtaaagaaaaaaaaatcaatcggcatgttaatctcaattaaagcgaaccaaaaaattaggattgttgttagggaattgttagttgtatacctaataaaaacaaaaatatcagtgtatttttaggagtgtatttttaaattaaaacctttgattttttttcttttttaaaatttttctttttttatccaataaaaaaaaaattattcatgccctatttttgtgatatttttttttttttcaaaatgacattcaagttattgattggcatttacataataaaagttcaggatcaaaaggaaatataattattaattgtgacaatagtatttaaaaattcaatgtattttaattaagaaaaaccactcatgacaaaacttataaatactttagtagcccaatagcaatactcattaatagataaagcactaagcactacttcgttaagtcacacaataataaattaatcacttgtctcatgaacaaatctcaataggaattctttttaattgaaaaaaaaaaggtcatacaaggtacaagatttacttcccacattcattcatatataataaagtattttacaagacaatcaaatcagtcataaataacttttttttcctttctcttaacaaatcatgtaaattacacaaaataagaccttccatatggcttatttgaacagtcaaatgtacacacacagttttatggaacttgagtcaaaacctctggttacaccaaggaccgttgaagaagaagaagaaaaaaaaaacaaaaaaatcaacctctccctgcattaccatgtcgattgtttctaaagtagcttagaagtgcctgcgcctgttagcaacaaaaaggggtaaaaaaaataagtaaatatattggccataaaatgtcatacaaaactaatgattgtgtaatgcctgcctgccaaccttcaccttatatagtatatatatgcgtagtgaatacaaatattatgaggagcagcataccttttctttggcccttggagtgccagactgtgacaatgccaccaaaggcggaactgctccttcttgcagtaccatgttacaaaaccgactgctatttgtgcagagttgtaatagagcagctgctgcattctccttccctctagcagagcccagctcaacaacctcaaccaaaacagggatcccaccttcctgaccgattgcggtccttccttcggggattgtcgcgagatttgccaaaacagcaactgctttgtccaccatgccagctgctggatccatcagctcaactaggtacttcacagcaccagcttgaacaatccgagccttgttctcatgaaatattgacaaattgaataaagctgtggctgcgtctttctttcctctgggagttccattccccaataaatcaaccaaaggcttaatagctccagaccttccaatcctaaccttgttatcctcgatcactgaaagactaaacagagtggcagctgagttctcctttgcctcggggctcccagtttctaggacataaatcaaaggttcaatcgcattggcaccagcaattgcagttttgttgttgtcattgattgacaaattcagaagtgctgtaacagcattttcctgaattttggcatctgtcgaacggagcaactcaaccaacaagacaatggcaccacaacttgcaataacaattctattgtccatattatttctggcaagtagccgaagttcagctgttgcatctctttgagtatcaattgaattgctttgtagatcctcaacaagcttcttaacttgagcttcaaggccagagagatcaggccttgtttcaacagcagcagaagtaactattcttggtgcaaacctctcagacggccgacgccatattgtttggcttctagatctcactggaagctgaggagcagcctgttgctctctgttcacatccccagaagcatcactgctgtagcctgtcatattagttgaatcatgtagagtctcactagcatcgcctggtctttcttgagaaaaattggaattagaaattgtgctggaagctgacacagttctactatgtctctgggatggctctccagctccaactgaatcacataattcttttctagatggcgaaggagaaggtgggccaactgaatctgggctcttttcttctgagttactggacctgtcctcagaactagtcagtgacattcttgaaatatctaaaacctgcccatttgcagtgatactagacaaggaaccttctgatgtagatcggggatgcaatggagaacttccttctcgattatttataccagatgagcttacgttcccactaggtgatcccgcaggtcgagttaactcaggtgacattggttggttggcccttggatgcggaaaaacatgtgtttctttggttgaaccagactctgcatgccccagaagatgtgatggttgatttaaacccatagatcttacgggatcaggcagcttaacatgattagactcgcaccaatttactattagagccttcacagtatagttggttatcaaattggtgtgagctagagtttgcctggtcttaggacaaactgttagaccaagatcaatccaattcttaataaaagcccgctcataggtttgccctgatgccacaatcacaggatctgtcattagctcaagtgagagaggacaacagaaatcaggaggtattggaactgggctgcagctctgagactgctttattgtaattagtcgctcatgcatgcgggttacaagagcaatcatctgatcaataaactcgacttcgtcagtcttttcagattgctcagcattctccttcaacttttcaagtgctacagcctcaataagaatatcttggtttgacctcaagctaaggctctccgcaatcttaactaggatctctgagctggatccaccattctccacttgatcctttatagcttcttttaaaaacttttgacatttgttcatttcccatatgcctcattttctgtatgcagggctgcaatcaaaatcatccattagacattataattataattataatcatcccatatgcctcattttctgtattagacattataattataggagattggtccacactttgaaacttgattgttcactgtatatgctaaaaataacttttttaacatccctatatatttatatatatatatgagagagagagggatcacttgtcttagactgaccccgtagttggacaatcaaacagaaggaattttcatcttagtgtaacaaaaaaggaaccaaggcagagaaattatgcactagccataccatgttaagatattcaaatttaaataatgcaaataacagctagtctgctacctcaagagacgttgaatcaatttcatccgggagaccttgatgagaagacttcagcagctggaagatgtccaagccagacgtgcgaatcttcaatattagcgaatcaatttgtagtacctaaataatcatttaaaagagaaaatggtcattaaatgtaggttgagactttgaacaaactgcagctgtctccatttctacaagtatagcagctgaaacagcatatagtgattgcatgcaactgataaaatgctacagagaaagaactacaaaccaaattgacagtttgacactataattcagtcaagttctttattcctaaagcagtgcttcctaatttaaaaccctgagaaaatgtaaagttatacagtcactaagagaacagtattgaaaatccacactattatagtgcaatgatttctctacaactactactttcagtgccacaaacaaccttcactttgatattaccaaaatttcttcttagctattggcaccaccactatgccgtgtccatcatctatctagtaaaatgagaa

SEQ ID NO: 24923 - DNA, 2737 bp, Cannabis sativa
atatggattaattcaagctatgggattaaaacaaaaacatggacactcaaatggaattgatggaatcttcatcgctgccttccttgtcgctactgctgctactgcttgcactactgctactacttccacttccgctgctgctactcgaagaggaagtctgttcgtctctaccctctgcagtaacttgagcttttagtgcttctgcagcatttggacctttgtcgacttcatcaccactatcgtcaacatcagcaatctcatcatccgtgtcattttgtcgtggtacattcatatcaaaccctgctgcgttagatttatcttctgcaacagcagtatcatctccatcttcggctacaggtgatgtagaaccaaaaatgtcttccatgtctatctcatgatgttcatctacttccacgttcttgggttcgggtgatacagcagatatgtttggtggttcagatacgtttggcggttcagaggtataatcagcaacagtccccttactggcagattttgcactcactgcataatgaatcaacgttatgatatcgaagactttacgaaaatcaaatttatcccatcacgaaggaaaggaagaaaaaaatccacttgaaacatcaaaatataagaaattacatataccagcattctccggtccaccaatatcaattcgctccacctcaacctgtacaaaagatgtaaaatatagggttaaacctcacatggttagagcatatatcaaaagaaacatactagacaatcattgaagttgatacatggctgactttacataggttcaaacacataaattacaactttgtgtacatgaaatgaaagaatacatacaatttgaagcggttaaatgtacttgggaaaatttcttattcacaaaaaactttcttacagagctgaatgaagttaagaatagcaagtctgtaaggaaaggtcttaattttggccaaaacttggagtttttatgaataagcagtccaaacataatcctcataagactaatacatcagcagttaggaagttggattggcaaatttttaaatccaaagtcaaatttcttcagggcttaatggaccatacatacactagtttgtaaatgtcacagctaaacattaacatccatggcctaactacacaccatatgaatgtaccaacataagaagattgactatctactcatgatggagtgtttatgagtctatgtctcttacattaacaaagttgggttcaacaatatagctggtttaaggttcaaatgtagtctttttggggatcattcattctctctaattttaattgttatgtatcaagttatcaacccaaatcaacatatatcatcctatgagaaaaaagtgagagcctcacattgaaaatgccatgaaattaacatgaaaatgaaataggaactaaccggcactgcagggtatgagcttctaccaacatgaatagtcttctgagcctttgcaactggagataatcgaggctctatcactgcagcaacagcagcagcagcagcagcgttcgattcaccaggctgtcgaacgtgccggagttgtttgacgccccgatgaagtctctccaagcgaaaagtctccccatcaaagaacaatacagcatcgctctccttgtaatcctcactttttccctcgaatgccactttaggttttcccaattgattgttctggaattctacactaaccctattttcctttgttttgtgtaaggacccaggcttgctcttatcaatagaagccggcttaaactcatctgaataaacattaacgaaaaaattacaatcaacaaatcgtgacagcaatcttactgaactactttcttttcagtaaaggtacttacatcgtaaagtgcaatacttggaggaatcatccttgaatgaagagcctagagacaggttgtaccatctatcgggttgaggagcagtctttggctcttccttggagatgttcgccattactacttttaaaataatagagtaaggagcctaaatgcaagctacggtgagcggtgactggggcaaccggtgcatgacataaagatgggattggtggcgggtggtgaaggtggcagtagtacagcaaaggatccactgggttcacacaactaagttcgtgtatattagggttttgacactgaaaaaggattgagtgaagctttaagttgagtgcaaactcagaacctggtttaaagaacatatcagattaacaaacacgaagaaaaattccaaattcaaacccagaacttcaatccacaacaaactgaaaagtgtaaaagagcacttggggtccctaatttatgctagttgaatcacctaaggccccaatttaaattttggagcacacagatccccatattctaaaaattgtaacaagttaactctacaatttttaggaactgattaagtgtacttaatggtaacagaaaaaagaaaagaaagggctcaatgaccaggttatcaggaaacagatttctcaatgcacaatacatagacaatataaaaaacaacataaagtcaatataaagccattacataggcaatacatagaagggacataatatgtttcataacatatatacatacaaagtgcctccaaaaccagaaaccaccaacttcattagcaactcaatcaaatacttggacataattggctcaaaatccggcctaaacaaaacaagagacaatcctttccaaagcctactttcacattct

SEQ ID NO: 24924 - DNA, 3514 bp, Cannabis sativa
tgcattggtgccttttagttttagtgtttatcatttctgtgtcgaagattgcaaatttaattacttttggttctctcccaaagctaagaaagcaaagtatcagctaccatcatttttaatatttcagcacagaaccgataccctattggcttttgactttatgggttgcgtttcataattacttattaattacctaaatcaaacttggtgctctcatggttgtgaaaaatacaaatatttaaattaaaagcacgattattggctgctaattgacagcttgggcccaagtcttggcatgtgcaaactcattggatgcttttatttatgagaatcttcccataatcagatcagaaagacactattttaattgggaaagtacaactcaatgatcaaaaattgaaaatttgaaggaagtcctctcttaagttcaagctgatgagaacattagaattgtctgtgaactcttaaatgattcttaaattcataaacttgtcattacaaaaagggagaaaaataatgtatcaattatctttccccttaagtgtttattacaatgctatattaatagtttattgtaacaaattattgagttatcattaccctctaaattaatgattaaaaggtcaactcatggatccatatggtactatagtatacataacattttacaaactaagcatgcacagaaaaagagccaaaaaagaacacaggcttcagcttcacaaaaatcactagatgcacaagcaaaattaatctgtggaatataagataatatatacaattctaatgttctatccaatcaggctataatgaatatgatacaaatgaaattgaaacgtcagtgggtatgtttgaaatcatcatctctgttcaacttaagagcatgtaggaagaatgaactaatgatacaagaaagttagctccagaattaggaacttaccaattaggacctgatactttcgatttagtctcattgcctatactactggaagatacctacaaccaaagggtgttaactgtgatactggtgaaagccggaacttgagagattacctgagccactactgctgatggatctctcgatatcatcaatatcagcgactaaaggaattggtcgttctgggatattgggaactgacaagtctgtttctaacattttcacaacctgatccatagttggcctggcatacaactgtggatgagaacagagaacagcaattaacacatacttttctaagatttcaggcacacccttttctggcatattatcttcaataacatctaaagctctcccttcccttactaaagaccatgcccaatctgttacaagagagggttggctctcatcattcacaagaagtgctttcttcccacttaaaagctctagaagcacaacaccaaagctatacacatcacttctctctgtcaactggccatacaaggcatactctggagctacatatcccatagttccagctaccctcgtgctcaaatgtgtcattccctcaggtgtgaactttgcaagtccgaaatcagccaccttggcttcaaatgtctcatccaaaagtatattattagctttaatatctctatggatgattgagggttgtgctccataatgcaaatatgccaaaccccttgcggtccccagggcaatattttgacgaataggccaactgagcttgttatcaggagatccaaacaagtggtcataaagagacccatttttcatcaaatcacacacaatgattctttgatgaccctcatagggagtagtagcaatacaataacctctcaaagcaacaaggttgacatgtctaacactagcaataacctcaacctcatgagcaaaattagtatctcctgaagctgaacaattcttaaatctcttcaaagcaacttcactaccatcaagcaaaacccctttatagacattcccataccctcctctcccaactatgttatccctagaaaagtttctagttgccttcttaatctcatcaaaagtaaactttatcaaattagtactgccactaatggactctaaagccgaacccaaacctctctctctatctttagaaagttcctcctttctcttcttcaccttatactccttatgtttatgccataacaaccaaaccccaccaattatcaccagcaaccctaaaccagaaccaatcaaagcgacgaaaattacaattttcttccgtttcttcgtacctgctgatccgggagtcgcgaaatcgagcgaaaacaggcagttagccgtccctatatccgtaggtccaaaatggttggcaaaagccgccgcgtaaatcgacgggaacgccgtgcaatcggagacgttcccgatggaagctccgatcaaatacgaagcccgcaaattggacaggctggttgtgcaagcggcgcagggcgaaccattaagtaacgactggttacaattatcaactatactgttcaccaccgatttggggacaacggcttcgaactgcgccctggtggtgatgttcatgcaaccctgggagatccagctggtctggaagccacacttggacagaatatcgaaattaggaacgtaatccttaagcaggttttggtaatcggaccagcacgattcagacgagttgagaggaggtacaaacgagttggtgagtcggagatagttcgactggacgagtcggaggctctggaggacataccgacactcagtggcgacgtcaagagaacgccgtttagggctcggagctagttgccggaggacggtgaagttcaaagggcacgaaacggcatcgttttgaagctgagttaaggccacggagttgaagcaggatagcagtaacaaaagccggacggcgacgaggaagagggcagagaaggacatttgggcctagggtttcatggaaggaaaaacagacagaagagaaagaagaagaagacgaagagtttggtggtggaagaggaataatggtgggattgagtgaagtaaggcagccagccagttatgacagttgaatatggagattttggagatggaagggaaattgatatgaaacttcccccaaaacgacatcgtttcttttcacctaaccatacttgctcatccaattgggcctggcccagtccaatatttcaaagctcagtgggcccaacagtcgccggctttgctttatctcggaatattatatacacttttttatggttgtattataatatgatataaaagataaaatttcaagtggaaaataaaactgtcctgagcactataatggttatattgatgcgttataagttaattgattcactgattttggatgtaagcttcgtctaaagtcatcaaactttgtccttatcagttaattactatttttggtagcggagagaagtgagaggaaagaaaaaagtgtgtttggttagaaagtaaaggtggaacagaaaaagattagtggaaagaaaaatttcgacaatggaagaaccaaaagaaaaataaataatgcttagttagacagaaaaa

SEQ ID NO: 24925 - DNA, 4200 bp, Cannabis sativa
  modified_base (3294)..(3298): a, c, t, g, unknown or other
aaagtctcgtgttggatggatgtcctaatcacatattaaaaccgggtaaatcacatgtccaaaaccctaatctgggaaaccgaaacctacaactcaaggttctgttatattcattagggactacattaacctaggaaacagggaaacacccaactaaggcactgaattggcaagaattttagaaaataagttgttcaaggaatctgtcaaaatcgattaaccgattttacatgacttggaaaaccggttaaccggtttgcaccaggtttccccaaacagcctccaattttctcaaaactcaaccaattgccactaaactttccagagtacctaaacagggtataaacaacacattcctaccaataaaacccagaaaaactgactaaatcaaaacattccattaaagacctcagcttgagtttcaaagctcaaacttatgaaattccaacacaatacactaaaaccagctagcagaacttagaatcaaccaaaaatgaacattaaaactgatccataacctaatcaaaccctaacagccccaattctcaaaaatcaatagttgaagctgattaaaaccttgagagaaacataatcaaagagtgtctaagggttaccttgatcaaaacctcctcaaattcttgcagaaaacacaaagatcagcaacaaactcctttggttctagctggttcgaagagagataagggaaagagagtgttcttcaatttttggcttttctttcttagttttctttattttcctcaaatgaaaataaggttaattgcattaatcttagctgaaagtagaggctaggtgtcaaaatctagggcaaccaccaaatcacccatgtggcaaattactaaaatgcccctttcttcaataacttaagcattttcaagactaggggtaaaattatcaaaatccataaccccgcccaacccaggtactctatttcctccaacatacaccccactaagaaataaggttctagacctacccatgtgatcaaactagccatccatcgcatttctcgttttcgccgagcaaaaattataaaaattgcataattcatatataacacaaataatacacctagagtttaataaaatctctggaattttgaaataataactctaatgcccatttctaacaatgggacccacaattaaatgaattcacaaataattactaaaatattaataattagtgctaattaccttttttaatcaatataatgaaatgcggtcattacaaggtacgtagaaaatctaaacaaaatttgatgcagccacaaaataaaaaataataaataaataatttttttcctcttaacgaaagagtcaaaattctaaaaggtctaaatgacaaaatactattaggtctcaaggctaataaacacctaaaaaagctaacaaaaactaaaacaaaaactaaaaaagttttcgaagaaaaatcattagatcttctgtctattcggagaaataaagtcaaagctcctagtcttctctggatttcttcttcttgaatcttgagtgttgcttttgctctcttagcttcataaaatgtttctaccctagcttggtcctttgaccgacttatctcctcagcgagatatcgttgctccttcaaggaatcattaagactagaaagatctacctcaaatgatgatttttcagattcgaacttagctcgtcgttgttgtagggtttgttctgcagcaataatctctgattccttgccttaaaatcttcaaaatcctttgtcttgttagtgatagatatggacaaacaatctatatctgccgaattatcctcgtcccgacgaagaaggtccatgataagagattcatcaagactaagggcattctcaacaacttgagcagaagcgagagacttttcttgagctttgagaaaatcattgacagatccagtgaaccatgtaacatctgctaagccacatttataatgcccgcaaagggtactcaacacgtctagttgcatatccacgtcagcacgatgttttgaaatgtctgctgttgtcaaaggagaacataacaaatgaagaatgtgtttcatggattcaatcacaaatcttttagtatgctcattcaagtcggagttggtgattgttgaagctgacattgtcaacactggatctggaagaggaataagcaaatctgagggaacaactgatgatggaacacccgtctttgctaaggcaatcagttctggtagaatggttagctctgcaggtaatgcctcactgtcaaatcctttgttaacataatcatcagacccatcaaagtcgataagttcttcatccctagagctagaagctccaaagcaagtatcagatggtggcatctctgaactctgagtaagtgggaaggagacatcttcaatacgactagacctgtcatgatttgcatgtttcctttgtttgaaatgtgggactaaggaatgggcattttttgatccaatgtccgattcaatattatcatagttggcgccagtaaattcattatgttgaggaggacatctcacaaagacttccttagggttggagtaaagtaaacgaatatctttgattacataatttgactcctcttctttgactggttgcttggataatgtagaatgaatgaccttcatagacctccttaaatatggagggcaacttctcacccaccaacgacagtaccaccatgtgcattgacccatacgggtagtccaaggaatgtgaaagtgggtactagtatttctcctcaacagtaaagcccaagctttagcgatttcgcttattccacactgcctcctcctagggatactcaaacaaaatttatctgagggcacactttgagcaaaaccaaactggcgagcaaatctattaggataataaggttccaaatatgcatcgttgcccactcttacaggtaacaaagaagaacgcatagaaatcaataactcataattctcattagataaatcttcattatttagaaagtcttgattattttccatggaaaatgaagtttagagttaaaatatctataattaaaattatttattaattaattatattacttttacaatttttaaaacccaacactaacattttcttaaaaataaataaataacactgaaaaaaaaataaactaaaatatttaattgattagttttttcaagaggtaaaaggtgccaagtaaataattaaagaattaaaaaaaacttattagttcaattaattaattattttatttcgtttggtacaccgtattgtattgtatggtattatatnnnnntgtattttatgcaatatttttatgcaaaactatatgtggtattaacttttatgaacacctaaatatataatatttttagtataaattaaaatttaacatagtattatataaaaatatgatatatgatccaattcaatataatacaatacaatacaacctaatacgacgttccaaacaatcccttacttaaactcttaaaggattaaaaaaaatggttctattaattatatatattgtaaaatatcatataaatcaattaccagttaaaaaaaactaatacttcaacaaattttttttaattttttttaatctttgaattgaaacaaatagaagtaattgataacttgacacaattgatatagttctaacatcttaattgaactaattataataaatatttattataactatgttattaaatttgaattgaaatacataatctttactaaaaataattaatttacattaaaaattaattaactaacttatattaattaattaataatttaatctatccatccttcttctcttattttcctaatttttaaagtttttcaatatatttatataattaataaatgaaaataatttaaaaaaatctcttcaaagtaacaatataatcattatttttttgaaataaaaaaactcatttatttcaaaaaattgtggtaacaatataaacttagttatctatttattatttttggcagtatgatattttattcttctctttcttcatgtcttaattttttagtctatctctttctgtcttttttttaaaaaaaaaaaaaaaaaattgattctaataatttagtatatttcttttattataagaaaattgtccactcacttctattctatataaagtgtgcctatataaccgaattcttggtttatgagaa

SEQ ID NO: 24926 - DNA, 4718 bp, Cannabis sativa
tcatactacaccagacttaaaagtctttgggatttgttggaggaatatagacgacaactgatctgcaattgtggtgctatgaaaactatacaagagtatcttgatgaagataaggtgtttgaatttttaattagtttgaatgagtcctatataaatgttcaatcacagatcttacttcaagatcctcttccaaatgtcaataaagcttatgcagctatgatccaagaagagaagcaaagaggaataattatacctcagactgaaaaatcctggcaactccaatgagattgcaagacaattcgctggacagctttctggaaatggatctggaaataggaacaacaacagacctgtttgtacatactgtggtgtacctgttcgcactgttgctaagtgttatagaattcatggctatccaccatgtcatagattacatggaaggttttcaaaagaaattcctaacaagcttggaaatcagccaaattgatcttcagcaaactattctgcaggaagtgattgggtagaaagtggttctgatgatcatgatctggcttctcaatgtcaaaggctaatagccatgttaacacagaggttccaatcccaatctcaagctcaggcttcatcatcccaaccaagtaatcctcccacacaaattgatcagtgccaaactgagcataaccatcaacaaccaacagtgtcaagcattactagtaatgttaattctatacctaaaaatagctggattatagacataggtgctacaaaacacgtttgttataatccctcattcttatttctattcagaaaaattctaaaattaattttgttggaatgccaaatggtgttagtgtcaaagtcttgtttgttggaactgttaaattgcataatatcctgctgcataatgtgctctatgttcctaattttcagttcaatctcctctcaatttgtgctctatctgactcatctaattactcatttcttttcttgtcaaacaaatgtgttgttcaggacattaccaagaatcgagtgattaagatgggtgaaaggattgacaatctttactaccttcatgaccaacctgtttcttcagcttgatctgtttttaattcagaaatcactaatgaaactttgtggcactataggcttggccatgcctcatgtgtaaaaaattattctattaataaaagtttacagttccaatactctccttgtcaaaattttcattgctctatttgccattttgctaaacaaagaaagctaccttttgtttctaatcacaacatctctaaatactgttttgatttaatacacatagatatttggggactttatcacacacaaaccacagaaggcttcaaatattttaccaccatagttgatgattgctctaggtacacttggattcacctcattaaaagcaaatggagctcaagttaaaggagttagatctgacaatgctaaagagctccaattccctgagttgttttcatctttggggatcatacattatcattcaaacaccccaacagaatttcattcattcatctattgaatgttgctagagcactattatttcaatcccatatacccttgatctattgggggagtgtgttagtactaccacttatttgattaacagaatacctctcctaatttaaagcataagtcaccatttgagattttaaactctaaagttcccaactatagtcatcttaaaacctttgggtgtcttgcctatgtgtctaccctaggggctgctagatccaagttctgtcctagagctactacttgtgtctttctaggatatcatgtaggcatgaaagcttataagctcattgatctcaatacaaattgcatattttgttctagagatgttgtttttcatgagaacatttttctatttctgtctagtgaatttttaccacttcacatatcagatttattccctactaccattgagtctctcaatactgattccacacatgaaacacctcagtttcatccatcttctgaagctgttcatacagattctatcactgaacttgtgctttctgacattgtgcatcttgctgttactcagcatgaggatgttttgtccctgcccactcaacatactactgagtctgtttcactcaatcgacactcatacctacaggactaccattatctcttgtctgccaacaatgtccaacatcagaactcttcacctgtcactgatcaagttatctctgaaattatcaactataccaggttctccccacaatttcgtgctcttgtattagctgtatccagccattatgagcctgaattttttcatcaagcccgtgggatactgcttgggatggtgcaatgtcaactgagaacaaagctttagaagacaatcagacctggattattgtttcattatcccctcatcaccatgctattggttgtaaatgggtatacaaaatcaagtataatgctgatggaagcattgagagacacaaagctagactagttgccaagggttacaatcaacaagaagggttgactactatgaaacttctgctgtagctaccaaattggtattagtcaaacttatccttgctttggctgccatcaaaggatggtttctttaccaacttgatgtcaacaatgcattcttgcatggtgacttgcatgaggaactctatatgactatacctcaagggtatagtcctaagggggagcttccacctaatgctgtttgtaaactttaaaatcattgtatgggcttaaacaagcctcaagacaatggtttgagaagttttctacagctcttaatgaagaaggttttcagcattctatttcagatcattctctcttcataagacagcatggagcaagcattatcatcctacttgtctatgtggatgatgtcattcttgctgggaatgatcttatagcaatgaatgaattgaaaaccaaacttaacaacagatttaaactcaaggatcttggtgacttgaagtattttcttgggttaaaattgcaagacctaaacaaggaatatttttgtcacaaagaccttatgcattacagttgctagaagattttagttttctaggaagcaaacctgtcaacacattcaaggaaaccaatctaaaactaagttaagaaggtgaagaaaaactggcagaccctaagttgtatagtagaatgattgggaaactccaatatttaacaataacaaggcctgacttagcctattctgtgaataaacttagtttttgttctctccaagagtcaactacctttatgatgcacaaagaagtctgtagtatgtgaaaagcagcccaggacaaggattgttctatcctccagaattagaaatcaggttcgaggcctacactgatgctgactgggcagcatgtgtagccactaggaggtcgacaactggtttttgtgcatttcttagcaagtctcttgtgtcctggaagagcaaggaataacacacgacgtctagatcctctactgaagcagagtacagagccatgttgaatacaacatgtgaagttatttggctaatttctctgctgaaagaactgaatattgagcaccatggacaacctatactacactgtgccaacaaggcaacttaacaaattgcagccaatcctgtgtttcacgagaaaacaaagcatattgagatatattgtcaccttattagacaaaaggttcaagagggtgtcataaaaacaactcacacatcagcaaagatcaaattgcatatatgtgtactaaggccttacttcctgctcagtttcatgttttaaaataaaaaatggggctttgtaacatatacactccaccttaagggggagtattaaagatgttaaagtgttctgtacttaggcttggcagttagttagttaagtgagctgtattaagctgtcattttttggttatgagttagttatgtagctaactctctagttccagtgtattctactggtttgagctgtataaataccctgttttcaatcaatgaaagatgatgaacatttttactcattcattccatttttgtactctgttttctgttaatactctctcttaattgttttcatggatattactgatccatctcctttaacctattacatatatatatgctaacaatagaattatattgatagatatataatgctttaaatgaatttttcaataattaaaaatatgtttcaaataacaaaagcttaatttatttaatatttcttttttcttttttttttctttttttattaaaaaaaaattatatgaaagcatcccctctctcatctttgggacctcttcatcttcctcctctttcctcaagggtggttgccattggggatggagactagctcgaagatgactaaatctgagaatgcaagttagagatgatggaagacatcaaaatctgagatttaggaagacggtgggagcacgttaactaaactcttggcgaccattttttttagtgcagatctaatttgattgattctttgagatgttttcgaaaaaattaatattttattgatgaatatttcagtttaaggatgctttaaagaagatgatgataaatattttgttaaaactctttgttcatacgcatacaagggctcatcacaatgtaatcaaatagttagttgttctgctagagtgaattattgttttttgggttgcattcttgatttattctctttaatttattgttg

SEQ ID NO: 24927 - DNA, 2224 bp, Cannabis sativa
ttatggaattcattttctggctatatctattgccctatgttaattatgttaacagtttccagtctgaagctggcacttttgtggaatctttgctaagtttcttgatgggtgtacaatagtatgattgtatgtggaaggagttcttgttgtaaaaggttaaaggctgggttttgattatagaattatttgcatagtttgcttgatgcgtgtataatactaggagatgaaaggaatgtcctttatagaggctagtttcttttagaagtaattccttaactgtgtttgtgaggtgattaggagatgaaactaatgccctttggttttcttatatcccagaaattctactcacacttcagtttgctttagtgtgtttgtgaggtgactagtgagtttactttagtttaaatttttaaaattgccctatcccgaaacatcaaccgcccaaaatatagcttcgatgctctgtacttcttggctagaattacaatggaagaatatctttataggttgcacaatacttgatactggtagagttaatggctgacattaagttggtgtttattgaacttcgttttttcatcttggattgtacagcaatttaatgtagacgttggttcttggtagtaagacacattagaggtagcgcactataaatttaatcttttgatctaactctttccattgtgcatttttttcttctcaaaaaaacttttaaagaaaggaaagtggtgtttaggtggcacatgtttgtttgataaactctaaagaaaagatatgctatagagcatagaccaagaagttattttttcttccttgcatagattgagctctcagatttatatttagctctgaagttttgtcaacccagtaatttatggcgatcactagctaaaataggttaaaagcattgtcatatcagatcttttgataactttatgatgcattacctggtcataagagttgataaccttttcccagtgaactgtgatgggctgataatccgctggcattgatttgctatattattttggtttattaatgtaataaagaaagtacaagtatattagtctttagtttctctaggtggtcggtggaattagttcccaagtcacatagctttactctaggaagaaattttcgatgttatctgattgctggtgcaagttcttgttacccatgaatattcatatgaaactaatcttaaacataattcttaaaagatttaattttgtttaataattattttaattatgcaaaattaataagataagtcatactgatggagatcatggctcttgattcttgacctgaatcctatttttaacctatccacaagggatatattttggcatgaaagttggttccaccatttgtttcgtgttacaaattcggacagtaccatttagcatttaaaagtggcagagataatatgctggaaatattaaatgtaaaattatcagggactattcttaagttttgactaatggcactacttgtttaggaaagactttccatttttttatacataatgaaagtaatattggagtatattgttgttgttgcagggctcttgctagtgtggcacccaaaggaggcgatcataactgattgtttgggatacaacaatggccttacttttaatatgatattttccccttttaactcgatgttctttacttgtttctactgaggcttcatttctattgaaaaacaattctttggcacatatattccccctaagggcacgtttaacgtggcaaaaagaagtggggtttggcgttgacaagcattatctcatctcatctcatctcaaaatgcttgattaacctttgtaaaagatgatatatataatacccaattcattggaaataaacttggaagatgaacactattatatatattttagtttaaggtgggggttcgtaattttcattgattggactctaaatttggttatataagggaagaagaatatttgacatttgtatgtaaaacaatcaaatcaatgtgcattaggattgctattaatgaactttgccctccatggttgacaaaatatttgtttatctcttctttatgaaagtgaagatgaatgaccttttggaccactaaaatgcaacttaatggataatcaatattgtagttttatgccttatgagttttttttaggtttgtcttttaatcactaattattgataataattcaacatcatttgctaggagc

SEQ ID NO: 24928 - DNA, 1697 bp, Cannabis sativa
ttatcttgagctgatgtggagatattgttacgaggagtgtgttaagttttttaagtcgtaactaacttaacaacttagctttgagtagccaccgtctttaggatctattttttgcatctataaataccaccgatacttacctttctagggtttattttttaccagactagtaataagaggtgatcttgagagagaaagattgagaggtagagagagtggtacagagaaaaaagagagattggatttgagttttgtatgaagaatctttagtagatgaagaagatattcttggataagagtgtgatagaaaacactttgagagaactcagcatagaatcgatctcgattgtattgtgccctgttcttgctcaatcaatatagaatatttggtggtatttcagaactggagtagagccatagatcacatcgatctataggacttgaaccagtatatatcttggtgttgattctattattttattattttattgtttctgttcttttagtactctattcatccctgttttaagctctgattatcgtgtctgatttgttaatcttgtcattgttaattatttattgattaagttttagataatttaattctgcactttagttataattttttcacagtaggaattatcatggttccaatgaatcaaagttcaggtttcgttgcttaagacgatgtggaaaaagaaaaaaagaaaaaaaaaagacggttggagactgagaaatatagtgaagtggaatgaggcagccatagagaagcatgttcagagagttgtaaagactaaagaccctaataacaacaatcggtattggaggcaagttgtaaagactaaagatctactcaaaacacatttcaactttgttgcttaaacctgctgccaacattcagcagcatgcttactataatgctgattggccattgtgtagatgataggatctattggtggctttgttgtgtatcttgggtgagaatcttatcccatggtctgccaaaaaacagaagttgttgcacgatcaagtactaaaagtgagtgcagatctcttgcaaatacagatgtagagcttgtcaacttgttgcatgagcttcatgtttcccttcctgaagcaccaattatttgggtagacatcaaagtacaattgcacttgttgcgaatcctattttccatgctagatctaagcacattaagattgacttcactttgtaagagatcaaattttggacaaaacactctcagttaaatttgtcccttccatcgatcaagtggtcaatgttctaattaacaaacctctctcaacatattgttttttctatctcaagggcaaaattcaaatggcttcaactcgatccattttatttgagagaggatgttaactaacataacttcagttgtttagttagttaattagtgagaaaattagttaattgcttctttcaattatgttatttttcaatttcggttgatcagctttgttttatatagctctttgtcccttgtaataaccttatgtttataaataaagaatctctctttaatgagagataagcctgttatactttctctcttcttccactaattcttaccattcttttctctagtttttacctatcacaatcaagcttctacggagtttggtactactaattaaagaatattgaattatttagacctataaggggaattata

SEQ ID NO: 24929 - DNA, 1957 bp, Cannabis sativa
ttaatttcagtcatccaatcaatccaatatccacttgatgttggataagatcagttttatccattagatgtatttcaaatatatttattagtttaatttaattttatcccatattttagaactagtattttttggataggattggatctatctaatattttaggtccagtatgtattgaatttgattggatccatccaatccaagaaaaaatattaaaatttcaatgttaattttcatatatacatgcatattttatgtataacattataaaatctaattactcatccaaattaaataaaaatactaattagttcgataggatgttagatgtattggatttttagacatcctatccaacatctaatctaatccaattgtatatttaaaaataacatctaatctgatctgagcagaattggatatccaatgtttgacagttagttgtaattgaatcagtcagttgtcattggattagattgatttatgcacacccctagtaagaaccaatcatccatacccttatactaatctgagtccatatttggccatgtaaaattcttcttgtcacccttgtgtgtcccccaaataccaacaaaaatttatggagctaaagtgtgtagaatgacacctatttaagggtacaagttgtgaaaagatgttatctcctcttcatcaagtacaaataggcatctatatgctgtataaaattaaaaaaactaaaaattttaatatttataatacattttcaaagtaatggtaaagaaaaagtaacattgaaatactcacactatcgtcatatatcggtaaccaaattgctacacatcgataaatgtttatgttttggtctaaaagcattgatatcattttatatcgccaaaaaattttctaaacatcgctaagtaatattactaatagtctattcccttttctctaggcgtttacgctagtaatatcacaaaacattaataactatagaaaaacccaaaaaatgaataactagccacaaaaattgaacccaaacataaaaatcaaacctaaatcatcctatattctcgcaaaatcactccagctcaagcataatcaacaaaataatatccaacatttactttctcttaacctaaaaaatgaaaaaaaaacaatccttacttgggtcaacttcggtggtggtttggtgccttgctggtcattgtgtgattcgtggttgctcggtggtactttggtggtcactgggtggttttcatctgtgaatcgcccaaacagagagagtgatagagaatgggaaggaggggtcagctcatgagaataggaaagaaagaatgagtctggatttcagtggtggtggggtctcttatgtgagggaacgaaataacaaacaaatgcaacaaaacaactgattctctttgattgaatatagagtagatacaaccttttatacatgaaaataataaacaaagataaacgacaaaactacccttgaacccaactaacataacagaaaaacagaaactgtcgattatgaaatacagttatgaagtacgattcttaacactccccctcaaactcagtgtggagagagactcaactctgagtttggctcgaagcaacttgaagctggtgttggacagggctttggtaagaatatctactgtctgattataggcaggagtgtgtttaacaatgagagttttggcaaggactttttctctcacaaaatataggtccagttctatatgtttggtccttgcatgaagtataggattagctgccattagaactgtgctgaggttatcacaccagacagttggtgatcgagggatagagactttgagtttagaaagtagtgattggatccaagtaatttgtgcagtaacactagctaaacttctgtactcggctttagtgcttgattgatacatagtttgttgctttttagatgtccagctcaccagatttggg

SEQ ID NO: 24930 - DNA, 4458 bp, Cannabis sativa
ttgatccgaaaccggcgaagatggagcgggaacaggagagtgagagggagaatctgcggtgtccggtgtaggagccggtggtgatgaaaaattaggagaatcggccgatggagcaggagcaggagaaggaggagaagaagaaggcgatgtaggcgaatcagcgccgctttccggaggaggagttggtgagaaatctgaggcggtggagagagtgaatccgatgaagaatgtgagtagaagaagatgaagtatgatggagttgaagctgcggaatctgttgaggttcgccattggagttgaaactcgagaatgtagggttagatctgaagaagaagaagaagaagaagtttgtttgaattgtgagaaaatgttttttttttttttggatgaaagatctgaatctgagaagagagttgaaaaaggagaggatcttgggattagtgaaatgaacggcctagattgacggcaaaggaaaggaaggcgcgtgattgtcacgctacacaaaaaagggtggaaaaggaagattccagaagtggtatttgtatcgtaagcaaaatgggaaaattaataattaatatttaattgaaaattgacagttattttatataggaaattttttaatttgttacttagtacttacgttaattttaattttataatgtaacgtttccctaatttttacatacaaaaatagtaatgaaatagagtttataattcaagttattggtatcttaaaaaaaagtcaagttatttgttgtttttatttttgtttttaacatacaatagttgtttttatgttttttttttggtaaaaatgttttgtgtttgttttttttttataaatttgaagtgtagtagaatattgttaaatatcaattaaattattattgtattgatttcgaagttttacttttacgcatacacaagtatatacaatgatcatttagttggtatttaactgttaatatttaactggtatctcaaatttacaaagaaaattaaatttaaagaattattctattatatataaaaatatttaaatttttagactaaactcggtaaaataagaatttcatttagaagattttagttgagagaaattgagattagaaggaatttaaacccaaatatttaaagagtttgaaattatctcaaaataaacttaaaagtaaaaactcacttaatcataaactcacttaaacactgtatagaatgaaaagagtgacaacaaatattattgattaaataatgtcaacctaaattaagtcagtcaatgatacaattaggatcactatattttgaccatttgaagttaaagtaagtttaatgggatgagccatactattagttagtgtaaacacatgacttgaatgtgtgttagtgagaagagaggtaacttcaaaaacttagacaaaccaactcattaattattggaatttggaatagttttctttttcttgtacttctttttaaggaatttaatttcttaatacaagaggggttttcgagagtgcggtccaattgtctttcaattattaatcatatcatatgcacccattaatggaattatacaactgtattcatatgtttttttagttaattttagcatgtggccacttttattttgacccaagttcattatgcaaataggcttaatggaacccatatccttttgtgatgagtgtataacacaatattgtaagtcatatgttaagaagccatttaactcatcctaattagctcttaattattattgtctagtagcttaataagaaattgaggatttaacaagatgagactagatttgttaaaggaaaaaacaaaacaaaacaaaaaaaaaaatattatgtattatctggtttaatgaatataattaatatttatttaatattattggttcaataaatttgaaatacaaatataaaatagtgtagtttattctattaaattatcataagaatccgtcataatattacaaggaatcataatattcttgtatatacattgttctaatggattgttacagttagaaagcaaagcattttgaacaaaacttaggtttgatggaaaagaagatgtcctatgtttaagaggatgaaagtgttatttgagtatgtttactcattgataattttgttaaagttttaactttttattcgagtgtatgttctgttaaaacataagaatcccttaaaatgctcaacaaaataaagttatataatcatttgtacaattggtaagaaattcttggtcagatctcacaacaatagtaataatcacattacatcacacaacaaatttacaatagtagaaacatttcaccaaactaagcttattacaataataaagcaaataactaaagaacattactaaatcaaacaaggacacacaaacaataataaataagatcagatccattcacccctcccaattccaaacaaaacaatgttctaaagccaaaatcgagctgcaataggaagagggcaagcaccatgccgaataggcaaagggcaaaacatgtagctcagaaccactgatcaacacaaccctcaagatccgaaacacccaccccattgatagtgtaacatccccactttaagccgacccttacacctactacaaaccaacacgagtgtttccaacgtactttatcttcacttacgcttcctaaaaaaacttaattgtgaagttctttcgtgatgaactatcgggattgcacaacttacccaatatttctccttacagatcacagaactactgattgtcacagctagatttcgaaacatagagaaacccgcccaatttttttcaagtccataattatataatataatttacattaatccttagcttaatagaatatattaattcctaaatcagaaaagataacagagaccatatatataataacctcaaaagcaaccaagaggaagaaaaagaagactttattattaaatcttaagaagaaatctcttacatgatataaaacttgaaagttagatgcgttaatatacttctctcttctccgcttcattttttactttctcaaaacctggatgaggaaggagtggttgttcttttttctttcccctttttcttaatcagtctctctctgccagttatcttcacctatcaataacttacttttctaccatagatagagtacaagaaactcaaataaaacacaaaaatttaaacttctcacaactcatccttgagttccccagctgctgcttcggattttggagccgcggttgtgctgctctctggggtctcagtgctctcggattttgtaggtgtagttggtttctgaagcttgaatgggattgatgcgtttttctttagaaatttgtagaatgccacaacggtgcgatcggcgtccacggtaatctgtcaataccaaaatcaacaagataataagcattatagatcttgtaaagagaatatcgatgctgcggaactacataataaatgaattatcgttggttactaacgggatcaaagctcttgtttccggcagggaagaaaagaagcgttgggaaaccatcagcctgcaaaaaataaggaaaaatactcaatacaaagtcaaaattttcgttgatgtttagctatacaaaatacaatccatgaagtacaaggtccatgcaaattcagtatttgccatgtcttatttcgggattacctttgctctagggtgctcgtttgttgttccatccatcttcgctataacgatggagtcaatactgcgtagatgttttgcgagcttgttgtatgtaggctctagagattggcaatggccacaccaaggtgcatagatctgaattttcaaccctaacattagctgaccctcttacaaagagaagaacataacttaatcaattttttaatgtttcttacctcaagaaggacatcctttgactcgtccaaaacaatctcatcaaaattatttccaactactattttcacatcaccgtcattctgtatcaattaagtcataaaagacaaaggttaaagtataagaaacttaggaggaaaaaaatggacagtaatgtgagaatgaataactcacggtttcaggaattgggtctgacttgtagaaaggttttagcttgtcttccaagaaatcctcgccaaaagcctgaattttttttaacattcagttcagttattgtgcatcaactaaggttatgaagaggaccgagaaacacagtatttttccaggaaataaaacgaaatgagagagacggagaaagagtttcaaccttaatattttccaaggtcacttctttatcaaacacaaattttttggcatcatcatttccagtatatgcaagaacctgcaaggaaaaagatgtaaattgcaatgcatagttgaaatcactagaagttaacattaaaaagtgaaaatacataaaatagagcaaaaagtggtgaatacaaaggacaaaagcttaccgt

SEQ ID NO: 24931 - DNA, 2824 bp, Cannabis sativa
ttggagttgtgctctacagtggccctaggcctaatccacaggtagcctaatatcacttgagtagaactcatttccaaaaactaacctaaggtatgtgccaaagtaattatatactactaacttatcccataattggtcaatgtggaatcttaacaatgtagattcttgaaaaatatcatacagttcctaatcgcaaataaacaaaaagctttaacctaataaacaagagggacagtccaagtttcaaaagaaaagggagggagagaagcataacctattgaacgaatgcaacagcaaatgaaaaactaaagaaaaactgtgagcacaatggtctaaaatacaaacacaacaatgtcaagttcaatatattgaaatgcttaagaaaactgtaagagtacctcttgcaaaatgaaactcgcatgtttggatccgttgtaaagaatgtaccacatcaaaaccaccaaaatggtatctgttaataaacattaaggaaaatacagcaaaactcaaaagattttagtaacaatacacattcaatgtgtttttgactttgtacaagacaatacacactcttacaaattcaacctcctccaaaatttactagggaatgtcacttataagcgaagaaaaccgtggtaacatcaaatcaagcttccaaaacataaaataaagagattattattgaagaaaaacagaacctttatgtatgagtatttagttccaatgatttgacaagctaaaatctagtactgaacagcattcattagatatatgtatgtaaaacgtaatccaagtttactaaataccatacatgagacaataggaaaaaaacacaatgaatagaaaaggatactgaaaagacaacgctcccaccaatctaacatatacaacccaaaagtaacattgtaaagatagattttacgttgaacccagttcattgctcttacaacctgcaaacacaaattaaactcaaaataacaaatccattctaacatataagtttccaaaaagatttatgcaaaataatcattgattagcttccacataaacatgtcatatactaacaaaaatattgaagagaggcaaatgaataagccataactgttcacaacttctctaaacagggtagaataagttggtagctattcaatgaagtaccgtccattttggttcaaaacttctctaaacatgttattactgagcattggttagtgcctacaaccatgtttaagattaattagagatattttataaaatttattatattaaattatatgaaattaatatttaattgcatcagtagtcatatgacacgaatttttttagcatttctcgttattaattagtaactattcaatgaatcattgcctattttgcttcccctattaaaattatctctccaatcaacaaacacaacattgttcagtatgagtagttaaaataatcacaatttaaatcacctagaaaaatcaccaaataaatgagattgattcacaaaaaagaaacagaattgtttttttattgaacaaaaatcagaaacttatcaaagtctctttggtcttcctggcccttacgattcaaatattttcatccagatcagaacaaaaccatagaactactaaacataatcaaaacttattatgaaaaatctaactatgattatagaattcgataatagctaagctaaatcatatcccaatagaactctatacaaaacagagagaatcacttgagaaaatctttgtattagcattatagcagcctcagaatcgtaagtgtacctgtttatccggtgaatgagtgaaacggaattcgtatactccgatctccgatctccgatctaagcttgataatatttctaaggtaaccggtgatgacagaaccgaagaaagccgagagagagagagagagatttataactgggccactttgggtgtataaatgggcctgggccttgactgggcttctcatattgggctaaatcaaagagtacaatataggaaattatcaaaaaaaatacaaaaataacaaaaaaattaagagaaaaaataatgtgaaattttattagaaaaaaaataaaaaaattatacatgatttaaaaaatatataaaaaataaaattaaaataagtattaaaattaacacaaaataatatgagaaaaaaatttaaaaacaattaagagtaatttttaagcttaattttttcaaattttgagatgtatttattattttgtggagtgcaaataaaactcctatttataattttacgaactaaactttttatttagaaaaatacgcttgtaaaattttaaaattataaaaataaaattttctcaactaaaggtaagaaaacacaaaaaaatcaaccaaaaatcaaccataccacaattataaaacaatcaaagacaataagaaaaataaacaactataaattaactataaaataactaaaaaaatagtttattgcttttactaaatttcaaagcataaaaataaaaaaaaaaatctatgatgtatttttgtaatttttttaaaaatattcgtcaattatacaattttttctttattttaaaactacctacatttctctttataattcgtttttttagtatctttttaattgttggaattaacttctatatattaaacaaggaataaaagctgtaagaataaaaatctaaacaacacatcattactttaagctgtaagagtgcgtttggagggtctatgcttttgcacaaaccaaatgtgatgacatcaagttttatgaattggcatgtatttaaacacgtaattacactaagtaataaaaagtaattgaaaag

SEQ ID NO: 24932 - DNA, 2354 bp, Cannabis sativa
atttttgtgttttggtgaagctagacactagttctcggagatgtagctattctgcggaaatgagagactcgaaactattcattttcgagtgagcttcccatgttggaaatgagaaatgcgaagttgcaaatttgacctttctgacttcatggatcttaattattgtgaaaaactagacagacgatctaaatagaatcagaatcagataagcaaaacctagcttactaggccatttgtcgacttgggcactgggtactcattctggagctcctggatctcgttttgatacttcaaaggttctcaaacttgaggaagaggtctcttaccccatttttgaccattccagattcattggtcaaattagattcgacatttgagcaatcaaaagtagtgccctaagttaattgtcaacctgggcactggcctctatttccaggggcccaagtttgtggttttctccctgattttgctttaatattcattattttttatgacacaaaaaatgcttgggacatttttttgagaacttgattggaaacagcccaagttgacaatatgtcaacctgggcactaagcctagtgctaggtgtcaaactggatgctgggtccttggtatggcccttcaaagttctgtttggtccccaaaaatagttggatcttagtcttttctaaaaatggagaagatgcttgaaagggttttcgaaaaacatcattggaattggcccaggttgaaaaactgtcaacctaggtggtaggccagccccaagtgtcaacctgggcgttaggccctatttcaaaggacttaggtttgtagttttctccccgagtttgctttaatcttcattactttttatgatagaaaaaatgcctcaaacacttttgagaacttgattggaaacagcccaggttgacaatatgtcaacctgggcactaggcctagtgccatgtgtcaacctgggtgttgagtctcgattatggccctttaaaagttttgtttggttccaaaaatagttagatcttaatcttttatgaaaacagagaagatgctcgaaagagttcttaaaaaatatcatcaaaattggcccaggttgaaaatctgttaacctgggcattggccaaccccaggtgtcaacttaggtgttgggccagccccaggtgtcaacctaagcactaggccatccctaggtgtcaacctagaccttgggccttacttttggcacccaagaagtgttgtttctttcttgaaagtacctatttccttatttattatgaagacaaagaagattcaaaagtcaaatcgttgatctgatacttggaaggtgggtagattgacaaattgtcaacctaggcactgggtgtctaggcaccgggtgctccaggtgctcaaaaataaacttgctctgaatttgattctgatacctcaaacatatttgtggtatgtctagttgatgtctcaatgtaaagtttggcccatttttactaagacggtccgaaaaactaaaccctagttgggaatgtcaacctgggtgctaggtgaaaccctgggtgcccaagtttgctttcggggtacaagttcgtgcaatttcagctcacagggcttggattaggtggctccatgtattcatggtacataatactaaaagatagtgaattagattcaagttattgaagtcttaacttctatcccagagctcttaaagttaacctaggcgcagggctaggtcctcctcccaggtcgactgctatgactcgggtctactcaactccatgatgtcatccttcgtgccacatgtcaaatattgatgtccactacatcactagaaaaaaaaaattggattaacacaggtaatttatcttggacagagatttgtaagactaaagctcacgaggcctttccttcaaagatgttgcattgtggaataagtgtgcaattggtaagtttgtttgtgccactgctgctaaggaggataatttttggtgaaatgggctcatagtgtttacttaaaggataatgattggtggagctatattggtccaaccataagtaattggtattggactcaaatagttttgttcaaagatgagttatagaatggtattggtactacttagttctagaagcacaattatacaattgcaggtatttatactaaaatgaaagagaatgttgataactggcattactctattatctgggatcgcttaggtgttcctaagcacaagttcctttctcggttggctttgaaaaataaattaacaacaagagattgatcttcattttctctgtgttcaacataataaatttgctgagcacttattttttcaatgctcttttattagtttgaggtgtttaa

SEQ ID NO: 24933 - DNA, 5158 bp, Cannabis sativa
tatacttgcgtagtgtttaaaaatatagcaacatgtaaatctcgcattttccccatacagatagtgtcaccatatttttagagtaagaactatggcagcaagctctaaatcatgcattgggtaacaatgttcataatcctttagttgaagggaggcataagctgtaaccctgtcagcttgcattagagcacatcccagaccctgtctggatgaatcacaataaacgaagaactttttttgatctgatggcaaagctaacaccggtgtcattattaaccgctgctttaactcctataaactcacttcacacttgtcagaccatacaaattgttgatttttcttagttaactctgttaatggcattaagatcttagagaatcctttgacaaaatcccgataataccctgccaacccgagaaaactttgcacttcaatcactaatcttggcctcagccaactttttactaatttaagctttcccaaatcaaccatgatcccatcttctccgactatgtaccctagaaaggacacttctgacaacaagaattcataccttttaaatttttcatctagctcatgctcctcttctgtttgagggtacacaaggatgttcgttcgaataaacacactatgacacacaagtttatatcaagaggaaaaatccttaaaaatactctgttcatgagatccataaaaggtcgctggagtatttgttgatccgaatgacattaccaaaaactcgtaatgaccatatctggttcaaaatgcagtcttcagaatatcttcttcttgaattctcagttgatgataaccagatcgcaagtcgatctttgaaaatacaatcttcccctaaagctaaccaaacaaatcatcaatcctggggaatggatatgtattcttgatcgtcagcttatttaattcccgataatcaacacattcggagggaaccatcctgcttttttacaaacaaaatcggtgctccccaaggagatatgttgggttgggtaaaccctaaatctagcatcccctgaagttatatttttagctccttaaatcctgctggagccatcctgtatggtgctttcgaaacaagttcttcccatgtgccaaatcaattataaagtctatctctcgttgtggtggtaatctcggcagctgctcgggaaatacatcaagaaattattttacaactctgaccacctcaggcccaagtgtttcaggtctgctggagtcaattacaaccgctaaaactcctacacatccattgtgtagtaaatctttagcccttaaaactaaaataaccggggttcgagacccctgaacagatccaacataaacaaatggatctttgccctcctgttgaaaagttacaattttccgcttacagtcaatgttggctgaatacttagacagaaaatccatcccaaatataatatcaaactctgctaattccagctctacaaagtcagcactcaactctctatcttccaccctaatcggcatagacctaatccacattttggagataccgattcctcgctaggcaatagggttcaaaaccctctctcaataaaatcacaaggcctacccaattgattaattactcttgatgccacatatgagtgtgtagccccagagtcaaatagtacagtaaaatagaagttgttgacaagaagctgacctatcaccacgaaaggactagttgcaacattagcttgagtgatagcaaacacgtgagcaagtacgggtttcgcttcttgcttctactcttctttctttgcatgagggcaatctttcttaaaacatccaaccatgtcacactggaagcatattttttggttgcactcttccagatgatgtttcttacaacgtgggcactcagggtaataataaccctgcatccacctctggcttggttccctcagaactgcttgttttgccccgaatcgcctgatgccggggtaacctttcttttatggtttgtggtggaatcaccactattcctaccatattcaggagtatgaagagcggtggttccacaaacacttggagtctcttgggactcctgaagaaatgtcactgcaccttcggctcgtagagccttgtcaaccattttagcataagttgttgtttcactcgtagtaattaccaaatcgtgtctaatatttgcatttagacccgccagctacttctctttcttactgaagtttgtgggcactatacccaaagccaacttggctagacgatttaacttcattgtgtactccattactgacataccattactctgaaccagattagtaaattctttccgctttacactacagaccacctcattataatacatggcattaaacagatcccaaaattcttcccagatcatgatagtgatgcctcaggcgacagacactaactcaaaccacacgagcgtatcctcctaaaactgaaaagtggcacaagttactcgatcattcttgacaactcccatgaaattcaagattctttcaatcaccgtgagccactactcgaccttcataacattcgagcctcccaaaaaaactagaggcgcttacttacaaaatatttcaaatagtagctcgatatggtttccagtaacaggttgttctgctggtaccgctggaaccacaacggcctaaacttgtgggggtggcgctataggaggaccctactatctcagcatcaaaatctcttcgtcttgttggcgaatttgagcttgcatttccacaaatctctgctcctaatctggaggagcttgaggtggcttttcatgtctaccaccctgaaaccttccacggcctatgccgcgtccacaaggatttaagggaattcaatttccctgaccacccccagtctcgaccttgttacctcgactccttgtattttgttgggcatccatttaataggacttagcttgcaaacccataagtcaagtgggtcaagcagcgatcacataaactctatataccgtacttatggattttaaggcagtgcatttaataaataattataaactattatacttcataacatgcttttctaattacataaattactaaacaagtaaaggcttatggaaccgtgagtcgagcttgtctctaacaatgcttgtacatatcttgacgatcttcggtagacaaatctggcggctctgataccaaaattgtaatgccctgatacttaggcgcgctacaataattttctaattaacgttccacctttgctaatcaaaggttttttctcaaaaatcgtgccaaattaaaacttttaatttaaattattaaaactttataaacatatatattttacataacctggaatcgagaatttaaactttgtacaaatgttaccaaaactttgacaaacatgtcgcacaacgactacaaaatactgcccatgatgtcccgagactgaacactccaggacgcgccgtcccaacatgtataatcatcatccaagctcgaagctcactcctattcagcattcgcctttcctttacctacacatgaaagtaacaactgtgagccaatagacttagtaagaaaagcatataacaaataatatattactgacttgtatctaggcacatatacacctatccacaaggcttatcagataagtaagaacattatttacacttaatattattgaccatgatattatccactatcaacactgtagttgcaatgcaggcccggtacaatgttcgtgccactatgatagcatcaataatacataaaagtacaattgtccataatatcactcttaaccaatactatacccgtactgccgactcggtactatgttcgtaccgctatgatagcgccaattaatactctgtgcaattaagtatcagtcaaacccagtaccatgctcgtactactgacccgacacgatagttgtgctgctatgatatcaattcaatatttaatgtaatttacatacatacacatattcacatatatagcatgttctatgctaatcttatctcgttttcgaatttacatgagttggccgacctgaacgaaaaacctcatgctggatgatgccctaagtcacatttacgtaagcgggtaaataacacactaaaaacctaattcgggaacccaaattcagtactaaaggttctgctattggtagttataataacaataccctaaatatcaaggaaattaccaactaaggccctaaaaaccacaccaaccgacaaaataaaaaatttcaggagagctgcccctaatctggttaaaccggtttgcactaggtaacccaaacaagttcaaaacttgtccaatttgtgtccaaatcatgccaaaccttccaaaacacctacatcaacctcaaacaatagattccaaccaatagaagcaagaaaaatacactcaatctaaaaatgccattaatgacccaatttgagtttcaaagtcaaacttgttcattcaccacccaaaacaccataaccagccgcaaatcattaatttcaactaaaaataaactctaaaatcaaaccataatcaattataacactaacaaccattgattcacaaaattgctagataaaacctaattaaaagcttaaataacacaaaagttagatttctagggtttacctccacctgaaaactccttgattccttgttgaatttcctaaaatagtgagggttagggctggttctttctggttcttggtgatcgagcaaaagggagagagaaggagaaattctaggttttcataaattttttattttttcttcttaattcactaatccactaatccttatatgctgaaaactattaattggccagctttcaaactctcaaacaaccacctaatcctcaagtgtaaaacactaaaaaagcccctcttacttgtatctcaagcaataataatcctaagggtaaaatggtctaaaatcataactccgcttaacccggaatacataatatctcaaacgtttattcccactaagaaataggttctaaacttacccatgtgacacgaacggccatccatcgcattttccgtcaccgccgggcaaaaatcataaaattgtgtaattcatatttaacataaataatactcttaaagtttaataaaatctctagaattgagaaattataactctaatgtccatttcta

SEQ ID NO: 24934 - DNA, 3170 bp, Cannabis sativa
taaggtatttttgtaattattttataatttatgtataattttgaaaaaatcccaaaaaaaattgtattgagaaacaaaaaccctccctcctaataattaatatggcaaaacataattttaattagtatacaaattattaaatatacagtaaattaacaaatttatggtaagtttatatatcttgaaataaataatgtagctaatatataagtaataatattaatttatgatgtgaaataggtgtatactaacattgaaggagatcgttcaactgtcttcaacactgcattagcagtattagctcttattggagctggacaggtaattacctaattacaattaactacttcataattaatatattgctttagatcttttcaatcaataatggaatgctcatcattataatgtaattaatatatgcaccctattaacagggccaggcttgggctaaggcaggctagcacaggcctaggcccagccagcccaagggcccaaaagtaaaaaaagtttatttttttaataatttttaaaaatatcaggttgctttggaaaatgatccaataattttattgctatctaagataaaattaatttcagggttatgcctattatacatgtacataaaaaaaatcaaaacttttccatgtatatatagtgttaattaattaattggatcgattgaacaggctgagatagatccaacacctatacatcgtggaataagattattgatcaatgaacaaatggaagatggtgacttccctcaacaggtatatatatatatatatatatatatatttacaccatttaatctaattatgttatttgatgacaatatacgtacgtaaagtgattaaccatgcatgcatgcaggaagtaaatggaatatacatgaagaatggtgtcttaaacttcgcttcatatcgtaatatctttccaatatgggctataggagaatatcgtcgtcaagttttacttaattatttaattatattaattaagcttcattaattatgtgaacaaacttaacttattgatgatcatataataagttcatcaagtcgtctctctctctctctctcatctctttctatatataaatatttatattattgtaataaaggacctatgtcaagcatattgctacacaagtatcctcatttattatttatttaatatatggggattcatgatatgaagtgttaaaagtttgcttaattaatatttaaaattcattttcagtataagtttgctactaattatcattcttacctccttacattactatatttacttattttactttttttttttttttctactagtatgagattatatttcaccaaaaaaataattacagactatcagcaccactaaaggcctagatttcatttctttcactttacaaaacttcccaccaatatttgagtcaaagtgtggactgttcgaagtgttattaacagattagaaaaaagattaatttgtgatagaattaattatatggtgtataggggataagttgagtcaaagggatagaaattgagttgaagctttgagtcaatgcttgtaagtagtctttatacttgtttgtaattgtttgtgcataatacaagtttattgattttcaaaagaaaaaaaataaaaaatgaaactacccaccaatcactatcttgttttttcatatttttaggcatgaccatagtcatccggttcttccaaatgtgatacatagtggctgcaatggcagccctaaaaacttgcttccgaaatggaaaaacccgagatcttctaacccgcgcgccgaaccaattgtttcaaactcaagttcagtgccctccaacccaaccaatctttgatatggcttaatgacaagtgaaaaacaaatgctcaatagtttcattcgcatttccacccactaaacatacttgatcttggcacactttaaaccgaaaaaatctttctctagtttgcaatcggtccaacatagccaaccaaagaatgactcgatgtttgggtacattataacaaccccaaacctgtccataccaactaacttttctcccccagtttattcagcacatcataaccaaatcggatagtgtatcgacattgctgcagctgatattctgtcctgattctcttcatcatctctttgactttgaaaattaatttgttgccaataccaacttccttgacttatggattattcatacatccaccaattattgctttgtatataaacattgtgcacccattttacccaaagattatcttgcttctgagccaccgcccaaacatattttcccaaggtcccttgattccatggattcaatatttcctgaagcccctaaacctctccctcattcttgggtttacaaagattaccccaagacacatagcccgaccctccatattcagtctctcctttccaaagaaaggatcgaaaaaacgcgtttacttgcttcaatattcttttgggcagcaaaattatttgagctcaatatgcatgtatagaaactaagaaaaaattgatcaaagttactctacctacataggggaggttacgggagctccgggtttgaatttgggccaccattataaggccttcacatttaacaacggcgaatctcttgggacatataggaatgcccaagtatcgaaatggcatagagcttctcacaaagcttgatgcatcaaggaccctttgaattgctccattccacaacaaaacactgtcgatttagcctcacttggttgcaagccattagtttgagaaaaaagcttcaaaccttgcagtaatagataaatagatttgaagtacccagtacaaaatatcaaaacatcatctgcaaagcataagtaatttaacacgagccctcgatatctttcatgaaatttaaatccttccttattcctaacttttatcaaaatcctcaatcgataagtactccatgccaagcacaaataaaagaggagacataggatcttcttatcgaagactccgcttagcttcaaaataaccatgtaactacccatttatcattaagtgctaagatacaaaccataatcaattgaataaaatttttaggaaatttgaaggcgcgcttgtaacatttcctctatgaaatctcattccaccgtatcataggctttcctcaaatcaagct

SEQ ID NO: 24935 - DNA, 2919 bp, Cannabis sativa
caagctaacatgaaatccgctcaaagacctaccaatttaggtaaatatagaagttatttttgaaggaaaaaatatgcgtttttgggctcacccaaataacaattatatacaattttacataataatcacttaacaactatttaggtctgtacttgaagaacctactacacctatgattgaaaatttatctccagcttgtcacatcacaaaggagttgaatcacgaacaatctcatataaggatatagcattttctacagtcaaaagaccaatgatacaccattccaagaaatctgactttctattttggatgacttcttggagaaaatgaatattatgctgcaaaataaaaaagaaaacacatcagtttcctttttgtatgggagtttcaccaaccaaggagcaaccaattctgttagttgctgttatgttgttaaattactgagtaaaaaaaatgttaataatcaagtttcagatttcagatttagaggggaagttttcaggactagtagaagagtggctatctcgaatgagctgttgttactgacttgtatgaatatttgtataatagaattgaaaaatatttgatacaaatatgccttgagtacgtgcacccaaattatgcaccaaaacattacaaataataacttccatctaaaattaatgtgattggttggttgaaagaaaccattgtcgtccgtcactgtaatatttgggtgcataagttggtccacatatcattactcattttgttttgggcacttattttcctctttaaactaactgcatcctgttcatttatcttatacaaactataaaatgcataccacaacaaataaaagctaagaaagctccaacaattaaacattcaaatacctcaataaattttaatttaaaatccaagtttccaaagcgttgtgtcacctcgtactcctcccaaaggtactcgtgtatttgagcgtattttgcatctctccaagcaatttccgatctgagggatgaattataaaacatcaaaaacaacaacaatatggattcaaaatggttttgttgataaaataaaataaagaagaaagcaaatgcactatggagagagatagtaaatccagatctttggttttgcgagtaacatgcttctcaaaattatcacatcatttgacttggaaaaatattcataaaccgtaaggcaagccagtctagatcggaacattagaaaatctaatacccctcctgtttgcaagttaccattttaccattaccccttctgttttcttctgggaatgtttttcaaaattaccacatagtaagacttggaaacagaaacatagaccaataaggcaagccaatctagatcacaatttgtataaaatgtagaaattagaaattccaatacccctcctgtttggtagtaaccattataaagtaattaaaaaccaattacctctcaaaaataccaactttcagaattacatcagctaagtttgaattagccttcccaacaagttgaagaagcttcttcttgtccatggtgaaagttcctgttttctccatcccacgatttatatcggcaaattcttgaaccataccatcaacctgagatagtgagatagtaagattcacaatgtcattacctgacattttgatcacatgaaagccattgcaaaaaattcaaccagttgaagaaataccaaaagtgttcctattggacttatattagtgttatccacacaaataatggttgtatcaaagcatttcagcaacctttacggtttttagtcacacaaaataacattaaaatactgataatgtacctgtgaaacaaaataatctaaagcaatactttggccaagcacacttccgataatgcgaacaccatcagtgtctaatgttttgagagcaatgtagtctgcgcctccttccatgtcctcaaccatttgtggcttctcttttactgtgtagtctgatcaggtaataaccaaaagaagtgaatgagcatgttgttaatgaaacagtattttgatacacagcaatatgcaaatcaaaccaacagtcatatcaccacatgcatacgtattcagttttacaatttaatcttgtaacttcaacaattcaaaaggagaagaaatttttagcatcatcactaatcatattattattagcacgaaccatctaggtgttatcttagatgtaatctacaagaaaataaatttaaattatcaactcctcattctacctggttaaggaataaaaaatcattctacccacatacttccaaaattgctacccaccatactaaaacagcaatcagattcaatctactaaaatggcaagtgattttgtttaatcataatatgtcatgttttaaacaaagcttaccatctttcctcatctctagaagtaatccagaagcatgtcttcgaactaattccaagtaattttcaacttcgtggtcttcaatattaaacagaactgctgatccatattggaatacaaccatataacggctgcagcatggattccgctcgactccaaatccctactcaaaagatgtcatattaggaaaagaactaacagatgatcatgcagaactctataatcagctactaattaaattaagtttaagcagttttcaaggatttttgtactgaaaccagtttatgttaaggatactaggcacaaataaagcatctaaataacttgctgaaatgtaatttatgcaaatgaaaagtcaaagtcttttctgaaagctttgtaatttatgctactgagcatgctatctttattctcaataatgcaaaatgttgtccaattcaacctaacataccataacaacttcaaagtctccaaaaccacttgcctatatttatatatatatataaaaaaaaaagatacgaaaattcaaagttctagaaataaacta

SEQ ID NO: 24936 - DNA, 1933 bp, Cannabis sativa
ggagaaagaagaagcctccaaccttgtttaccaagaaaagctaagttgaaattatgcagcctccaaaaacccaatccaccatgagatttgtcgagggacatctgctcccaactcatccaataaaggccacctttcgaagaagaggtttgccaccataatttgctcatcaattttttcaagttgtcacaaactccttttggcaacaagaacacactcatggcatagttaggtagcatttggacaatcgtcttgaggagaatctctttcccagctctagagagtaaccttccttcccaactcagaatttgcttctgaatccgctccttaaggaaaccaaggacaacatctttgttacgacccataatactaggaagacccaaataagtagtattatcactagctttaggaattcccaacaaagcacacactgactcccaagttataggatctgtattggtactgaagaagatataagacttttgaaagttaatcttttggcacgaagcaacttcaaagcaacgaaggagattcaaaatacgatggctttcatgcatagtggctttacaatagatatagctgtcatcgacgaacaacatatgtgtcaccagcagagcattgcgagcaacacgacacccatggagtcaaccctttgactcatacttgtgaatcaaccctgacaatccctcagtacagacaataaacaagtaaggagagagtggatccccttggcggattccacaagaaggggtaataggacctagctctttaccattattaacaatggtatagcaaactgactgcacacactcagctaccaaggaagtccacctattatcaaagcccatccgacgcaatactgcttctaaaaatggccattctattctttcataagctttgctcatatcgagctccagagccatgaaaccttccttgctaactcttcgcaagtgtcttttgaattctatagacacttattagtcgtttggaaggtgaattttaaggtcaacgtcctgactaacatcaaacaaggaccatttgataccttaagactctgtttggctagtgagattgggactagaattagcataaataatcacaatcttatgtttaatgataatagttgactaaataaataattttttttgactgaaaataatccacctcttataggataagcagtccaaatagaaaacataggattaagatggataaattttatatgatactttttttagtctaacatataaataaatgcatgtaaattatgtaagtaaatttatttaatatactaattattttttttctagaaatataataaaatgttatcgtttagataatacaaaaaaataaatatgagatgatatattcattttaaagtgatgatatatattttcattatgttaattgtatgattcaattagtttaataaaataaattatagctcaaattttttaatgtttaatttgttatttcttttaaaaaatatttttatcagtaaaatataaattttatttaattaaattttttgaaattatttttttagtaaaaaaaatagtcaaattcaactcataatcaaacccattattagattcagcataatactatctagtccaatataattcaatcatttctaatccaattaaaaatatgttttaacgaagaagttgcccaaatgaaaaaggtcaataaggagcaacaattaatggctctgaaggtacaattaagccagaacttttttgtgggataacctttaatgtagagggtgttataggttggacaatttcaatcggagggctcgggaatcataaactatgaagatgcctagataggagcatttggcatgcctagataggagctcaggaatcataaactattgaataatttatatgaaatattgaaaaattcctttttcatatatgaggttgtggcttgt

SEQ ID NO: 24937 - DNA, 1713 bp, Cannabis sativa
tttctaaattaaagtttcacacttttccttttatactccaattaaaaaaaatttccaaaataaatctaaaataaaataatttttgaaagaggttgaagtaaattttgaatctctttggtgtcatttctgaataaatatttaagaggtttttatttttcagtgtcgtttctgaactgacacttaaatggttaaatgttttattttttaacctcataagtgttggttcacaaacaataaaaaagatgttgattatttatttttatttttttaaatgtcggtttatctttagtaatgttgttctaactaacccattagtactctttggtgtagatttatatgctataaccatcacctaataattagggttatgataaatgatatttttctttgaatattattacccttgaattgacatcaaaataaattttttaacagtgtaattattttgttattgcaaaaataattacagcacgaattggcaacattacacacgaaaaactctattttatttaataacacttacttttacaaacatatagcttacacttttacaggtacactttagatacattgtttagactccaactctttttgacacactgcatgggtacagaacttaaggtcctattcatgctacttaaacaccaactataatattatactcaaacacaaactataatattgtagaaaattctacctaattttttattttaacattcttcaattttccacaaagtcttacaatttctaattacttgttattacaatgcgtttgacccacaatgatagaaacatctagttttgaaaactctacatagttggtgaagacttcaacaatttttaatgttaattagcatgtatataagttaaactttgcatgcaaatagcatgttggattttgttttgaagtttaaaataattgagaaatttaattggttcctagatgtaaaatttgtagttatattacaatatgttataggaatccttttgtggaatgtgagtccattctcagtccctttcagaaagttggtcagacagaatatatgccaatatattaagaattatcatagcccactttcaatttggtacaagtttttagtatataaatgacccatttaggccatattattaattcagatcacttgcagagaaagtaggtggttgattatttgggtctagagctttgcgtgaaggggtagagctagagttgagtgcagccaaggatgacttgccgcagaatagtattaattgtagtatttgcttaacttggacccctcaagatgagcaagtattgcctatacaaatatatatcggcaagttgtctttggctacatttgcttctcttcttctcatgtaacactctcaagacctacttacctacctagctatatgtacttcagattttaccacaatatttatatatgtctctctctctatatatataagtaattacgatgctatatacatatataatatgtattttaatatttatgaaaatattgtttcacctaaaaatattggtttaattcattatattcttgggttctatacaaatctacttttattctgtttattatattagatgaaacctcttttgctaccactactatgataaacagaataatatgtattctatatataaagtgtgcctatataacagaatttttggtttatgaaaaattcatggggggctttttatttatattaaaaata

SEQ ID NO: 24938 - DNA, 2434 bp, Cannabis sativa
gatgatattgatatgcatagaaagagataatgaattatgaaaccctacaccacgtgttatggaggcaaaaaaacaaagaaagaggttggcctggcgttcgttgctcttactaatttgaagttgtcttgttgatttttcaaccattaccctaaaataaaacaaaaatcaattaatatggtggcctttaggaaattgatcaagttggctttttccatgagaaggtggattagtaaagtcaaagaagtagaacaggtaggataatgtagaaatattaaaatttggagttagtcatacatgtattgcgcatgcgtgatgcactttaatggtattactctttaatatattatctaaaaaaatagaattattataaaactaggaaatatagcctcttttggggagttaatttaatttttttttagtattataataaactaggcaatatagtcgcttttaacacggctaatttattttttagtattataataaataattacttaaaaatataattataatatataataaaattataaattaaatctattatcttattttatataattattaataatttatttattaaaactaaatgcacaattttattaattattatttaaaattatttatcaaaaagttaaaattattattatttaaattgctttgttaaaagaaattatttttataaaaataaataaataaggtggtataaaaaaattatggcgtttcccataatgtattatttttatatctcaatcattcaaaactattgttattattttatttcacttattgtacactatgtatcgcctgttgtcataaatgtattgcgcatgcttgatgcacttgaatggtattactctgagcatctcaaatataatatttcagttcaatatcttatttaaaaatataatattatattttattagagaattattttatacattatatttaacttttttttttcatggtttagattgtttcggtagtttctctagtaatttttatacggattactatacaaattttagttgtaatttagattgctccgttagctgctatatgaatttttgtatagaattctgtaaaaatacaaaatatatatattttgaagtataaaaaaaataataatataaaaacctattttatttctatttccatattatttttgataatttttattctaaaattttcaatgataagcaaatctaaaacttattaaaataatactatattattattcataagaataatttaccacataaatacttaaatttaattattagtttcaaacaaaaatctaagtttaattttttgtgctaataatacctaaattatatttctaaaactccgtaagtatctgaggattaaatattaagtaattatccatttgtcatttttttatcgttatatttaaactaatattttttgaaaaaaaataaaaattaataacctaaataaattaagaattgctacatgatcacaatttacttaatacttaacttctaggtacttacaaaaattttacaattataaatttactgccaaaaattaaacttatgtatttatttataaccaataaaaaatatttataatgcaaattactctatttaatatatattaaatgattatatttttcttactttattgtgaagatataaaggatgtgtgtaggcattcttttatgcatctattaaaagatgctaagaatatatctatgtgattaagtattctttatagcattctcgatgaagagcgtaaaaaatctacattggccaaaaaaaaatataatattttattatattttcctttgagattatttttagtactttttgttaggggtgttcatcaaactgctcaaagtgtttaaattgtccgcaccgcaaaaaaaaatgcggtttgaaattctttttggtgcagtcgcagtttgaaattttcctaaatcgcgcggtgtggttttcggttttgaattgttaatatgcggttcaaaccgcaccggaccgcacattataaaaataccaatttttatatttatttagtctaatatgtgaatgtccaacccaaagcccactaattattgtattattaaaatttcattttttttctatatttattttcaagccttatgatatttatgataagtgttgctcaaactttattgtatttgtgatagtttaattattagtgatagtccaaaccgtaaaaaccgcaccgcattgcactattttttgcggtgcagtttctgcagttttttagtttcgaggtgcgagtgcggtttgagaaattaaaaaaactgcatgtgcgggttggtttgaaatggtcaaaaactacaccactcccactgcgaaaacccctgctttttttataaaatgttctaataataaatattttgaaaaattattaaaataatatcatatcattatttaatatatatatatat

SEQ ID NO: 24939 - DNA, 2234 bp, Cannabis sativa
tgttaaatcaacatacttgtgagtcgatctaagatcttggtaaaataaattccaacaggtacctataaaagttctaaaaatataaattaggtattacgaccgtaaaaaattaaacttaattatttatctgtaaacgagagataaatttaggtatttacactgcaaattactctaattaatttaacggtttatactacttcaaaaaagcaaacacttttggatttggatattttgtcaaatgatctattgaaattaaatttgatcaataaatataaaattatctattttcaatttttaatttttaattaattgacaaatatttatatatataattatatatcataacattaaactaaaacagtaagaaccaaaatggtataaattcttaatttaacttcattttcttagaactctatagtatggttttctaattattttttattccctcaattttatttgaagttgtcaataggagaatagaaaagggatcttaattcaaaagtgagaatgacaccactctttcatggcaaaaggacaataatcactttattccaccaatttgatcatatagatttttgggtaatgaataagaatggaatagggaactctatttttgacccctatagatgggaacataataagttataaaatcaaaattttattttcttgcaaaatgttctaagctattgattatctatgttggttccacttatttgaagataagtatatagaaaggtgatctcaacaacattaacatgtatattgtttggcactatatataatgtgaaaaaagtataatcggaacatgacacaaataataatataaaatagcaaaattatttattcctaaattatactacaaatattatttaaaattttatattattattaatatgatttaatataggattctgcatagtttactttgataattatataaattaatcacccataaggagttaccttagtttacaaccatatcattaaatagttaattatactaaaatattatgttatatttataggatagcgtagtataaactactaaaagattagtaattgttataataatcaatatctaattaaactatagctttgtcactatatataaggatagaccataataaaaaggagtcaattttttttattattcttataattacttccctaatttttccctaatttctcctaatatgcgtaatttttctttttcaatgcctgaaaaaaaaaaaaactataatttattattttttatatgatatatatagttatataacaagtaatttgctaattttcgataaattttaaataatttacatactaaatattgaactatattcttaatttatattataagtataatttaataaaaataattttaaaaagtaatgaaaattgaaaacagaggtaaagacactaattatttccacaaatattaaagtttttaagtatttttattatgacctattaaattaatgattcgtctcgtttgttgcagtttaaaaggaacatatcatcctcttacactaacaaagaaatcaatgaaatacgtgacgaatgggcaagtatgtcatgcagatgatggcaacaggaaaatgactaataacatagagtatgatgaccaatgatcgctcatggacgatccccatgtgatccaagaagacaattgataggtttgacatcgatcgcagatactattgtcttgttttcttggtttttagaaagtaatctccagttatttgattaaagtcccaagtgactacctggagacttattttgtttttagtatacatatttttagatgttctgaaaatattctacaaaagattgcaaaatgtaaaaacttaattgaatttctttcttttgtattgcattactaaactttgatggcatcttatagatttcatgaagctttaatccttttgaagagtgttaaatgtatgaatttttttataaaaatattattattgttattatgtttttttatcattgtatattggaaatttaaataataataataaaagaggagaatcgcattaacatttctattttacactttacttcatattgtccgtcggtttataactgtcattttaagtagtgtattttgttagttatagtctgactaaagtttttcccaacatttcttaactatcatttaaagtaattttttgccacagttataaaccgtcatttaaagagatgttttccatcagttactacccgatggaagt

SEQ ID NO: 24940 - DNA, 1051 bp, Cannabis sativa
tttttttttttttggggggggggggggataaccaacctactaagtctttctgtcttgtgtttcgtgttctaaccccttgatccattccagtcaagtacccgcgcgcctctaaccttctctgcttatgggtcgactatgtttatggttgagtttgaatgtgaaggggacatgagaagggtccttgagggtcaaccatggaattttgatcattgcctggttacttgtgctaatcctactgggcttgatacctttttacctaaccaactttgctattcaccctttttgattcaagtccatttcatcccatttggttagaaatcccttaaactggccaaaatgattggggattttcttgaggttgataagatcagcctctttaaagtttttggcctcttccttagggtcaggatccttattaacatttccaagcccattaccaagggtattctcgttgatttcaaaagtatccatcgtgaaaaatggctcaactttaagtatgagaatctcccaaacatctgttttcactatgggatgtttgatcatacacttactatgatgaccacccttttcctcctcctttgccttataaaatccctctgaaggcccttgccaagtcaaactttaaaaggaacccatttgatctctccaactcttttccccttgatgaactcactttccctaatactaatgtggatcaatctcttgttgctgcagtgagtcagtttctttctactgaagaacagggggctggatcctctgtctttgcttctcttggcagcatgactgatgttagtcctctgggaatggagcagggccttatctcttcagttgctcaattcaattcttctagtctgaatcctaatgtcccgacccactgtggtgagaccctatttggtgtcctttgcgacatgcctgccatggctgctcaacatgccactattaccacccatgagaatagcagttgtaacgtccccgcttcaagcctccattgggtcctcacacccacggactaatggctcttatacacgagtacggcactctggctgcttca

SEQ ID NO: 24941 - DNA, 2537 bp, Cannabis sativa
  modified_base (1872)..(1872): a, c, t, g, unknown or other
tttttaattttttcaacatttttttaactattacagttttaatatattttattctattaaaatattttatctaaaaagatctaaagactgataaaataattcaaattatattttaaagcttatatctaaatgtagttaagttataataattaaaaaaaacaggtactgacttattaataattgttcgtatatatttttaacttattgcttttaaacattaaggtttattaattatattatatacatttcttatgaaaaaaaatatgtcatatacataaattttttgtcccacaaaagtttgttgtcgtacgtggaaatgcataaatattgtatcgtatttttctttcataatatttaatttcccctatttcttcaaaaaaaaaaaattaccaccctctccctctctctgtaatctgtataaaagaagaatatgtattactattagtgttcctgaaaaaattaatgagttctgggtactggctagcagagagagtaaatttattttaaatatatagatttaagtccaagtgttaaagataaataaaaataacgttgtcatatgtgcagactgtaaatatgcctcgaaaatgatgattaattaattacattatatatataatattgtttaaagtactaataatgattgggtattttttttactagattggaattgaatgtcaactgagtgcggaggaactggctcaccaaatccagcaaacattctccttataattatcaattaattaatatatatatttctaatcatcagctctaacaacactcttctcatctttccatttatatatatatatataattaattgtaataagaggagtgagacaagtattcatatgtaacatgcatgttgtagatcagttaattagtcttctttttatttgagtatttttcatttgctttcgattaattaatgcatacatgcagatccaatatatccattaatattccgtattgtcaattaattatatatatattattaatctttgactatattatacagttaatcatatgatattcatcattaattaattgatattggagactgtactagaactatatataggtaatgaaaataaaataatttttttattatgtgttactgaactgaccatgtaacaaataaattatactaaattcttaaggcatgctaaaatttttcgaaaggtgttattctcttatatagcaaggtaagtatagtatatatatagcttgatttctaattatgattgtttgattaaaaccaaaactaataaagtatgcttgataagaccaacaaatatgaatgagacaaatatggtttgatcattcatatttgtgttttttttactctataaacaactcgcacccactactacaattttcaaaccatcccatcaagatattctgtcttatatatatgtttcacaaaagttgaaaaaaatgatttatccaatcatatcatatgtatatatataatatgtgcctatacataattgttttaaaggtgcacttttttaaaaaaaaattaaattacatttattatgtttttgttattattattcaaaaaaattatattttgtttaagaatttcaaagcatatctgcactttttaaaaggattgtattgaagcatttctatttgttttagtactctagagaatttgttgtagttttgcttgaaatgtataagtttatttaaaatattttgtaaaattttaaaaattcataaagacttagcacaccaaaaatagtataaattttgagaaattttgttttaaaagtttgttgtttgcgtgatttttttttattttataggtgaaaatatttaaatatatactgcttttttttattataattattttaaattttttaaaantttacaaaatatcttaaataattataatgtatataactataaaaagattaaactaaaaaaaatcttgataccgaaataaataaagattcatatgtatatcttttttaaattagaggatagattattatagaagcattcctagtgtacaacacaattcattattatgtaggttgttacaattatttaattcatacaaaaataattattaggcacaaaattaatgtgttaatatatggaaaatgccattaatatacctactatactgatgagtgtagtgtacaaaaaaaaaatgtttgtcatatatacataagggacctgtgcctacaaattcaattataatatatataaaataactctgatcaactctttaattttgctgcttgagtgtccctgctggtctggtctgctagttacatgtatttcagttttggaaggaagctatacatatataatatataatatttatatatgagcaatgtccaaaccttattctttaatttctttttttgccaggtaatattaattataaaattgatatcttctagatcaaataaataaatgcatgcactacaaattaaataatgtgtgcattatttgtatgccaattattattaaatattaatagtatttaatatttttttttataagtgacacactttttagta

SEQ ID NO: 24942 - DNA, 3316 bp, Cannabis sativa
agccacaaatgttgtggcatagccttttggaataacaaaattggagagaagtgacaagagatgtcatctatcaacaaggaagtcacacaattggagaggagtatctaagggctgacacttctcagccatgatgccacataggttgtggcatagctctcccaacaccccctgtgatccccacttagcataatttagtaattctcgagtaaagtgtgacaacttgtcctgtgagccaattttgagctagataactttagaattgtgtaatgaccatgagaaacacttagattcttcttgaaaatacttttacaataaaaattgagagggttatgcatatattttactgaagggtggtaactactttttaataaaaaaaactgaccactgccatgtcataatgacagttctcggccatgcatgttttcagacctttgggtgtgttttgactttttttttaatggagaatcatattttttggttttgggctcccaaaacctcaatgttcgaaaccctaagtggagaccattatcatcggttggaaccaaaagatggcagtggtcgaccatggcttgtgagaagcattagatgatgtttcttgcttattttagtcatatagaggctagaaaatactttggccactctagctcctggccaattggtgggagatacctcttccatctttttggcctatttagggctaaagagagggcaatggttggccaggatgtttacacaccttttggtgaccttcctcattttgttttgatgtttttatgataaaaagtacttttggtaaagaatctccttctaatttgatgtggttgacctgtgccacttttttgtgcataaagacgacacatttcgactaggcttgtttttttagttaaaaatagtttatttcacttatgtcatactctttggtgttgggggaccacattaaacaagtccaatttgatggtttgagagtagagagtactgccatcctcttgtggtactgctctccaaaagagagagagagcacggtcatcttcttgtggtcagtgctctccaaaagagagagaacactgtcatctttgtatggcagtggtcgaccatgcattgttgagtgacatgcttgtgcaattttgactctatgctcaagttcaagcttttttatgcttaaataagtcaagtccttgttgtttccttgttagatagaggtctgtaggatgaaaatccttgcgcagcccataaatcttaggtggggcacacttgggtgtgtgtcccagcactaaatagttggttagagtttcataactttcctaaaggcgccatgggatcctcaaatagcatgtcttcacttatttggtatttgtaagtcttggtcaaagttttacagttgatttaagtgtctcaaagtaatcttgacttgtgcatctttgtgcgagagtaactattttttttttttttttgcgaaaaatgacattttaatataagaggtcaagctgcttaatacttgagtcggccctatctattttagccgaggacgggccgagataagaaagaataatacttgacatattcttaatttacccatccaaaaaaagtgacatgaaatttaaatgcatgctaatggaatgccaattaaatggtaccatctaaatgcatttgcataaccaaaataataataataataataatacaataataataatgaagcttgaatatgtttgttactcatctcatctcatttcatagaatttcaataaactcaatcccaatcaggacaaaaacaataattttaaaaactgaagttaaatctagatgttgatctaaaaataaattaaatatattggttgttaattaagttatatcataagttagttgctaaaaaacaccaacacaatataatataattaaaataagtaaaaaaaaataaaattaataagttttattaaataaataaaataaaatttagtgggcctaaagcgtggcccaaaacaataggaacatggtagtacactacttcttctatttaaaagaatatcaaacgacaaccgtcgatttctcacttaccaaatctcaaccgttgattttcacctcacgtctcgaacttcgtcccacacgatctgacgtggcatttaactgtatttaaaatccggatttgaagtccgaactataaatacttaaatctcaaaaaatatatttaaattatttatttatttttaaaaaaaaagaaattaaaaataaaaaatggttgagagagaaagaacactgagaacagtgagagactcgaagactttctccgtatgaagcttcagattttcccgagaaaataaccaggtttttctttcttctttactttttaaagtgttttattgtgaatactctgtgttttgttttctgtgtttgatttatgttattataaaagtaactcgttttaggttgaattttgagcttttgggttgagaattttggtacgaacttagggtttttgaatttttgtaggaggaatttgtgaattgtggttttggtttctttcgttggtggttgttgtttaaggaggaaaatttatgagctttgcatggtgtttgggagaatgtggggaatgaagagaaatttcgggttttggatttggatctttcttttttttttttttgtttttgaattttgggtaaagttcaggttttggggatttgtagagttatggattgaggtttgaaatttaaatttagtttcccgtattgcacgccctttttaatacttttctaagtcttttgttctggacagtatgcgttttgtttcataaatttgacttttgctattataggtaactcgtttgaggttgaattttgagcttttgggttgaggttatggagagaattttggtacggacttagggtttttgaatttttgttggaattttgtaaattgtgggttttgtcggtttttttgatttctttcattgtttttggttgattaagtgggggaatttatgagttttgcatggtggttgggagaatgtgggagacgaagagaaatttggagttttggtttttgatctttttttgaattttgggtaaagtttaggttttggtgagtttgtgatttgtagagtcgaggattaaggtctgcaattcaaatttagtttctagtattgcacgctcttataatacttttctaagtgttttattctgaacattgtgttttgtttcatgtatttgattttcgctattataggtataactcgtttaggttgaattttgagcttttggtttgaggttatgtagagatttttcgtacgaacttagggttttcgaattgttcttggagaaat

SEQ ID NO: 24943 - DNA, 5610 bp, Cannabis sativa
gagactcacgaaagacatcttcggatggtgttacaacgtctcagggagcataaactgtatgccaaattcaagaaatgtgaattttggttgccctaagtaagcttcttaggccatgttgtaaacaaggatgacatcttgctggacccagtgaagattgaagcagttcgagataccgaagttagaagtttcctgggattagcatgttattacagaaggttcgttgaaggatttgccaaaatttctacacccttaacaaaactaactcgaaagaattgtaagtcgtttggactgataagtgcaaaaatagcttccaagaattgaagcagaggttaattattacacaagtactaaccttgtcaatcagtgatgagaaattcgtgatttactgtgacgcttcaaaagtagggttagattgcgttttaatgcagtctggtaaagttattgcctatgcatttaggcaactaaaggagtatgaacaacggtatcccacacacgatattgaattggcagcagtagtttttgctttgaaagcttagcgtcattacttgtatggcgaaaaatgcaaaatctacacgaatcgcaaaagcctcaaatactttttcactcagaatgatttgaatatgaggtagcaacgatggttagaattggttaatgaatatgactgtgagatcctctaccatcttggaaaagcaaatgtggtagcagatgctctaagtcaaaaaggtccaaggcaagtatatgaattgaaaaagatctcacccaagttggctgatgatatgactagagcaagaatcgagtttgtaattgggaaattagccaacattatgttacagtctgatttgttagggagaattaagatagcccaacaaagtgatctagtgttacaagagtataaagagaagtttgaagctggatcgacaaaggaattttcaatttcatcagattggttattgagatataaaggcatggtttgtgttttagctgatgatggtattaaataggaaattctagatgagtctcataccacgccatactcattacatctaggaacaactaagatgcatcaagatgtgaaagcactgtactggtagccaggtatgaagggtgatataggggaatacgtgtcaaaatgtctgacttgtcaaaaaatcaaggcagagcattagagaccagcaggattacttcaacctttgaagattcttgagtggaaatgggagaaaaaaactatagattttgtggttggattaccaaggatgtcgggattccatgattccatccgagtaattgtggatcgatatacaaagtcagtgcacttcttaccggtgtggagtatgtatacaatagatcaatacgctgatctatatgttaaggagataatttggcttcatggtgctccaaagtcgatcgtctcaaactgagatctaaagtttacatctaagttatgggagagttcacaacgagcaatgggtactaaattaaaaagttcagtatagtttttcatccacagactgatggtcagtctgagagaactattcaaatacttgaggatatgctacgggcgtgtgtgttggattttgaagattcctgaagaaagtacctttctctgattgagttttcatataataatagttatcaaggtattattggtgtggcaccatatgaaatgctatatggaagaaagtgtcattcgcccattcattaggatgaagccggtgaacggagatatcttggacccgatgcaatccaaggaactagtgaggccattgaaaagattcgagctcgtatgcttacctcacaaagtagacagaaaagctacgttgatccgaagcatagagatattgagttctagattggggggactttatcttccttcaagtatcaccaataaaggtgattcagagatttgtaaagaaaggaaaactgagtcccaggtttattggtccgtttgagatacaagaaagggtaggtcaggtagcctatcgactagccttaccccttgctttatttggagtttacaacgtgttccatatttcaatgctttggaaatatgtgtctgatacaacccatattctgagttacgagaacattgaacttcaagcggacttatcatacgaagaacaaccaattcagaacttggatgggaaggagaaggtgttgcgaaacaagactattccgctagtcaaagtgttgtggagaaacaacaaggttgaagaagcaacttaggagttagagtcgcagatgcgggagcggtaccctgagttattcaagtaaattttgaggataaaatttctataaagagggaatagttgtaatatctcaaaaattataattatgttaaattggacatattttattaaatatgtaattatataaacattaattataatcttacttaagttaattgtgaattaattagtagttgttgagtaaatgaatacttaagcataatttattaattacagatattttatcagaatatgtgggtattttatataccattttttaaataaaatattttgggttcaataacggtggaaactcaatggattggtcaaatatgtcacgacaacaatagaatgagatatattagaattatatcagattagtttagaatgttgagttgtcgtttaatcgtgatagttagtttgactaaaatacccctaggttatgttgtagcttaagtagtaatagagggtaaaatagtcttttcgctaaggttaatttttttgtcttatttgatgacccagggtatactaggctgagtattgaagattaagtatgagttttatttatcttttagttagatgattaggtttttaactttagaaaaataaatatcaattaactttcatctctctcttctctttcttcgaaaccctaagaactagctgaaaaacctaattaatttctactaaattcaaccttttcttagcagaataaatcaattctaggggttgtgcaacttggaggtaagttcttcatcttttctctttgatttttagaattttaagttaagtttgcttgggtttttgtttgaattcgtggttttaggtttaattaaattcatagcatgatttctaattttgatctaaggttgtttaagattgaatttgattattccagagctgttagatcttgaattgagttcaagaactcaaattttactcaactatggggattttgtcattttgatgtattactgagttttgaaggctggaatatgttgtttttatattgttggtatgatctggaaagtttcattaggattggaggagatttgattgggttttgatgtaaaaatcaaagttttccatttctgcagtaagaatcggttaaccggttctacagggtactgtggaaccggtcaatcagttgatcagtaggggaaaccctagttttctgtaatcaattccttgtttggagtgtttctccaaaacctatattatgatgttttattaatgtttaggctgtttctaaaccgatattgattagggtttgtccgatttgagtttagggcctattttgggacttggttaagttatttaccaaattttcattatcatggcataggactcgagatcatcgagcatcgttccactcagatcggcccgcacatctgattgttggatattagtaggaaaacccaattgaactatttagcatgtcaaataaaatataattattatcgtttgtgacccgattataatcgaggtaaagatatgataattaccgttgtttggaatgagttattactcacttttggaaattgttgataggctttttacttatcggttacttaattaagtaacgatagtgacatatgaagctcattggtaaggagtggtaaggatgctttataaagcatcaagatcggtttgtcttataagacaactaattgattatctttactgtattacgcttgaatgattgcttagtatatacaatgtattgtaataagattatgctttatgtgttgatattgttttatctacttttcttgctgagtctttgtgactcatgggtgctctgtggtgcaagtaagggcaggggaaacttgaccagccatgaggcagcccagcaatgtacatatcagtcgccatgtcttggctctcagtggacgagatccatcttttgttgtgctttgaaagtgtaaccctattttgtaatagttgttttgtaatatgttgtaaaatttataaacaaggggatcctcgaatccagtaacattttgaatgaaaagttaggttataatttaaataattcttactaaaagttttaattaaaccacacttttcttaaatcattagtttattattataaactaattaataaaagcacacacgtggtgcccttacgagttaggacgttacaatcacaacatataaattcaatgtcacaatgctaaaatgttagagagcttattttgggaggactcacataggccacaacattggtgaatcaatgtcatggcacttcattttgttttgcccagatttttcaacacgggctacgacatgagaagtgcaatgacgtgacccacctcacttaaattgtgattgaagcctctttaaaaagacatgggtcgcgatatggtgattccaatgtgtgacccacctatgatttttggactgatcgagtttagttaacctaattcaaaaaggagaggggttaaacagtattggagatgcgaaaactaaagaggatgaggaggttatagaagcgcaatcattatttttcaagagttattttcttttacatttgacttatgttttcaatttatttattgcaattttatagaataatgattatgagctaaactcatatttaggttttttaacggagattgattgaaattttttatgaattaatgcaagtttaattattcttttttattgagtgtgtgaactattaatatttatgtttattacatatatttgattggtcatgttttatatgatttatgattctaatataaaatctaaaagtaaatgttggttatgctataattgaatatatttttacataaaacaaaggtatttgtatggcttgtgtagtatttagattattacttaatgatgattatatgtatattatatctcagaaatttagaatagtgcatacaatttaagatttttatgtcttaattaaaatagagattaatttataatttgctataacactagataaaggaagagaattagttgcattattgaactaaaaagtagaagcaattgagattaaatttcctaactttctaaatcattgttatttgctactttttcataattgttaattatattaattcaaaacatcaagcatttgtttatcagatagattcaaagatttaattaattagttatgggaaatttgaaattccatgcttaataaactcaaaaattggtcccctaaactaatactatttgaaatgggataactttttctaaaacccaattttacccccatttacattaccccctcccctctctcttcttctcaattcttcactgtacccgaactcccctcccacactacccacccatttttttttctcttcactcattctccactcattttcttaacttcattacactataatatactacactacaa

SEQ ID NO: 24944 - DNA, 3385 bp, Cannabis sativa
tataatcaaatcatgattatattttctcaatattcactactacagaaagtataattcacgtcggtttctaaatgtcatttaaagaatttacgtcggtttataaaaccgacgtgtatgccatagacgcaaatagttttttattagcgtcatttttaaaatgacgcaaaaaacaattatcttcatttaaaaaccgacacaaaatatacacacttttattttatcttcaacgtcggtttggaaatgacgcaaaataatttgtggcatttctaaaccatcacaaaaaagttataccgtcagttcaaaaatgacacattaattgctaaaatattttttttttcacttattgtgtcagttataaaatgaagcataaatacaggtaaaagaaaattgtaaatttccaagcaactctgatattataagcccataacaatcttccctattagaattaccaccaatgctctaaatatgttagaaattttctctagatagaaaccaaatataaatcatattatttacctgttcattttagatgaaacttatttaaaaacaaactttgttcactgttcaacaaaaataacataaccaataaaaacaaaaaattaaaacaaaattaaagctaagcctgaataaatttaatggatgacaatatttttggatactcatatgagtgaagtttttaaaaaattaaatctatgaaaattgggtagagtgtcatcatcacaattgacagaatgaacataaagacccaaagatatatggccaagtatggacctcctatctgcaactacacataacataatttttcaccatttaaagaaaggaagtgaagcaatatagacatcaaatacaagatggctaagattactcaagcaaagtaaggtttagttaattgttaacaatattagctagatcaagaaaagagattatacatcaattcagctttggcctctgttcaactcctttcgtggtctttttctctgaaaagaaagaatacaaacatcacaaccaaaccaaataatgaaaagatttatttggttactaagaaagaacatgaacaacataggaaagtgtaattatttatacgccatttttggtgtaaattgtgtgttcatatatcaaactctaaatctaaaaattagcttaaatacatattactatactttctcagtataaatcgtatgaaagccactttcattgaatggccatattgggagccaaaattcatacctcaagaaacctaacttcacttcttaaccaataacaattacaagataagaatgtcaatcacctttgagtttctactacttccagtggactcaaaataacaatatttaaatctttgcatatgaagaaaacatacaatgacaaattactatgttaagaattctttggcatagaaaattgcatggcaaccgaaattgaggcaattatttttcaccatgctgagaaaactgtttttttctaggcaaattttcaagaaaaagaaagtgtacaaacttgatatacattagtgttcttattttttaatagtcgacttcaataaatacgaaaacatgtgtcttaattgttaaatctttcataatctttcatattcaaaaagttacattatttccttctaatgaagtggcacaaaacatggaacatggaagaaaaaaaaaacaacaacaacaaaaacaattatccacaagtcctctaaaaaaatcagaaccaaatttagaacaatatagtttaaaccagcaatgtctattatgacattgatatagaattctattctaaattgagtcaaagtgataatgtatatctatgtatacatcgatctattttttcactttccgaataattttctctacctcacaatccaaccaacccaactctctttgcatccaatcaatattatttttcaaacttccttttccaactaaagattaacacataaacacataatgcttcacagtttctttacaagaaccaaaagttgttctcagtttcttcacacaacatctacaatttaccatattacatcaacataatcaacaataaataataaatgaaccacagaagagaaacatcaaccaaaatatttcaccacaacagtagagccataaacaaaattccccaatgactcatccatcaatagcataatgctctaagcccataaacaaacttatataacttcagctccgtaaattcccaccaccaaaagaataaacaaaaatacacaaatcgtgagtagccattttcaattagagcagagtacaaaaataaaaatcataaaaagttaaattattaactgcatcaagcaaatttactcattctaaaagataaaataaaaatgagaaaaaaccttgcatcaacagagcctttcatagccacattggaccaatctttagcaacaacgctagtcttccaatcaaagtcaacactgaaggtgatttgagggttgtgatcgggggcaaaaaagaacgccatgtaatctccagcctctgccgcaacaaacgcaaactgccccaacgtaatgtgctccgcatgatgatagctgttcccatattgtgaagtaacctatataaatgcaataaaaaattaaatacaatcatgcaaaattgaggacgatccagttctcaaaatcgatatgaaatcaagggtccgaattagagctcgaattggagagcctcagatgtagagaataaaagccctaatattttcaactagaatttttaattttcaaaaataaatgtatatatatacctgaatatatagggttattttatgcgagcttggtctgagcagaaacgacaatgttaggggccgagcttggctcgaacggagaagagaacgagatcgggaggagagttgggattggggtggagtgttgcgtcgatgactagaacttagagaagagggaacggggcgagcagcggggttcggggcgagctttgatcgccattcatggggttttgggttagggcggagtgagagagagagagagagagaagagagcagcgagatgtgtttttgcaaaatgaaactttgaagttatattagggattttgtaatatatttaataagtttgcctcaattaataaaagatgctcaatttaatagcgtcggttaccaacaaacgaataaaacaaacatttttttaaaaaaaatcacatttgccgtcagtttatattttagcgtcgaataacaatcgacgcaaactactaattgtttgcgtctgttagaaaccgacgcaacaactcaaccactattttttgcgtcggtcctcaatgttgactgtcgtgttgaccgacgcaaatcatgatttttgtagtagtgatttaagccttacttcaatcaatctcatgtctatgcaaactttgtacaacaattcattatgtacaaa

SEQ ID NO: 24945 - DNA, 4692 bp, Cannabis sativa
atcttgagtttggaccgaagatagagatatcgatcagtagacagaggcttggttaaggcatctgcaatttggtctatagcaggaacataccgaatagatatctgtttagagaggatgaggtctctaacaaagtgtaagtctatctcgatgtgtttggaccgtgcatggaacactggatttgcagcaatagcagctgcactttggttgtcaacccatagtatcggactctgaggagaagtaatgtgtaactcggacagaagcgatattaaccatttgatctcagctgcagcattagctagagccctgaattcactttcactgctggaccgagcaacgacctgttgtttctttgcagaccatgaaacaagattacctccaaagaacataacataacccccggtgcttcgtctatcatcaacacaggatgcccaatccgcatcagagtacccttctagagtcaaggattgggatggtgtgatatgaagaccatgatgtatggtccctttgagatatctcataagacgtttacaagcctcccaatgtaaagatgtaggagcatgaataaactgactaagtttatttataatgaatgctacatccggtctcgtgagagtgagatattgtaaagcacccaatgtgcttctgtaaagtgtatgatcaccaaagggttccccttcagaaagagagagcttaagagatgaacttgttgggttagaacaaggtttggctccttccatgttgagacgaaccaataagtcgataatatatttcgtttgtgacaaatacatgccagagttatctcgaaaaacctctaccccaaggaaatgatgaaccgggcctaagtcctttaaagagaaggactggttaagatcagaaataagcttggagatgagagaagtatttggaccagttaccaaaaaatcatcaacataaacaagaagaattattatgttgttacccgagccataggtgaacaaggaggtgtctgattttgatgcactaaaaccccaatccagcaatttgtctcgaagagtttgattccatgcacgaggagcttgttttaacccatagagcgccttgtgaagttgacacacatgggtaggtttagttgaatcaacaaaaccttccggttggctcatgtaaacagtttcatgaagtgcaccattgaggaaagcattagatacatctaattgtttgacatgccagtgaagagagacagctaaggtgagaatgattctcactgtggctggtttaacaacaggggagaaagtatcctcataatcaatccctggtgtttgcaaatacccctttgccacaagccttgatttcaagcgatccagattaccataagcatcaagtttgaccttgtgtatccatttatttccaatgactgtcatatgtggagaataaggaactaaagaccatgtacctgcctttttgagagcatcaaattcttgattcatagctttgaaccaccttgggttgtttagagctgctgtagtgttttttggttcagatgggataagggattcaggtagaggatatttagtagcagtgtaagctttgggttttctaattccacttagagaccgagtttgcatattatgagtccttgaagagtggtgacccgtaggctgagaatcatgggaaatggtaggatgtatatggggtaaaataggtgaagtggtgactgtgtcatgcaatggtacactagccgttggtaaagtggagtgtaataatgggttggaattactttctgcaggaatagttggtaaagtagggtggcatagtgtattatttgatgtgtcatgggtggtattgggtaaagggacattattggtaggtgtgtcaatgcttgagaccggtacagtatgtggaataggatgtatagtgtcctcttgtgggggcaaagatgggataggccgtgaggtacaagaggggtgtggggcaggtggtccttgttgtacagtagtaggtggtacaatagtaggtggtccttgttcaatagtgtggtcaatgtcctcattagccgttggtgtaggtgtaagatgagaagaaacaacatcaatattagataatgagggagattgatcagtttgaaaagtaaaagtagggagttgagacaaggacgatacctgtggtgttgatgctttttgagatgatgacaaggcagggaaatggccttcattgaaggtgacatttcttgatatataaatccggccattgggatgttcacacaagtaccctttgtggtgagatgagtagcctaaaaataggcattcttgagatctcaactcaagtttgtggttattatatggcctcaaatggggaaagcaactacacccaaatgactttaagatattataatctggtttagtgccaaaaagacactcataaggactcatattaccaataactggtgtgggaagtctgttgatagtgaacacagcagaagccatagcataccaccaataatccatactcaaccctgcatgagctaatagtgtgagaccagtttcagtgatgtgtctgtgtttgcgctcagcacgaccattttgttcacttgttctaggacaaggatgttgaaaatgaatcccttggtcagataaaaaccgagcaaatggtctatattcacccccccagtcagcttgaacacttttaataggtagattaaattgtttttccacaagacttttaaactttatgaacacatcaaaagcatgatttttgtgagttaatggaaaaatccaacagtatctactataatcatcaagaaaatgaacatagtatttgaaaccatcttttgagacaacatgggaggggccccacaagtcagtgtgaatgagagctaatggttgggtagccctactggtagataaggaaaatggcaatttatggctttttccttgatgacaagcattgcaaaattgtaatgcctttagagaacctgtatgagagatatggggtaaaattttggctaaagtattctcagcagggtgccccaatttggagtgccaattatttatgtcattaaattttgatgtagagtaagcttgtggaggaacatcaaaaacaacttggctacttttattaattgttggagaattacaatagtcggattgtacattagaatgacaagaacaagaacaggtacaacatgaattatctaccctagaacttgtggtaagatgacattgaatggctgaattagatgactctccaagctggtataaaccatctttggccctccctttaagaagaacagtccctgttaacttgtcctttacaaagcaacaagatttatgaaattcaagaaagatatcattgtcggtggtgagttgagaaacactaactaagtttttcttaatagctgggacatgtaaaatgttttgtaaatgcaaaggagatgaattgctagagggaatagacaattggccaatatgggaaatgagtaattgcttaccattacccacagctagagactcggttccttggtatggaatagcagtgtccaaagtgacattgccatgactgacatggttggtggcaccggtatccacataccaaagatcatcatctcccatatcaggaagaattgttgtggttaaagcctgtggatcataggtagattcaatctcagttaaaaaagcatgagaagaagaagaattaccatacttgggggtggtgaaattcttgtcaaagcggtagtgacaaacagccgctgtatgaccaaagcgaaggcaaacttgacacattaatctggagctattcccacgcccaaagaaacgcccattggtacggttagactcagcatttggagcacgagaagaaggcataccagattgggaattacccccatttcttgactggttgatactcaaattggcttgcattttgagagataaatcggtgatactactgtgatgttcgagacgggattcatgagaaaggagcagggcctgtacttcctcgaaagaaagattgtcactacgggatgtgatgccggataccactggatcgaaatctggtccaaggccattcaagagttggagaaccaagtcttgggtggaaacaggtgaaccagcaattgccaaagcatcagcagtagcttgggctttctccacatattcagcaataggtaaggtgcccttttgaagtcttgaaaaattacctttcaattgcaagagccgtgccttagtttggcttgaaaatcgttgttcaagagctcgccagaccgtgaaggatgttgtaaatgttgccacagaagcaagaataggttcggacatggatgaccgaatccaagaaagtaaaagctgatccttctttttccattgcaggtactctgggttgggggttccgttgatcagatgttggggtggggtgatttcagtgaacaagatttgatcgaagtcatgcccgattacagtgggaacaatttgggatttccaagagaggtaattgaggcgatcgagtttgagggtgagggaagaagataacgagttggcaaatggattccagtgaacggcaggggcagcaggagccgtaggggcagtgggagctgtaggggcaggagtagcagcggtagccatggtggcgagaggatcggaggtggaagattccattgacgcaagtcagagacgatgataccatgaagaaggtaaaaaccagtggagaagagaaaagctaagagct

SEQ ID NO: 24946 - DNA, 4368 bp, Cannabis sativa
aaacgaaataatagcaatgtacattaataaaatgaatagaaattatatttatactttaatagacgttgagattcaatgttttctctgctaaaatcggttatcggagttatactagtacatttttttataataggttcggttatagggatagaggggaaaaaaatcaaacttttttacagtataggtttaggtattaaaaatagaaaattttaaaataaaaatggggtaagggagaatgagacttttttatgggtggttggcgagaggtatggggctgatatggctggctattcttcgtgttcaacaagttgtgaaatgagtaagacgatactgtaggggtctgatatatataaccctattgcgttggttatttggtattaaccgacgccataggtgtcacgtgtcgaattacagctgcacctatgacgtcggttaataccaaataaccgacgacatagggttaataaaaaattcttaattttaccccaacccccaaccgacggcatatatataattaaattctatacctacgattttaactaaaaaactgcctctaaatgtcaattttaaactaggcgggtatttcacaccctttagcttcccttttcataaaataggtgaaaaaaactgcctctaaagcccataattgtagtattgttagtgagtttttaagaaaaaatcccacaaggtttaaaaaccattatgagtgttatatcataaactatatatagataattattttctcttttttaatttatcccaaaattagtattacattattttttatgggtgattaaaaaatttaatcttgccaaattaatttttttaatagaatgtaacatatattttttttttgtatttttcttacaattaattaatatatatatataaatatataagaaagtataggaggagtttatgtgacatcttataatcttttctttctatttttctaattttatgataaatcttcttattttgtttgaaaaaaaatctacacatacaaaataaaagtttcacatcgtttaaaaaatcttttaagtgttatctatatatgaaggttacaaataatattttagttacatttatttttttagtctaagaatttttttttatcttttgtactattgattactatcttttagtttagtttatcctaaagttagtatgatttattttctattgtcatcctacattcactttagggagaaaatattctatcgatacaataaaataaaatgtaaaaactttcataaattcaaaaataatatgttaaattatttctttctattaaagaaaaaaaaaagtctaaataatattttaaaaacaactaaatcatcagtcacaagcccaatttattaatttagaaactgttatctttttcttttattttattataaaaaatccatgcaatttctttctaccatttaatatttgtcacaaaattgttaccttttaatacattttaaaaataacaaattatacttttaatttcagtactattactttgtttataatacacacatcaaaatgttacattttagaatatatcgctccataagtacaatatatatatatataatttacaaaagttgggcaacattgcgcgaagcgcggcttaattcccttgtatattaataaaaaaaaaaatataatcaataagtaattcataagcattttggcattatataatggaaacaagaataaagactaaagttcctaaggaatcaccaccatactcactcaaccttataaaatgaataaataaaaaacattacttcacaatacacatatagttacattaacatgtatacgaatgttatattatcatataattaataacaactttattagcagccaccaccaccaccacagccacctcccccaccaccaccaccacagccaccgcctccgcctgcagcagcacctgtcataatagaaatattattatgatggtgaccaccaccagaatgatatttcgaatgtactggattattcattttcttcttctcttggctccaaatgcagcccatatatatatatttgcccagaaaaccacgaaaatacgtattaatttatagtaactctttagtcttaattaaagacaggattaagaattaataatataaagcttgtccgaggttaataacaaacacacaacccatatatataactaacagaagtttctttgaaaattgatattcatcgtaacttttcaggatatagcaatgtgcatatatgttttaattaagctataagaaaagtaaatggcgtgagcgtgttgcgtgtgtaaataatacattatctcttccatctttgaaatttgattactaatttctcttattttgaaagaaataatactaactattggtcaacacgtatatgtatagatggagatttgaccagtttaaacttcctggtaatatatgatactcgaacacgggaaattgataaacagtatatattttatattgtttacttattattattatgtctacattttattacatattaattatgataaacataattgctttcaaaataaattatgataaacataatttaaattttatatagaaactataacataataaatttgatataacattaatttgcaatataagatattattacctataatatattgattgcgtttaataatatttttttaattaattttttgtttttttatagaatagtggaaatatttttaaaaacatgttctataaaattgtctttactttttaatattttaattaagagattttaaaaatcttgaaaattaaaaaaaaaatcacttaaaaagttcttattttttaacaatttttgattccgaccgtaacctggaccttgagacccggcctctggccttggccccagactataactccggccccagacccaattttaggcctaacttaaataaaatcaaaaattgaaaatgaaaatgaaagttatcaaacacacttttattttctgtttttaaaattaaaaaataaaagtggtgataaaacatatttttagtttttaaaaataaaattttaaaaacacaaattatacttttatttttgtgatgaaaaatttaaaaataaaagtattactaaacgtcccctaaatatcatttatttatgtttttacttttcaaattctattagatataatattattttattttatttattaaaattttttgtgaataatttagggttttttatttaaaatataggaaaaagtgcaacataaatattcagtttgttagatttattgttaataaatattcaaatttaataaaaacggcatacatacctaaatttgcaaaataaacagtttaatttgtatctattttattaactagagaactaagctgcgcttcacgcggtgttatccaacttttgtaaattatatatatatatattatacttattgagtgatataatctaaaatataatattttattttatgtattataaataaagtaataattttgaaattaaaaatataatttagaaaaataacaattttgtgacaaatattaaatgacggaattaacaaaaaaactgcatgtgtttttataataaaataaaagaaaaagataataacttcttaatttaataaattggacttgtgatttatgatgtagttgtttttaaaatattatttacttttttttttttttagaaagaaacaattttacatacacttataaaagttattacattttattttgtagatgtgaaatttctactttaaatgaaaatgaaagtcatgatctcatatgattaattattttcataatgaaatgtgtatttatcttactgatgataagtaccgtaggaagttgattgagcactcgtgcgatcgttataatcattgaaaaataaaataaaatttaatttatgattatttagttatttcagaaattcatatatataagtagttgttaatatttttactaaataagtaaattttataaataatgtgtttgatattttctttttatttctaaataaaaaatggaataactttttattatctataacctatataaaagtgagaataattttttgggctttcactaattaaattacacaattagccttcactatatattcaattataaaaaatttaaactaaacaattgagacatgtacactacttatttctttttcttctaaactaagcttcccctttaattaacattttaattttatcttttgtgaatatttgtaaaaatgatcattttgtcttatattttgtttggattgcttgttagagattttataacaatggaagaaaatcaagatttattacaactctattgtaaaataatacaaggactaaaataagagattgattaaatatatgcta

SEQ ID NO: 24947 - DNA, 2791 bp, Cannabis sativa
aaggaaattttagattatagtactgtaaaatgataaaaaaaaaatctcaaaagttaaattgtaaccataaataataaatctcagttataacacaattaataataaaataagtataactttttaaaaggaaaataattattaaatttaaacatacatactaaatccttttattaaaaaaaaatcaatacaattaaatttttttcttcaataaaaaaatcaacactattaaagtaaaaattaaattgtgttattatttattttttgaaatggattaaatagtgttttgatggtgtataattttccttttcttttctctctagattaggacttttaatttttttttctttgaagactgaaattacaatcatacccttttctttttgaataaaaaaaatctgatattattataatgaaataaaaaaatagagatgagcatttatatatttggcattaacaacaaaaaaacagaatgaaataatttctggttattcctcaaaaaatcctctctttaataagaaacccatttgccattcaaattcaattcattcattcattcatacccagaaagagaaaggaaaacgcatgaacagaattaactatgaaattatttggcaaatccaaattaaaatactaatcccaaatccaattccattcttaataccacaaaattttatccaatcaatgattttcctttactattacaagatcttctctcttcttcttcatcttcatcttctcaacctgaatcttaccaacccagaaaaaatactaacagtgaaatccaatattattattattcttccatttctagaaaaaacccattaataaaaatcaaatctttttccaaaacacactactcaaaatagtactaaatatattcttacagtactatatacaatatatatatgactgtttgttaccactcatcactaccaccaccaccactattacccctgatttttttacccaaattcattctctgctgtggcagtggtactgtactactactactcctcctccttcttcttcttcttctctctctaaaaccatttcagtacagctcaccaaaacaaaacccaacctgtcctttttttcattctatgaaatttgaaccctcttcttctcattgttataactattcatttccgccgttaccgttatcgttaccgttaactcaacaaacccaaacccttttatctttcgccggaaaaaaacaacacccaacaatggattactcaaccatgtccgccgcactccgtcgccaccaccgtctccgaaaggagaagcttgttgtaatcatgggagcgaccggcaccggaaaatctcgtctgtcaatcgacctgtctgaacatttccctgttgaagtgattaactctgataaaatgcaggtttataaagggttagatataacgacgaataagatttcagtttctgatcgttgtggtgttcctcatcatcttttgggtgatgttgaccaagctcatcgtgatttgactccgtctgagtttcgttcattggctggaaatgctgtttctgaaatcactgcaaggagaaagcttcctgttcttgttggtggttctaactcgttcattcatgctttggttgtcgaacgattcgactcgtccgattccgacgtgttcgatgaacgttccaactcaccgatttcaaccgagttaagatacgactgttgttttctctgggttgacgtgtctgtaaagatactaaccgattacttatcgaaacgagtcgatgatatgttgaaactcggaatgttcgacgagttagccgagttttacaactcagatgactcagaccacggaaacgattccgcaactcggaccgggttgagaaaagctattggggttcccgagttcgataagtattttgggaaatttaaacctggcgaggaaaataataataataataataataatgatcaggtgcggagaggtgcatttgaggatgcggtgagggctattaaagaaaatacttgtagcttagccaagagtcaaattagtaagatcgtacggttgaaaggttccggttgggatatacggcgacttgatgcgactgaggctttcacggcggtgatgacgtcagaacccggcgagaaatttacggagaattgggagagacaggtattggaaccaagcgtggagattgtgagtcgtttcttgaaggagtgagtaggttttgccaccaatttccagctcattaatttatttttaattttgttaaagaaaattttgttatttaaaattaatacacagaaggagggaaaaaaaaaatgaattttttcatttttttattcttttccgtttttttcagtcttttatttgggtctcttcttcttctattttcagtctttttatttaaatttttattgtaagtctgttgtttgtgaatatatataaaaataattagtttaattttgtctggaattttattatatttttttgtgtcattatcaatgagatatgttatataaaattaaccttttatctttagattcatatatggacattagaagagaatatttaggaagaaaaacgaaatccatgaattttaaaattacatatgtttgtgggcaatatttatataaagatgtcatataattgactttaatattgtggggttttgactttgatcaaatgactgtatttattggctaattaattaaggaataattatatgattatattttagattaggataagaaaattacatgtttgtttaagtggcttttaagtgtgatattgatattttgttgagtggtttgcgttataagtat

SEQ ID NO: 24948 - DNA, 1543 bp, Cannabis sativa
gaagcttatgatgtattcaagagaatggagaaagaaggatgcgagccaaatgttattacctatactgttctaattggtgctctatgtgaagcaggtaaactcggtattgcaaaggcgttgtttgtgaagatgaaagctagtagaagtcgcaaacctaatcgggtaacttacattacttttttgaacaagttaagtgattgtggagagctggaaacattgaaagaaatttggaatgaaatggaagttaatggttttgctcatgatgtagttacattcaccatttttattaaaggtttgtgtaaagcaggcaatgttgatgaagcgtttcatactttggatgtcatgaagaagaaaggtatctcaccgaatcttcttacttacaacactttgatcgggggtctatcgagggaaagtagattgaatgaggctcttaaacttttcaataagatgaaatcttcaagtgtcatgcctaatgcagttacacatagttttctcatttcgggtttggcaaaatttaatggtgtggatgaggctatagacttttactatgatcatgtaggtcgcgatttctcccccgttcctcatatgtacggcccgctcattgatggactttgtaagttaggaagacatgaagaagcaatgcttttgttcgaggagatggcggaatatggttgcaaacctaacatagtgattttcaatattcttataaatggattcgggaaaataggagatgtcgaaactgcgtgtcaattgtttgaaaaaatggttaaagaagcaatcagaccaaacttgaagacttacacaattctactggaacctttatgtcgtttaggaaaaattgatgacgctttgttttactttgaagaactaaagcgaactggccttagtccggatttaatttgctataaccatttgatttacgcacttggaagatcacgaagagcagaggaagctctatcgctctacaccgaaatgtggagtagagggatttttcctgatctttgcacatacaataatctaatactcagtcttgggattgcaggaatggttgaacaagctgtggttgtatatgaagaactacaaagtaaaggttttgaacctaatgtttctacctacaatgctctcattcgaacttacagcttatctggtaatcctgatcgtgcctatgcaatttacgagaaaatgatagttgaaggttgcaacccgaatgaagaaacgtttaaacaacttcctatgcaaacatgagtgcttcccttttttaaaaaaatttatggataaacataaaatttcttgtaatggtatgagagttcaaatgtagttattaattatactataatgtgtaatcaaaaagtaatttaaaaatatcatagatttttgttgttaattggagagatgcttttcatactatctaaaaattatctaaattttaattttctttttgttgtcttttttgaatgtttaaattcatatgaatggtagtctttaatatatctattctatataaattgtgcctatataattgaattcttggtttatgagaaat

SEQ ID NO: 24949 - DNA, 2288 bp, Cannabis sativa
tttatttttgtttgtaaatttaaagcgttaattaaattcatcattaaatgttaattgggattgtcattgtaaaaaaatttaatttaaggagtttgtcaaaaaaaaaaaaaaaaaaattcaaaagttaagtatataaaattagatatgagtgaagagtgattaccttgagggaagagagtttgggagcaagaggaccttcaagcctaaactcatgcataacccagtcagttttctttccttttggagctcttccttggtaaaacaccaaagtctttctcatcccaacaaggccattattattattactatgtgattttactcctttgcccttgccaaagattggtctgtctttcccagtggccttccaatacccagatgcagtggccctgttcgtacgaagcccagtagcatattttctatctctttgactgtaaaaataccactcttttcctcccacacatgctctctctacacacattaattaattaattaattatcattacaaacacaaattaatagcttcattcattcatatatagctcaaacctagcttatctcattttattgatgtttaaacttttagatttttaccaatcaaataaacaaatagtttcaatttacttggatctgtacaaattattgtttaaacatgaaattaaagtaataaacgtgcaagtcttattaccattaattttagccgaaataataaaaaataataataatttcaactaggctagttaattagtaatagtacgtactacgtatatatgaaagaaataaatagaagtttgaaattggaatatgagaaaaaagtcaattttttttttaaaaaaaaaaaaaaaaactcttctaattattaattggggtgatcagtaaagaaagtaatttgaagccaaagttcaactaatgtacttataatgacacgtggcgaattactattggttggaaacaagacctttgctcttatcccaatcactttcacagctttgagctttggcttgggacaacaccaaagctaacatccatttcttcaaaaagtagagaatatgatcttttttgtttctattcaaaatttcacatataagacattacccttaattaggacaccttagcaataatattagcttttctttttcttttgattttgacataaaaacacatatatacccccctcacacatatatagcatatatacataatgatattagggaatattaaagggataagacttgtaatgagtattctatttgtaaattgttaaacatattattgagaaattaatcattttagtggtttgcagttaattataaaaaaaaaaaaaaatgcatatatcactgaaaataaaaggggtgtttgtgaatattcttgatataaggagggtcgtaatctaacttaaaacaataatgattattgtgtatattttttcatgtccataataaattatagaattagtgggtaccagaaaaaattaataataatttgaaaacattaattactttcacatggctgttattattattttatttaagaattaatacaaattttctatggtgatgattcgtgacacgagatttaattgtgtacaaagcccagaataaaaattaatttaacactgttttttttttcagaaaaataatatatattggaagtaagcaacacttaaaatgaacatgtattgttatatattctctttattattgaattttttctttatgcttaaaaaaataagaatctttacttttgtatatatctttattaacattgatgaaccatataatatatataaacttaattatattgaagataatattttgcaaaacttaacaaaaaaaaatggtttttattttaatattatgaagtaagtcaatcataaaaataaaaatctgaattctggaggagcctcatttccccaaccacataagctgagcatatatataatttgtaaatatatatttaacagagacacaaaccacactaattaattattattattattgatttatatattattataatatatgtgataattagtaatagcagccagtgaggttgctttcgcatcatgtgtactgatgatatatatctaatttggccaaacaacagataatgagaagagatcataataagaaattttctcactcatatacaactggcaagtacgccactaaaaaattaacttcacataaaatacaaacaatatatcagttaatattattcccccattattttgtcaatatcctatcaaaaaatctcttacacaaaaacaaatattagaaagaaaaaaaaaa

SEQ ID NO: 24950 - DNA, 2248 bp, Cannabis sativa
ttttgcaatagaaattttattttcacagtccttgtggagacgatactcattacttatcactgtattacttgtttgtgactacgtgcacttgcgtatctaattctaacacaacaaacaacaatacatttcggtttgaatgaggaacggggcgaggatttctcatcaaaatggggaatggggcggggacgggaattactttttgtccccgaatgttaaacgaggcggggacagggatcacaacactccttgtcttgatggggacccgtttagtattttattttataatttataatgtatatttgcatttttttagtatactagtattctttttgtgaaatttaagttgtgttttgaataataattaatttttatatagtttaatatttttatatatttaaatttttattgtaaattttattttttattaggagattgtatttactttataggtagtttaagactaatatatgaatttgcatggatttgtttttgttgtatcttttgaatgagtatatataaggactaataaatttgctgcttacaaaacttgatctcacaccaatatttctgtcaatgattgcttcaatgcccaatctctcgttgtaacaagttatctatggtttcatgatgtttaattgtgtatattccaagttcaatggcaactatattcacctgttctgttcatgttggtttataatatgctcaaaactcaaaacagagccataccagaccaaccaaccaaccaacactcacatgaaaaattggtgtgagtttggtctgtgaaatgttctgttcttgttagctgtattgaataagatcccatgtgaatttatgttttcttttctcatctaaatttgaagttgcttaattctaacggcataatcaactagtaacagaacatgtataatagtattatgctactttcttcaaataaaactgtaaactaggcaaatatttatgtaaaagactaaaagatgactgatgacaatagtattattaccaaaatattacaaaaccataaaattgcattattatcttgataaaagaaaaaaatagttatatcgaaacaacataggttatgaggctaagtaagaagtacgatatgatgagtactatgatgataatgttagtcaacgcaagacctttgactattttggagttgaaaaagggatatggctctaataccatgttgggaatcatggagttccatctcaaaaccaattggcaatgagtagagtagctcatgttcttatatatagctcaatattcttacatttgatccatgtgggacaatattgtccaataaactgtagttactcatttagttttccatcgttgaagtcattgtcattgagttttgtttagttgcagataagaatctttgtttagcttgttatcggtataggcaaaagtcatcagtttaatatctcaaatcctcctcactttgagaatttaactttggtcttgagcaatttcgaggacacagggctagtgtcaaagcttgaaaagtttcaatttaaataactcttttgacaatgaagtgtccgttataattgaattagctctaaacttaggatcactttgttatatagttaatactaaatttaaagtatcaacagcgtcatctaatttgataaatttttttttgaatcttaattgctcatggaatagggtaagcttgcatgttgacttagttgagctatgctactaattgtcttattaagtataagggtgtttattaaagtttattttattggtctattttatgtttaactcgtttgtttaattttatatatgtaggctcttattatgccagaaaaatctcaagaagatatgttcatatatgcatcttagagtgtatactgaacgtcaatcagagaggcattcagacttgagactgagagaccctatgcagtagatttctccttctttaaaaacaatatcaatagaaaaagggaaatcttttaaaaattgtgaaaaaattacagctaatagtgctgattaaattaattaaactttaaacaactaaacgattagtagtgacaaaattatcaaactaagaacaacaaatgtattgaaaatcagaaccaacaaaatgcataaaataaagaaatcaacactaagatatatactggttcaagaccgattgatcgacgtgatctatgatactactctagttgtggaacacctccataatccttctttagtgattgagcaaaaataggtacaaaacagtcgaggcgagatt

SEQ ID NO: 24951 - DNA, 2051 bp, Cannabis sativa
  modified_base (1170)..(1170): a, c, t, g, unknown or other
ataaaacagggtaccaactaccaagtatatatttatctaaattataaagataaaatgtagactttcaaataacactaaaaaaaaaaaagaaaagaaatcactaaagtataaaaaataaaataattgtaaaagtaggtcattaaataatacaaatattgtactaacatgaaattcataataatattccaatacaatacaaaaaatggaaagattggcactttacattgaagttgtatataaattttcatcacgtattcagaacgaaattagttaaattattatgattgttcaactacttaaatatttaagttatttttgtgacagtgaaaatactttctattgtttaaaaaaaaaaaaatactttatattcataattttatgtaaccatttattctattgttaagtatctatagtgttaatatttattataatttaatactttcgccgtaaataaaattataatttagtacttttttccataaatattctttaaattaggtactttcactacaaatattgttcttttcattaggtataactacaacaaaaacagattttagcgttattttacaacgtccaattctaattgaggaatcgatgttattgcttgtaggttgtcaatatcgtcaataataaatcaacgctatagttttccaataactcaattgtatacctaaacgccaatatcacaaccaacgctaaatacatagcaaattattaatttgtctaatatgaagctacaaattttagcgtcaattatacggtagctaattaggttttaacgtcatttataaattatcgctaatgggctaacttgaaaaatatacatagaaaaataaaaggaggtcatataatcactaactaaaaatcccaactcattctctccctctcattctcttaggcgccacctcattcttctcaatactataagggtaaatgagatgagagagtaagtcaataatgaaatggcatatataaaagggcagcataaatatctaactttaacctttaattctaattgtaaataaatttttaagtttaattttttatgataataatacctaaattataattttagaatttttgtaggtagctaattattaagtgttaagtaaattgtcacgtggtaatctctgattaatctaagttattaattttttttttttaaanaaaatagtttaaatatactaataaaaaaatgagatataaataataacataacttagttacctacagaattctagaaatataacttagttattaccgtaaaaaattaaacttaagattttagttaaacttaaatatttatgacgtgaattactttatatagaacctatattacaactaatacaactcctttgactttcaatcattattatccaatttggtttcatcgagtttatttggtaggaaaaagttattctatacatttgaactcaatagatccaaatttaataagtgtcaatacatataaaaaacataaaaaaatatatatatttatttttatttttatttttttaattatattttacataatttttataaaattaaagaaaaaaattgggagccatgacaccctcggcccacgtatgccattgtaaaataaataaaaaaaattggaaaagcttatttagacaacgtataaaataaacatataaatgcaaaactaataagcgttttattttgtgcctatggcactttcattattaatcaatcaaaaataaataaataaaaataagcgttttattttgcaaataactacgttttttattttttttatatgaaaattagaatatttgtcaccaaaatatcaaagttattatgtttatagcatttaagttattttttaaaggcaaaaatatcatttcgtcaatgttttggtgtcatttgtttctatcgttaagtttgtttgcgacgcaacaatataaatatactactagagaaaaataattaggcatcgatctataaccgactttattgaaattagtgttagttccgcaaccaatgcctattctcgacgccaatggtcttcgcattagtatcagtttggt

SEQ ID NO: 24952 - DNA, 2160 bp, Cannabis sativa
cgggaagaaatagagaaaaaatctattattgagtaaaaaatacaaatatattaaagtgaagcaaatctaaagttccattcatgtttctacctttattagtatccttttgattactgcaaaaatgttaaaagaataaatcatgaaattattcattaacaaatctaaattaatcacacccgtaaaataaataaatcaaactcataactatacaaactcaccaatttcatgtatttcggtacattagtgttgtggacagtaaaaatagcaattgtttagggtttctataaaagggtgagatgatctctttgagatggtaagaatgggagattaaaaatggtggttatatggagatgttcacccctatgcgatctacttttaattaaaaaaaaaaaaaagatgaagaagatggtgggtattgagggttacttggggtttgacattttcttatggaattggttagggagttaggctatttacaaatgtatatattattttatttttaaaaaattatttattaatatttataataataaatttatttgattatatattttatatgaatttaaaaaattaaagtattaaaataaaaataaaaattttttaacagcgattagagcgtctgccctttagttgtgctctgtggcagttatagtcctacaacggtttttattcagttttttccagttttcttcaaacttttcccagtctttgatttccttccttatcttgctgaaactttcctgatctatttcctctgctatggatccgtttattcataaaatgaaggctaccatgaacttatctgacaatgaaaaatcagtcttttccattactgatgatggtgctagtgaagaattaccccaggaagattactctttgtttgctcgagtgatcacaagtaagaaggtctggctctctacatttcagcgtcaaatggctgatcactggaatgggcgtttcaaggtcaatattaaagagcacttctccggtctctttattctctgttttggttgtgaaggtgatcgattgagggcacttgacaaggaaccatggcattttcaaaatcaccatatagttctctatccgcccacggcaatgcagaatgtatcacctgaatctatggttttttctcctttttgggtccaagcatatcgacttcctttcttaagcaagtcaaggttattggccaaatcgttagggaatttgttaggagagtgtgtcactgtccatgaggattctttgaatgaaggatggggaccttttttacgatttaaagttcggctggatattacaaaaccattgcttagaggtaaaatgatttctttgccgaaagtccgagatgagttttgggtcgagtttcgctatgagcgactacccgagtattgcatggaatgtggtgtgattggccatttgtatcaaaaatgtcctcaatttttagaaaaccttgacaatgacattgaaccagaattagcatatggtccaatgttgaatggatctccccttccctcatcatcatatgatcgttaccgttcagatttttgaaaagggaatgcgtggccattacttactcgattggcaagaagttctttaactgcaaccattccaaggatcaataatcgacccactgcccatccacaacctttgctagttggtgaaggttcaaatacacaagttgttcacccctctcatgctcgtgttcatgcctcatctgctgcttcaaatttggttgttccaaatttgtttacacctgctgtcttgactaattccacgttagtccctgcatctgcaacaaatacatcaaaaataccacatcaatctcagcaagtgaatccttctttggttaccacttcctcggctggaacaactactatacatctagatgatgtatatattcctgatattggacatcactctgctaataattcctctaatccttttccccatccttttgctacttatccaccccatgatactaattgctacaacttggtcccatctagtctgtctatgccatctactacatcatattgttcttctactcaaccaattgttcattcctcatttgaagatcaagagaatatacatcctaatcgccaagtcaaaaggcagaatgaatcaatctcgttgagacatcatcttaagagatgccgtggtaatcaa

SEQ ID NO: 24953 - DNA, 2736 bp, Cannabis sativa
ttttttatcattttaatttataaatattgattcaatttataaatattgagaggtctttcaagtaacgacattcgtcttttgtatgccctatgtccttgtgaaatctacagaattttgttgcatcctatttgtgcctcgcatgtctcatggttttaggtttgcaaaatgcaaccctgtgctcatgtgcgagaaagatattttcttgagtttcattaagcttggtataaataatgtaaattagcacttacttatcatgtttcttctatttttcctaatctttggctgattccgtatagtcatcttttctcttagtgctagagactcctggattgtcagtcttcgtcgagactttacttggtgagacaatgctgggtttatttcccgagccagtctttatagatttcatctctttccttgcttcctctttttgtacaaacacctgggctctttcattgaactcactaatgttattcatagggcgaccctgtaagtcattccacagctcacctcctgctgccaagaggtcagtcgtaatccctgcttgaagagcaataagctgaatactatcgctcaaattttaaccctaccagctgctgtactaaaatgacttaagtaggccttaagtgtctcgcatatttgcttctttatattggaaagggaatatacttcaggtcgcatttctcttgattcccgaaactattttttgaaattctaagatagctgttcccaagaggtattgagaatttattgaaccagctgctcgctgccacagtcagtgaggtggggaataaaatacaacgtaagttattcgtgacatagctggctcgcattattgtattaaagttgttgaggtgagcagctggatccgtagtcccatcttacgacgagacgtgagggtttttaaatccctagggagcattagcgctcataatgttcggatggaaagattcgagctcctcatctgaatcataatcaggcagattcccatcttgatatttcttgaatttgtttcccaactcgctgattcgcaattggattcgatcctcttacttttggtttgaattgagttgtttgcataaatcgggtttcctccgatttaattgctcacaaagatctagacgtcttcaatcatagttgctcgttgaccttgtacctgagtaactctcagattggctactccttgtatgactcatactttctcgatcattattatggcgagacctatctcctcctcgcgtagatcgactgtgatctcgagatctcatacgtcctgaactagatattgcctcatcacatacatgccttcaactctgggaaaggtttgatacatggcccttgttggggtttgtatactcctcctccctatcagtgcgagaaggacgttgacggtgtctcagtggtaacccacctgtccaaggttgagtcccaggatttctctcgttagcacaagggatctcctatcccctggtttggggttgccttctgttcttatttctacaagaagactctagtagatcattgttttcggtcccttgggatgtgaatccccagggtctccgaggcacttcttgatgaggtgcctggtcatttggttgttcatcttcaggaacatccccaatttccccaatttgctcttcttgagtgttctgggggttttattgagctgtctcttacctcctggttctcgagccccgaggtcttcctcgtgactttctcactccaggaataggttggttttgtgtgtttttttcttgtgtcgccttggctgcgacaacctccctttcaaactcagcattttgttggcttgccccagccagacgttaccggagttgacgattttccaactcgaccaatggtatgtatctagtggggtcatagatgtcctcacacataggcgttgacccacgatcatttatgttggcttcctcattctcagcttctaggttttgatcattatcatgttggcttcttctcgaacgtgtcgatcgtgttaaacgcattgttcgtgaattgggtggcctctgtgagcccattggctcttttccaagatgatgattagtctcttcaggatgattgttgtcgctttccccgttatcagccatggataagaaattccttttttgattaggagggatttttctgagcttttatcttgtaggctctcaatgaaagcacctaattattaacgcagattttcgttaatgattagaaacctattttgtaataaatcaagcacatatataaagaaaataataatgatgacaccaagatttttacatggttttccagttaactctgcatagtccacgagtctatcttattcatatatttctagatacaggattagggttttacaatcagtatactcctttttttctctaagatttttcgtcccttttgttttttataatttgcccctatttatagtaatatagattggcagttaattacatttaattcaaatcccataacaatattccctgaaattgttggccttaattacgctccacttaaatacgtgcagttaatattagaaaataacacagctatgatttaaactgtttgtaaggatatcaatgctgacgtagattaggacacgcaaccaaatgtatctcgctgaggcgtctcacctagtacataagtgaattacttagtttacttgcattcaagaattggcatgagcaccagtgtactgagcaaacttaagaactattctttgaccataaggccttgcag

SEQ ID NO: 24954 - DNA, 2166 bp, Cannabis sativa
tgtaaatggcaagttagtatacgatgtaaatttccccttgattttgataaacctctttccactcatatagattttctatgtttcattcacaatgttattgacattttgtcaaatgataaaattgaattaattatggtcattataacaagttcgcgtagtatgagcgggtggagaatatataaaaaatttaactaacccacaaaatgtggataagtataaatcttaaccacatggtcaattttttggtattaaccacaacccacgcaaaatgatgctgttaaccacgatagaacattaattaatataaatatatatttatatatttaaaaaaagaataaatttccaaatagaaaagtttaaacctaatcttaaaaactattatagggtgctttgagagtaatactttaacaagcaaaataaaatataattcttcaagtctcaaacaactaaaaaataaaaatacaaataacaattagtaagaaattatgatatatttctaatcaacatttattgttgtatttgtagatataggataggagtgtctaactcgctttgaattccatgtttttctacaattgataaaaaaaaaaaaatatattagtaaataacaaaacataaaaaaaaagacagatatgagtaaatggcagaacaaatgaactaacaaattaaagtgatgaattgacaaaaaagaaaaatgaaatgagtagtgttttagtatacttaccatagttccaataatatatatccttcatgttcatctatttctggatgaagatctagtgggatggcagaacaaaagctatcacgtactcgtcctcccgtactaaatgcagaaagctacagttgaaattggaacaactaacatatctcgagcaacttttgatagtactggatacttgtaagcatttaatttccactaggccagtacatttagctctttaatttttcgatcctcacaatcatctatcaaatatttatcaacttcattgatcttagtaagatttacttgagaatactctctgtcatactctttctcaaaaatttagttgcatcatcatcaccatcattattctccacttcatttttactctctgtataaatacttgttgccccttcttgtgactttgattcaattatcaaattattttcatacaacttcaacaaagaatttttcaccaaattttcattgtagtaaacatttcatcatcaaatactcttcaaaaataaatgtagcataactcaatttatatcttggatcaagcacaaatgcaacatacaatatttaatttgtattctctaaattttcccaataattatcaaatttagacttcataccatacccattgccatatctttcaaagtaaaattatcttcactagaacttcacttgagtagcttgccatgtatgttataaatctcaagaaaatatgtgttagttgtacaaagaagcactaaatttcaaagtagcatcataaaacatttttgaggaactttgtaaacattactatattctcccaatacccattttttctcctattaccatcttctagaaaatatctcatataaagaccatcatcatcctccataagattaaaagcatcaacaaatttcaaagcatgctctagtataagataagtatatagaattccatctagtatgattcatacagtatactgtatgaacaattaagcatacattttcctttacttctttattcacttgagaaacacatttattaaaacttaaaagtctaggagagaaacttctaacataattgttgcgttacacactgcaataattgaagcatgaacgtctttcatttcttctgttacaatcaaattgagaatatgagcacaacattaacatgtaaaaattctgcatcataaagctagttttccaaatttgtagcattttcttcatgtgcttaatagccacatcatttgaacttgtattatcaactgtgacagtaaacactttctcaatgccccgttcttgcaagcattgaccaatagcttgtccaattgtttcacccttataattaggtacttgaaaaaagtttaaaatttttttctgcatagcctattcactaagaaaacattttgtatggatgtccatgtgtcagtggaaagagataacatttggaattttttatgtaaccacaatttt

SEQ ID NO: 24955 - DNA, 1874 bp, Cannabis sativa
  modified_base (572)..(602): a, c, t, g, unknown or other
aatacttctgtttctttatttatgttgaataaaatggattacattgaaatggagttttatatagggcataaaacccaacactctaaaacccaagtttaaacctaaaaagggccaaagcaaaaagccattcccaaaatcgaaagagagagagagctaagagaagcccatcaccatcgccaccctgcaacccacatggacgaagccatctgcaacccccaaccagagacatgagacctctcaaaagagaagcccaaccactcaggtcggcagccgcttgcctaaaaacttaggtgccatggatctagcaccaaagatcgagtctgatgcctaacaaaaccttgcaacgccgagacccgtcagagaaacctccaccttcgcttggaaaaggcaagaagcgaagctcccaatcgccaccaacctagatctggccagtgacgcccatgagagaagaagaaccttagaggagacaaaacaaaaagggaagaaaccctatttagagagagagagagagagtgatccagtttagatttgtttttactattaagacttttcatcattattattattattannnnnnnnnnnnnnnnnnnnnnnnnnnnnnntattattattattattataaagattttttgcccaccgtttggaataattattttcaaaatttatttgaatattttttaattataatttatattgtacttttttattttaatattagctatattattttctcccttttacttttatttcactttctctcaactcctcatttaaaaaaaaacaaataaaatagttaccaaatatattttagtttttatttttcaaaatcaaaaataaaaaatagttatgaaatatatttttattttttaaacacaaaaattaaaatttgattttatggtttaaaaaattcaaaaacaaaaactttacaaaacaaacccattttttttttcacaaaaagcactcataatatgccatattgtttctagtataatcttttttttctttttttattttgaaatggtttctagtataatctaatatttaaatttctacaaattttaatttaataaataatataaaaattaataatcactaataaaatatcacataaatattgtaatgcatgttgggcacctctttattatcttataattaacaatgctcatatataatgtatatgttgcaccgaattacataaaacttgtactatttttgaaaaggaaaatgctatacacttacatcatgaaaatatatatattttatcataaatattaatttttatttcattttttgaattatttgttaataaatatatagctacatcactcaaaataataactaatgataatttgtgaaaatatatataaattttattgttagtgaatagttagttacttagttttctgttggttaccaactgttcactgcaactaacagagaaaaatatttgagagtaaaaaaatataaaactcagctcaaactgagagatttcattccatttctagtgatattacatagatggagagcctctttgatgctgacagatagcgagaattaattgtacaatcaaaacagaaatcgttataaaatcaatacaaatttttggtacataattccatgtaacggtataggaaatattctaaaatgattaaattttgagctgtatgattggggcaggtttgctcctctgtattgcgtaccacattagctgaggtgagggctcatgtcttaacaccacccctcaaacggagggggtgcttgagtcactccaagtttggaaatcagctcatgtggtgacacagcttttgcaagacaattcgtaatttgatcacaagaagaaacataccttagctcaagtttctttttcaaaattt

SEQ ID NO: 24956 - DNA, 1899 bp, Cannabis sativa
tttttttttttttttgaaggagcacaaacaaacacctatctagagaaatttcccttaaaaaattttgtaagcatgatatgaacatgacaatattgacaaacaacccatccctccaattccaaagtggtcctcgtcaattgatagttctatgacaacctcactccttatcctacacacactcttatcctacacactcaacaaaataaaataaaaaataataatgaattaatgagtcccatttttttcaccatttccaaaataaattgaacaaaaaaaaacactcaaaaccattactaccaataccatgtcaagtacttcaattactacagatattactacgacttggaacaaagaagaggagaaagctttcgagaacgccatagccatacactggaagaacagtacggatcaagaagaggatgaggaatcggaagagcaatggaagaagatggcttccatggttcccgctaaatccatggaggagctcaaacgacactatcgaatgctcctcgacgacatcactgccatccaagatggtcgtatcccagttcccaactacagtacgcttccaggctctgactcttctaataagacaatgatgagtaaggataattctcatgatgtttctggctcggacaataagagaatgagttcttctggccatggaagttctggcttttcagggcttcaagctcaagactctggtggccatggcggcaaaggaatatctagagctgaacaagagcggaggaaaggtataccctggaccgaagaagagcacaggtactgcagtagctgtgcacacacatacatagtacttgttcttcactgaatctaccaccatcgccaaagctatatggtctttttttcagttacgagtggagatatatttatatttcaccaaatttacaacaagatctagaagtatgtgccttgggaaaacattcaatttcatttgttttttctgaactatcaggaataagagaatagccatttttttttcttttcccaagtacaaaattggtctattattaattagattttctgtgttagtataatatgaatttctgagactgaaaatgcacatgattatttttatttttcattttgaatatgggtatttgatagaaatacttttgtttttttctaatatatatatatatatataatgtatgaacttttatcttttatgttgtttctggataaatgagtttgagatttatatatttatttcaggttatttctattgggtctcgataagtttgggaaaggggactggagaagcatttcaaggaattttgtaatttcaaggacaccaacccaagtggccagccatgcccaaaagtactttattcggctgaattcagtgaatagagataggaggagatccagtatccatgacatcacgagcgtcgccaatggggaagttccacctcaccaggctccaatcactggagtacaacaccccaataccaactcgccatctgtaccatccattggggcgcctcctgtcaagcaccgtaacggtcagacccacatccccggaatgggtatgtacggtgcaccaatggggcaccctgtggcggcagtccccggccacatgccttcggcagtagggacacccgtcatgcttccgcctggtggccaccaccatcatcctcatcctccttatgctgtgcctgttgcgtatcctatcgcaccaccaacaatgcaccaataatatctgtcagactgttaattcaaatgcctagtttattaatttacttgacccgatatgtttaatattttattgttagcaaagttgctaacaaaattgttcaaaacgaaaaaataaaacgatgctaacaaaacgaaataggagtaaaaccgaagaggaaaagcataaataaagaataaata

SEQ ID NO: 24957 - DNA, 2277 bp, Cannabis sativa
  modified_base (1844)..(1853): a, c, t, g, unknown or other
atgttttaaggtgttacttatggtatgcctagaattgttcttgatttggtattactctagttataacatgtaccatatacacacaatcaaaataccactaaaattaatgaatttgatattgaattgattacaaactggttacatggtatgaatggtaataacatttaattatacagccattatatttgtgggtcctaaatttgttggttggacaatattgagttgaactttgttggtgttgcataattagtcaatagtcattttgaaagtaaaaaaaataattacattttgtaggaaaatgtcttaaaacaataatatgaataataattatcattatttttatcatttaacataatttaaaaataaataaataaaataaaaaacagtaatttgagatctaacactgtacttattttaatgtttgaaattataacaacttaaaaggagtttataaacatttgtttttttagtttttatttggttatgagaataacatggtgaattgaattatggacttgtataacattggttggtaaaattcatttatttttgaatatttcactaagcataattgtgaactttatgacatcttaatttaaagatttttatagtgctaaaattataatttacttgataatggtgggaagaatacaataattataagtggagaactattgagtaataaccatgggatagatgagggatgacataagaatgtgataatagtcctacttagccccatgtatgaggtctacccagatttgcaaaagagaggaattctaggaaaagccacaaaaaagttcatgtcacaaactaaagatgcattgtcttttagtaatttggctatccaaccatgtgaccaaaatcatataactgacaccttgtctagtatttcatttccacaaaaagtgatatagaggttcaacaacttgattatgtagatttattattatttgtgtattttttttttttttttgtctgtttaactttttgtttttgtaacttgaaaaagtgggaaatgagttgaaatgaaataggattaatagaatttgcattaattatcagatccttaacttgcatatctctcattcctctataaacaatactaatgtgtttaataattgtcacttagccacatttattaattgcttaaccatcaaaaataataattgtaggacaaacaaaaccatttagtgatatggcaattgctgctattggaagtaataatagaagaaatgatgcagcatccatttagtattttttaggatgatcataacatttgactatgcagtcaagaaatagggtttgcttgtaggactccaatagcgtagatgacataagttagcatcaattatttcattttatttttttaaaatgtgattattgtgatgagcatgaatggggggataagataataatacccaacttaataatcttccttgcaaaaacaagaaactcaaaagcagaaaaaacctaatatctacttgtaaaagcaaaagtggtagctttcatggattggatgagacaagatatataatgatttaactttgttttgttttgtttataggtatagcaaagctcgtttgagtcggccatgtgtgagctcatatgcaatgttggtttcgatgttccaaccatatgactatagatagggatagcgtgccttgcatgctttaaagtgttcatttgcttaagcaaccattggtttatcattcaaaaagttaatcataaaatagttttttagaaggggattagtatttttagagcattgttattaggcaccagtggtgtctaacaatttctcgacatgtcgcgttgtgattagctagcgatactccttaaannnnnnnnnnttaaattatatgggacccgatacatagttggaccaatagcgatattgacacataagagagtgctaggcaccactagtcccttttttgatttctttttttatattatatattcacaataatgattatcgagtatctctattttgaaaatgtatataaagtatatcgtactatatgagtatattcttacaaaaaataaagtatcgtttaatacaaattttcacattacataattacataatacttgattgtcattatcgaggatatagagtaccattttatacccaatttttcaattatacaataattagtattagtccattttaaagaaacactaaatactcaaatttaatgttattttttactaaattaattcatatatataaaattttctacagtatcttactattattagtaggacactaaa

SEQ ID NO: 24958 - DNA, 7404 bp, Cannabis sativa
  modified_base (387)..(403): a, c, t, g, unknown or other
aaaaaattaaaaataatatacattcgagtttctagcaggttcagctgtaacctaattttttcaggtgttaaattaatgaaacccgaacccgacttataattttgaaacccatttttttccctaaaacttccgtaagtatttggccattaaatatttagttattgtctacgtgtcattttttattagtatatttagaataatttctaaatagaaaataagaatttaatgatatgaaaacacaaattattaaaaaaattagaaaaataaaaaaaagagtgtctatatatttggtaccctgtatttttaataatgtttatttagtaccttgtattttaaaatcatatatatatttggtactttaaattcaaatttttttgataaaatttnnnnnnnnnnnnnnnnngtctaaaattttatgaattttgaaatcaaatttaattatttgattacatataattgagaaatgtttggttaaattgataaaattgtatcgattaaattttactttagggtactaaatatttatacaatttaaaaatataaggtaccaattaaatattattgaaaccaaatatgtttttcaagaaaacaaaaggtagtaaatgagtgtattttaggggtgagcataaaatccaaaaaactgaaaaaaccgttcaaactgacttaccgaacaccgttagaaccgaaactgacaaaaccgaaaaccaaaaaaaccgctaacggttaaaagcgccattgaacggtcgattttttttgaataataaatcgatcgttatacatatatattaatttattaaattttttttagatgtattataattactaataatatattattgttacaactacaaacatacaaattaattgttaaaaaactaattatcttattcttttaactttaatattaatattaatgaatttatagaataaattggatcatttttttttttctaaaaaaagtttagtttaggcatttaaactgatcagaccgaggttcaatacggtcggtcggttttcgaattgcagcaatccaaatcgaaaatcgaattttaaatttttatataaaaaaaacgaccaaaccaagtgatgctcagcagtgtattcccaataaaaaataaaacaagaaagttaaaagattgagaaagaaagaatgagagaaaataattttggtttcacaatcacaaatctccttttcttctcccgggtgtagagcgcgccataaataatatattcacaaaatttcgacaacagaaaagaacggaactgaacctcaaggctcaagctgcaatggagtctgctaacaatgccctaatttctacatccattctttcccttctctttcctcttcttcttcttcttccatcttcctcttcttccactgttccaccacccaatcaacattctttaggtaatctctcttctctctcacctctcactatgtcgcttgcctacattctttacttgcaacatcaatgagaactatgtgaatttatctttttcttctgtttggttgccttgaaaattggaaaattttttttttttttttaaatctggctggtaaaagctcatattttgtcttcataaacatgtgaaacagttgccccctttgggttctttgatagttattgtatccaatttattgaaatatatgtatatgtaggtacttctactttttatgcaagaactgttcaacaagtaaattaagggctatacattgtaatgtatttggtttactaatctattaagtagtgctcaaaaaaaatgcaattaattatcttcaaagtgaactttatggggtgccttttctttattgggagagaatgtgatcaaagttgaagatccaaagtaaactttcttttatgaattttgcttgatgatgaatcagagtgggattttatgttatatcattgcagactgctatcattagagttttttataactttgattttgcagttgttgctccatttgccatgttgcaattatctcatggcataccagtgaaatacttgcacagttccaagcctggcacttccatggtctgtgaaagggttcatgtttatggattttcgaggattaaaaatcttagaaagtttgctcattcagttatgttgagtgtatccgcgaaagattcaagtgttttgccaaaggctgaggtttgcttccataggtgagttgttactttctagagccattttttttttcaactttatggcattgttggtatattctgttggtgtctcatcattttggtaacagcttgtgttttaaagaactcggggaatctatctttcgatctgcaggaacatatctctggagataggaatgtgccccaatagccgatgggagaaaatttctaatggttcatgggctcgttccatgtcgccttttggatacaaggtgttagatattcggactactaatttatctttagaaggttttgtagtatctattgaagaaggtagactgcctaacttacagtcagatggttttcccattcagtaaaatttttgcattactaagtagttcaaatgctttgctctcttttaatcacacattttctctgttctttttcagcaggatttttccttagtcgtgtaatatatttgatcttgggtattatcctcatgagtttggctcccaatctgagcaactcgttagcattttactatgtcagtacaataacaactggtgccgtccttgtaatattgatttgcttttttcaggtactgcatttctttctcttgtgctatttctaacctgtttatgtaggctttattatttatctaaggattcatttcttcactcgtagtcattgacatagaaatgagtaatggatttcttgcctaattcactttgttgtgatgcttaactctagtatgtacttcagaatcttgttcaccagacacactcatactttattgataagtatttcttgttatgtttgtgtgacctattattattattatgcatgtggtctttaatcatgtttgttttgttaccatatcaatcaacattagaaataagtgactggtatggttaagtttcttagatggattctatattctcaagttaaacatgaagttaaaattctatccacttgtaagttgcatctaatatatggttaataattatgttgtaatttcatgtttgagctatacaatgtgccattcccttctagatacatttgttttgccacaatttcggcgaggcatcttttcgaatgagaatgaattatctactgcattcattttttttgaaaaataactgagttttgtttggcaatttttttgatgtagtttgactctttgttttggtttcattaacagggactgaaaaagacaacaaatctttatccaactcatccaaagacttcattgttaatttattcatctgctgtaggtatcagctcttaatccttattccctttagcttacacaagcatgatacatttacgtctcaattctcaggtcggttatgtgtcatttctcttataccaatttcctcaattttggcattcaatacttatggagattggaattgatgaggaaatattctatgctgtaagtaatttttggctattagaactgcattgtttctctgctatgaaagtctaaaataaattttacggcaagctattctatcaatgcttagccttttcactcatagaggagaatgcctgtaaagaagttcatttctttttaaattctcttggaaatatgtcatagatggctatagtgctaagctaaatgcttctctgataatcaatggtgtcagttggtattatttctgttggttctcaattttcttgctggcgcatggttgggcttttgggcggttcacaagtgtatcctaacaaaagatggatcaattgatttaagcatatcccactttgttgaatggttcatcagaatcctttctgcggttttaattcttcaggttcttaccctcgaacaattttattaatgtttctatgttaattaattataaataagtgactgcatacatgaggggtgctttgtaatttccagagttctgtggataccatagtggcattggaagctttagtatttggaatattgatctcttcactttctagaagaatctttagatcgagaatcctgcgtcgtatccataggtaaggctgtttgtttcccatattgaaatatttttggtttggataaattagtcatgaatgatatggatatcctccttttaataccttttcagaaatttaacaaaattagctcacagaaggcacagaaagtcacgtctgtctgagctttcctcttctgaagattctcttgataaatacaattacaatatccgaagcagtgaagacttcaatttccgaacagggcatcaatcaaagggttactctattgctccaagcagttctgatcatggtttgcttctgctgattctatacaccacttaataaaagacaccatggaccaacctaaaatgctctgttttatgaacctgtttatgtttcaggttttagcaacaatacctccagtcagctatacttgtctagttttcataccacacctgaaaggagaagattctcaaagcctgattgggaagagttcaccaaagaatccaccgagaaagccctcgaagagcttgtttcttcacctggttttgggaaatggctttccaaaagtgcagacagaattagcgttactccacctagcggtagaagacctgaacaaaagggcaagtggtttcgattcttctaagcatggtcttaatcatttactaggtgaatcatgattggcaagcatagtaaacacagctgtatgtgatggagaagagaagatggctttggtatatgcagtatgcacattgaaggaggctaagtacaatgctgtcaatgcagccatcgacttctaaatgagattgcacggtttctttacttgtcggctttggctgcactgcatcccggaaaaagaccatgtaagagaaaacaagattgagctgtgaagctgtgaagtgtgctacagattggagttggacccctgtattttgtaattatatttaagattgattttactttttagaatatgatacttcaaacatgtaatgtaacagcttcagatttgtaaattgtaacaaaattagcccttctgaattctgatgaatccatttctataagttaccattatttcttaatatgtttttgaattttgaccattaaagatgggaaacttggagtcacaatacaatgaaaatatttaaacatctcataatattattcaatgggagaaaaatggtttactttatgaaaatcaataacacaaattacctaaaaagtagctataataaaataaacaaaatgtgtaagaataggaaaattaattaattaattaagggggtggcaaaaaatcagtacactacgctacactagtccccacaccacacacttaattattactagtaactaataatataaaagtagtaacaaattactaataaatttacaaaataaaatctgtaaatccaacaatagatctaagctcatcccagtcagcacgtgtgaaaatctgatcgttgaattcatgttgatcatcttggtatgatgaaaataggcttgatgagatcaaggaatccatattatgatcatcataagaagttacatgcaactcatgatgttgatcttgagtatcttgatcttgatgatgatgattaatatttttattattattgttattcatcttgatatgatgaatgtgattattattattatttataacaggcttcatctcctcattataattattatgatcataatcataaatcactgaagaactgaaatcaattgtgtaattattattattattattattattgatcatcatggcattgtttttagaatccattaatggctgttgatgagtagtggtacgtactttacttgataattctctccaatccgatgtgtactttctataagacacatttctcttgaatatcctacataaagtccatatttcctgcaaaaattatatttaattaattatttaaaaccactaattaataatatatcatatatataataaaactaattaatatattaaaaaaatataaaatctaaagcatgtgatattcatcctttgttttgtaataatatattataacataataaagtaccatggtagcttaattagtacaaaaaattactttataaccacttgtaattattagtaaatcactattttatatagtctcacttaattaattaaacctatgaaacaaagcatatatatattatattaataaaatagggaatttggggttattattatatttgttcctaggaagacttttttgactagcatattaaatttaatggtaaaaatgcatccatgcataataaaaacatgatagttatgattctatcataatttttttaaaacttaatatttttactagctgtaaattaaattaaagtttgcaaaacaaacatggggtactggttctcaaaatggggtttttatttatttttatatattttgaaattggtgtactaattttttgaatattattggatgcattggaaaataaactaagttacacaacaaagaaatctaaagactaataaggagagttcatatatttatgtatatatataatatataaatatatgtatacacttacagcttctaataattggggatcagtagtagtagtgttgttgttgttagaattatgaggaagacgaaactcatgcatcatccaatcagttttggtacctttaccagcacttcctcgatagtaaaccaaagtttttttaagaccaatatgattattattacgtacaattggcttatctattccagttgctttccaaaatccagatccagttactcgatttggtcttacactattcttgtattttctacctcttttacaaaaaaaataccactctttatctccacctgatgatgatccttctacatatacacatatcatcatgttaaaatacataaataattgaaaaataaaactgttttagttctagggaattttaaagaagaactatatatgtaatgtaatgtaataaaaaaagggtacaacttacttggaagatcccaaggatcatatttgtagatatcaatggatttgatgagatcaattgtgattggtttattattaacctttctcttaagataaaatccaactagttcttcatctgttggatgaaatctaaaccctggaagaacatcatcatcatgatcatcatgatccttaatatgattattattattattgctacccatattatatatattaattagtatataataattcttctcttaataatattatgatgagggaatctaattgtctcatctatatgtaattctaacacttgtactattctctcttttaaagttgtgtatg

SEQ ID NO: 24959 - DNA, 2511 bp, Cannabis sativa
tcaagatgtgaaaaatcaaagctcgccaacattcattcaatcgcagccaaatatatttttaatacattttatccatttaaactcatatttaccaaatcaatcgcctcctaaggtgagaaaatgcatacaatcagagaaacagacaattatacagaaaacaaaaaattcggagaaatgaactaagttttgaatatttttcttgtttagctctaatgttatgcgggttgcaaacaaatacaactctgaaagaagggttagattgaggagacaattttgagaaggattatcatgaataatggtgtaggtgtagtttcattttcttgcttattgcaattattctttctccccaaaaatatacatatatataaatattaaattttaaatacctttagaagatgaagattaagattgtgtgctcgatcttaagtgttcgcttagggttggtctgccatatgcggtggtatgcttctgtcgtgagcggtgcaaagggaggtctgctcctggagttggtgggttagtggagagagtagagagagaaagggttagacagtttaatttcagatttttagagctgtgttttactattctatccttcaaaatactttccaaattttacttttattattattagtcaacctctctatattttctttcacaacatttaaatataatacttatattaattataatcaaagaaaaaaaaataacaaaataacaaaatataataaacaaatactaataggagaaataaaaacaattaaatattaaaataataaataataaaactttaaagtttaactacatatagataaagattttaaaaagtttaaaattaggttttttagctaagaattttgagtagttggagatcaattttaactttttaactatttttttttttttttaaatcttagttattataaagcatctatttgggatgcttatagagtattaagacttcatttataccacaatcatcattaatttaagaaataaaatttccaaaatgtaattatatttgctgatttatttttctttttcttttttcaataaaaatgagaaacttagttaactaaatgagctaacaatctcatttaaaaaatttaataagctaacaatgtagcttcaatttaagtagcaataacacttccactgaatttacgatgagagatataataggatgcctgagccaaacaatgagcatcactattagcagattgcttaacaaaaaataaaaaaactagaagcaagcctcccaacaaatacctgcaatgttcaataataacactaaaataagaatacattttagtgttccatcgtatagcttgaacaaccaacaatgaatcgctgtcaacagtcattgactgaagacgacgtgagaatctacgcattttgtgatgattgtgagccaataaggacttggcttgatcttatcattctcatagacggtgccaaattgttgacggtaagaactcgtcaacaaatcttgtggccgaaaaaccaaaatctaaatgtaaaacatagaaacaaaatgaagatgaagtgaaatgtaagtttaaatggctatgagatttcttgtgtaagtcagagcttcattctattgcataaaatatatgagttataagatttattttctaacctcctctcacacttgagagtggggtatttatacgctttattgggctgaggtgcattatggtccaagagagctaagttgttgcttacaagctgtaaaacgcagttgcgggaggtggtcttgcacctcgtactcttggtcgggtcctcggaccttgtagatgtggtgtctccactactcatgcctccttgctttcagagcttttaggaggcgtggttgtacatctctcccatgcacgccttgtcctttagttacttttctaacaacattctcttccaacatatattcaaattttaaacataattcacctttctaacattacattcacacaacactcagccacatgtacatagctcacatgcgagcccccactcagacacataccacgacacaaacactcacacacccactacttgcatgtgagccttccacataggctcgcatgcgagcccccactcgtacacacacacaacaactcacacacatacactcatggctcacatgcaagcccccactcgctcacacactcacacacacaggtgtaacgccctaacaattaggcacgctacgaaaaccattaatttaacctaatccctctaaatcgggcttacttgcaatccaaaaaaataacaagtttcgggatcccacaaacctttttgcaaaatattataagttaatttacatgccaacctaagcagaaaaactgagattacaaaatacatttgccggtacacccaacccgcttggtctagatggcccgaacaggtacaatccatcgtcaagctcttgaactcatggctgattacagacaaatttaccctttcctgcatagtagagtgtaatgacagctttagtaatttggattagtaaaggca

SEQ ID NO: 24960 - DNA, 4414 bp, Cannabis sativa
ggtatcagagctccaatcgttcttttaagggagaatccggtttctggaataggaggagcatcaagattgaacaatgctcaaacacacaacaatcaacaagtttctctacctagatcgtatccaatctcattcaaccattctctgtcaataaagctcgatgagaacaattttcttccctggaaacaccaggttctagcctcaatcaaaggaagtagactccaaaagtttcttgatgatacacgtgcaccagaaaagttcttaacagaagctgatcaacgatcgaacatagtaaattcggagtttgaagactgggaacaacaagataatcttcttgtttcttggcttttatcctccatgtttgagaaaactaccaatcggatgatcggatgcgacaccacaactcagatctgggagaatctcactgaatactacacaaccttgaatgctgcgaatgttggtctctacaaaactcagcttcgaaacacaaaaatgacagggtcacttagtgactatcttctcaagatcaaaggcatcgtagatcaacttgctaccattggccatactcagactactcaagatcatatagagacgattttcaatgggctaccacctgaatatgatgtttttgtcacatcgatcaccacaagaaaacaaacctatacagttgctgaagtagaagctctcttaatggcacagtcggttcgaatagagaaaaatgccaaaagtcttgacatttcaaaagctgaggtgaatttgtcccaaacacgttattctggacccaacaattatggtcgtacaccttaccatgcctcaactgctccaccaggctttaccaatggtccaggacgtgcatcaggtggtccccccttcaacatcaacaatggatcatactacaaccctacaactagaggaggccagtccaacagaggttgaccctcacaaaatgcaccaaccagaggaggttctacatcatatggcaggggtcaaaacaacaattggggccaaaaggtgcaatgccagctatgtcacaagcttggccttacagtcaaacaatgcttttaccgttttgataaatcttttacagggccagaatgctttgcaaatttcactcccacggccaatatagctgagatacaagccctctatgctacaccagaatctgttggtgatgagcagtggtaccccgatacaggagcaacacatcacctcacaccagatctggcaaacttgagcacaagcagcccttactctggcaatgaataggtctatgttggcaatggcatggggttaaacatcaagaatattggtaattcttttatccactcccctttcaattctaaacaactgagcattcgaaatctcttacatgtcccctctataactaaaaacttgttaagtgtttctcagtttgctcaggataatggagttttctttgaattttacccattttattgttgtgtcaaggacattgcaacccagaagaccttgttggctgggaaccttgaaaatggtctctacaagttccaaaacagtcagctcaatcctacactcaacacacaacctgtgcatgtctcatctcagttcactacccctagcatttctcaatgtaatagtcttgaaacagatgtaaataactctgctttctctttgtggcatagcaggcttggccaccctgctgctaggattgtcacaacggccctatccaaatgtaatatctctgtttcaaataaaaagttttttgatgtctgcaaagcatgttgtcttggaaaatctcacaaacttcaatttcctacctccaccacaacatacaatgcaccattagaactattacactcggatttgcggaaacctgtacctacaaactcctcaaatggatataggtactacataagttttgtagatgcctactctagatacacttggctatatttgttaagaaccagagatgaggcccttcctacctttaccaaattcaaaactcaagttgaacttcaacttggaacaacaattaagactttacagtctgactgaggaggggagtttagatctttcaccaacctcttagagacctttgggattgttcataaacttgcttgtccacacacacatgaacaaaatggggtggtcgaaagaaaacacagacatattgttgaaactgggctcactttacttgctcaagcctctcttcccttgaaatattgggatgaagcttttaggactgctgcatacctcataaatagaatgccaacacctatcttacaatactccacacccattgaaactctgtttcatacccccacccaattactctatgctcaaaatgctcgggtgcttatgctaccctaacctcagaccatacaacagaaacaaattagagtatagatcaactccttgtgtctttttgggttatagcctctcccataaaggttacaaatgcatgtccaagaataaaagactatacatctctagggatgtgatctttgatgaaaagagttttccatatgcacacactgttgccagtaccaacaactccaatcagtttctgcactcttcaatatctggtacaccatctctgtcctctcttctcacacaaccaccaacaccatccactcaaccaactcctctcacacctccagttcccaatacaatgtccacacccaactcacaatccaccactaccaacacagaaaatcctcaatcatctctcaataataatcctgtcaatctccctgttcagtccattcctactgagtccaatcccatcataaaccacaacaacagtgccaacaccacacctgtcaccacaaaccctgctacatccaacacctccactcaccctatgcaaaccagactaaaatctggtattaggagacccaaagctctgtcagccatttgtgaaccaaaaacagtaagagcagcctttcttgaaccccattggaacaatgccatgaatacagaatatgttgctctcaagaaaaataaaacatgagttgtagttcctcggcctgctgatagagttcccattggatgtaaatggattttagggttaaactaaacaaagatggatctctcaacagatataaagctaggcttgtggcaaaaggttttcaccaacaagctggctttgatttctctgaaacgtttagtccagtggtcaaggctgtcactattcgggttgttctaaccgtggctataacaaaaaggtggacaatacgacaattagatatcaacaattcttttctcaatggagatttgcatgaggaaatctatatggaacaaccaccgggttttgttgatcctgaatatccagaccatgtttgcaaacccaacaaggctctgtatggtctcaagcaagcacctcgtgcttggtttgaaaagctttcaaatgtgttgattcaacatggctttcaattctcaaaggcagatcagtccttgtttgtgaagtgttccaacacaagttgtatctacattcttgtatatgtagatgacatccttgttatgggaagtgatgatacccttgtcactcaactcatcactgaacttaatcatatctttgctctcaaggacctcgggttggtggattacttcttgggcatacaagtgactcgaaccagtggtggaattctgttaactcaaaccaagtatcttcaagagcttctttgcaaggctgagatgcagaatgtaaacacacagagcacaccaatgaacagtggtctggaactgtcgaattatgggagtgaacctgtcaaagatgtgactttgtacaggtccattgttggggcattacaatatgccattgtcacaagacccgatctagctttttgtgtaaacaaagtgtgccagtacatgcatcaacctttgctttctcactggacagcagtgaaaagaatcctaagatatgttgctggcacattagactatggactactgctcaaaccagtaaaggatttttctcttgaagtgttctgtgatgcggattgggcatccgatcctgatgacaggaggtccaccacaggttattgcatttatctaggacgcaatctggtcacatggaagtcacaaaaacaagccaccatcagcagattttccactgaagcagagtttaggagccttgcaagtgctgtttcagaagtcacatggttacagtcccttcacagtgaactgcatataccatgttcaacagtcccgtccatctggtgtgataatcaaagcaccgtgcttctagctgccaaccctgtcgtgcatgcccgaactaagcacattgaaattgacttgtattttgttcgagacaaggtgctacaaaaccaaatacaagtcaaacatgttcatgctctggctcaactcgctgattgtctcaccaagcctatatcgagctcccgtttctctaatcttcgaaccaaactgtgtgttgatt

SEQ ID NO: 24961 - DNA, 2360 bp, Cannabis sativa
aaaaaaaaaaaaaaattaaatgagaatattttgtttatcttttataagaaaaaatatcatttatgtttgcttagtatttattgaaaaatatccttacaaaaaatatatttattgaatataatatttataacataatataatttttctatatattaattttaacttttaataagcaaaaaattaaataattaaaaattttccttaaaaattaaaatagtctctaattaatatcaattagtaaataagatatgaaaaatatttagtaattgcaaatgtaaataaaaaagaggtcatttattgtatgaatgttaaaagagttttaaaaagaggtataaattactccatttaattagagatgttcttcttattaaattgcatgattaataatatttttaatatctttcataaaattataacaaattaattctttctttcttttgaaaggataacaaaataattatcctaaattttgaatatgaccaaagagtattgatgaacaataaatattgaagggaaaatatattatataatttgactatagttacttgactaataagcttctttttatagcttatagattgatgggcagtcaaagtaaagccaaggcactaatatttttttttatgtaaaaaaaaaaaaaaaagaaaaagaagaaaagaaaagcaaggcactaaaaaacttattccttgctttgatgttcggactctccaataattaatattcctcaacatttaaattaaatcatatatcccattttctatttaattttttgcagatgaaaaaaaaggtaaaagatacccctattattgtcttatatatgtaaaaaaaaaatagttcttaattagttggtcagtacattagtacttgagaattggtaaaagtctaagagacacttatgatatgttaatattagtacaattttattttaaatgtaatactaacacaccattctcccttaaaatttagtaagtgatatatatgaaaaaagatattttaaactcttatttaaaataaattatagtattttttaacattaattaaaaaatatgtaattttaaaaagagataaattttttttaagcccctagacaaaatgaaccctaagcataagtctaacctaactgtacccatggccaaatctgcattaactaattataattaagatgatgtttggtgatagggaaagaaattaggaaggagagagagtttaagaaagatggagagtacatagaaagagaagataacaagtttcctttcatgttgtttgatattggaattagaattttttttgaatgaaatattggaagtagaattaaaatgatggaaataaagttatttattaaaattattatattatcctcattatatatatatacaatttttttttttttgaaaagtatttaagatatttaatatatttattttgtctttttctccttttttttttttcactattggaagtactagattttgtccatttggagagaaaatttatcattttaactttcctccctaccaaacacataatttattctcttctttcaactctttccctccttacactaaaaatcattttagtgaataacaaaaaatgtagagaaaaaaattgtataaaaatcagtttttcgtgttcaccatgattttttttttttttttgttgaatcatgagaaattattataattattattttattttcaacatttattttttaaattttttttttttttctcatcaaaatttaacttccaaacatagcacataatatgtatcaatctaaatccaaagatgcaaagaaaccatggatttaggtttcgtttgttgcatttattataagtgagtgtcataaatggtgatgcatgtaccatcactactagactttgattttaaattgtcgtagtttgtttcacacctctctatactatacacccttattttgagttgtcattttcatggactgctgccaagttttacacttccatatatatatatatatatatataacttcatatattataaagagatattgtaatttatagcataggcacattctggacttttgaaaacaaattaatgctttggaaagtcatgtggaaaaattataattaacagtgtagaattaaaataactaatttttaaacaattaaatatttagcaatgataaaattaacaaattaagaacaataatcaaataaaaataggggcaaacaaagtacataaagcgagaagcaataaatgtaaaaaataaaaaaatcaacaccaaaatatatactggttcaaatccgatatattgatgtaatttatggctttactttagttcttgaacaacaccaaaattcttttttattgattgaacaacaata

SEQ ID NO: 24962 - DNA, 2786 bp, Cannabis sativa
gagggaaggtttcccttttgcttacaatgtctataataagaaggaacattcattacataaatagaatacacaaaatagggaattgagacaatctgccgtatccctctaattcaatcccatgattgtagggattgtcttcgtgcttggacttcacgatatcattttgtagtagttaagtcctggaaagtagttcagaaagccacacttgcctcttctcaggtagtttgccatttaacctactcgggaaaatagacgttatacgtgcagatgtgctacttgaagtcttttcaggatattcatctctacccaaatgtaaggaatgctggacacgcgccactcgcacgtgctgccatgtcatagtgtaaaaaatgggataacaatcctgatagttttcaagaggtatatattctaagcttatatttaatgttttgatttaatgtacacacatctggggattctttgggctatgatacaatgataatcagtaatacgaaactcttccgctgtgtatcggatttagtaccataaaaactgataattggtattaagagcagttccatgaatgtgtatacattaaatattgtgtaaattttatgcatttatatatatgatatgtatgtgaatggatggttattattgtgaatgtatgagaggtgatgaatcgttaattatatagtataattagatataggttttgttattattttttattagaaaataatgtaagccaatttgtggcatagaaatttttatataattttattttacgaaattattttacgtaaaaattatacattgtaatgttcattgcatgtgagcttggtttccaaacttgaaacccagccatgcatgccaaaatatcacatgcatgtgagttcgggttcatggaggaactgcggccatgcaagacctcaagtaccgtgcccatgctctactggaaggagtcgacctagggttgacgtatacatggctcaatgataactctacaaattagagttattttaccatattttataagtaaaaatcggtttagttcttgactttttaattattttattaagtttttaagtatttttgaattttttagtctaaatattatttttatagctttttgtgtgttttagaataattttattatttagtattttattttatttagttttaattttatgttaatttttggtacttttaggtgtatttattggccaaagtttggacaaaattggagaaaatatgaagaattagagtcaaagagctatttttaaaaagaaaatcaaaactcagagcatcgaagcccagtcgcggatcagccaagctccccatccgagccgtccgtgtgctgattgtgtggcccaggtgcacgcgtggcgcttcatttcttcctgccagttccagctgcgtgggcccctcctctgacgcagtttttccccacaccagcctccatcagcgcgccacatgtcgtcatctctcctaccagccatctctaggagctctccatgtacgccacttgtcagctcctcattccagctgccttttccaggaattttgaagctgccaagtgtccctaatgcatagaaaatgagctcaaaatgtcaatttcgaaaatacactacaattttctattatcttgcatttatttggctcatttttctatctcactattttttcagccaataaattgcacattatctattttacctttttacccttcttatatcccacctacctcatttatgctaaaaatttctagaaaatattaaaataattaatttattaattattttaattcactcactttggctataaatagaggattttggaggccttttgaacacaccaacacatcaacaccatctacgccacacaccacatcctacattctactccattactcttctttcattttctctctttcttagaatgtattttctttgtaatttttattctaagatagttatgagcttctaaacatcttaaggttgttaagttggaagatgaagtaatatgtaactaaataatacttatggtgtattgatttcccattatatgctttaaagtttatggaattttcttcttcaaatatgtctttcatctttaatatcatgtattttggattgttagtacatactttcacttcgttcttcattgtataaaaattataatgtactttgattaagtgtagttcattagattgttcacatctaattcttagaatataaaattatatttttgcctaaaaataatatctttgatttgttgtagtttcattaactcattttacaactaatgctttgaaattatacatttataagtgaagaaaattcctatcttatgaaaatactttgtgcttaaatgaaaaatatattttgaaaatgatagtttgattgagttcaactatcaagaaaacttgggagtcaatacactataaaatattattaatatatattgtggattctaaagtcttaataatcttttctctaccatttattcatcaaatctcttttaccttgtttattttaaatcttatttattttcttttattttatgaaacaaatctcattaattatgtggagctaggttagagtgtaatagattttgagtttaaaaaagtctctcttaaatgtaaattaactcctttgggttcgaactcatacttacatgaacactatatttcatatctgattcgtgcacttgcgagtataaatatttaaattttatatcaccattgggttaataacactcaacatgcaaggaagggacggaagtccctagtttgaatgggcatt

SEQ ID NO: 24963 - DNA, 3115 bp, Cannabis sativa
taataaataaacatatataatatttatagtttaaattaagtgttcaatttactaaaaataatatatattaaattttaataaaaataaaataaaaattaattattttttgaaagtgaattaactttttaaattaaatgtacggtcgaaggtaaataaaataagacaattgcttattattttttttttcttttcttcttctactatttcttttatttttttttaccaataagtgagtacacctattatagttatattttttacactttaactcaaaagcactcattaattgataactttcatcactaaaatagaagttgagatttacgatctcctctaatttgttagattttgttaaaattattttattcatataattttttttgttctataaaatatttaccaaatttaaaatttaatgcatgtcttaattaaaattgtagtaatattctcaatttggataatataaaatagaaatttcaataatataatactttttgttttattttcacattttattatagataattttggttttaaattttagtattgaatataaatatatactataaaaaatttatttgatactaaattaaaatttggcccccctagcattcaagtcctggctccgcccctgatttggagggtgcgaaatgataaagtccataataattgccctgttgacatgaaaaaatgtgttaatgatatttgtatttcttaagttgatttgcatgcttctttattccctagtcctgctcctcatcttaaggaagcttggtcccctcccccagattaagctaaattgtgatgtaaaagtgggatttgacaatatgtgtattgcagttgttgctaggaatcatcttggcagagtgattagaattcagacggctcgggtggatttctcttatgttctttgcggagaagctgtggcatgctgcttggctgtgtcggttgccttggatatcgggtccaagtgtgttatagtggagaatgaatgactcgagggtggtaatcaatgttatcaatgggaaggagtctcgttgggcattggtaaactacgtctctttttgtactaagtcttctccctcttttattagctgtaattttcttttattagtcgatcttgtaattttgccgctcacaatgtggctagatgggcgtttgcttatcaatggtttggatctatcccgatctctatcttactgggagaaccttttatgtaacgaccatgaggtctatatatttgaattaatgataaaacgcttatttcaaaaaaaagttaaatttcgaacttgacccggcacttaaccccgaatccaatgacctgataccaaacctcaaactaatagcttaactcgagcctgatcctgaaccctataaccaaacttgaagtgggacttcgacctcaaacaaaagattacgatgattaaaaaagtggagaaaaaaattgacaatttgtttttaatcaaatttgaaaaatattttataaaaataatactacttttttaataagtagcaaattatggttaattcaaacaatgatccaataacaaagatgaaatcataataggaagtaggaacatacatctctcttactagctcacaacttcacgaatgcccttttacttgtcttaaaaaaataaatattttagttttaaagttgaaaaactattttttttagtatttatcatgctatcaaaaggtgttgttagagtatgattattttacttttattaatgtcactctttataataaaattgattaatcttacttatgttatatcattagagtagaaatatcctcatgtaaaatcatattattctgaaaaatttattattgtgtgatgctcataaagattctaacactttctttttgaaaaatttattatatttatatataaacataacttattaaatagcaaattcaaacattactaattttatttgcaaaataaatatataattacaatgtttgcttccattatcttcttttcttcataacaattcttaattaccagtgttaccacagtaataattctctaactcataatcttttcaaagttacaaactaagtttccacaatgtagaatccttctaacacactcataactacaactagtctacacagcacacactcattattttataacttaatttttggggctgtagcttttagcagtggaagctaagctataccattaccaaatattaaaccccaaagtaacaacctcaaaccacatatcacctgcataatgcaaaaagcttattaattagtgctatatgaagagagagattggcaaaaattaataagattataggttagagataaaaatatataagaaaaaaaattaatacctaatttttggtagagagaatataacgaaataataataataataataaaatacaattaaataataatatatctctagcagttacataattccataactgctatcataaatacaagggtccttttttacaataattttattgataatcgtgttagtgtatacaaaaatcagaaaattttatttaaaaacaaaaaattctatagcttaatttagaactataaagtttcgatgtaatatacaaaataatgtaaaggtttagaaataataatggtaaaatctttaactataagttttagacataatgttgttcttgaataccagttcaaaataaaaaaaacctttcattaaaattctgaaaacatatctaaacaaataataataagaagaaaaagtctaaatacataaaacttcaccataaaaaataaagtaatttacgatataaatacttaaatttaatttttatttaaatttaatttttgataataataacaactaagttatatttatagaatattgtaaagccaataaccactgtctaaaaaaataatatatgaataaaacaatgacttgacatctattagtcaaatacagaaaataacatttattagtactgtaaaaaattaaacttaactatctatgttgataattaaacttaaaactatttatctatactgatagttaaacttaaatgtttatctcgcacattattctagaaaaatatgataagaatgtaatgaattattttatcttaacctcaaaataaat

SEQ ID NO: 24964 - DNA, 1900 bp, Cannabis sativa
aagagttcctttctccacttctcttcttctgagttctcctgaagctttctcctcctctgcttctccacaccacttctcttcagctctctcctccgtcttcctcggcagcactcaccatttgctcacctctcaatcttctccatcaaaattcaaaacttcaggtcagtatgaaatggatagcaatcaatgcctttactactagttaaaacccttttacgaatggctactcaccatctacttttacacactaatttcaaatttgaaattatactcgtatctgcttcattcttgtcacttctttttctcatttttgttttagtttgaatcagtaggcacccaatttttgtttaaattctgggttgtaggcttagtttgctcatgggtctgctcttgatttcaaattcctgaattattgaatgctcatgttcgccatagcagtaggggattcaatttgtctttaggttttaccatctgtgaactttgtggatttattaaagtacctgtaagtttaggttacaacgaatgatataaaaatagaacttttaagctcttatatacggaaagtttcttctaatgctgctatgtaaacactaaactgttcttttattattattattttctttttccttttagaaggataaaaaacactttgttttgcagggacatatacttggggtatatgaaaaatttaatctacatggagaagaataagtggttatagtaacaattcagaagaggctattagtcaaagtattggttcatatctgttttcatttattttgaggtaaaaaactgctgcagttactcattctaaaccagatagacctttaaaggtatatacagtatactcagattttgtaccatgaattctctccttttatcttcctccctctgcctgagtccatcatccatctcccaattcccattttatcgtcaaacacagcctaataatcttcacaccaatcaccataatcaacaatgttattatcttcattatccttctttagctcaccctttcatttctcacaaatcactacaaattcgacgatccattggtgaaacaatttctcctaatgaaggggcaatacctgtaatggaatttgaagattttttcgaaaaggattggtctttccttgattcagatgatctcatttccagtcaagattacaaccataagctaaaccggattatagcatctggagagattgaaaacagttcaagagtaatggtttctgctgctgctgaaggatttgtggatcagttggttgagtcttcgccttgcaatctcttgcttgttgtccatgattctctttttgtgttagctgggattaaagagaagtatgacaaggttaaatgttggcaaggagaacttatatatgtaccagaaaaatgggctcctttagatgttgtgtttctttactttcttcctgccataccctttaccttggaccaagtgttggctgcagtaggaaagcattgttctccaggtgattttcttcaaaactagttcaaatctttaaaaacttaaaggccatgaactttagcagagaatccttctcttatattgagagctctcaaacttaacctttcatggccagaaccttcagattgtttgtttctttttgaacctgtgtgaagttgtgccaactttttgtatgtttaaaactaaaataaaacacttgtacaggtgcaagattggtgattagccatccacaaggaagaggaggactagagcaacagagaaaacagtactcagatgtaatagtatctgacttgcctgagaaaccagctttacaggaagctgcatctaatcatttttttgatttagttgaatttgtggatgatcctggattctatcttgctgttttgaagctcaacaatgcaggctgattttatcttt

SEQ ID NO: 24965 - DNA, 3081 bp, Cannabis sativa
aatatacaaggtaagaaatcgggtatgaatgcaaaacaatcttaccataaaagaaaatatattttgtcaactaacttgccaaaaaaggactttacatgcgttctcagcatcctcagggaaaagatttcccccaagtccttgggtctcagtaggcgacatagcacgaaatgcatcgactatttcaactgcctccgctccaagaattgcgaagtcaaagtcaggcagcttagacaaggtcgtataaatataatcagagacggcctgatcatactgtttcttccagtctctttttcattttcaaggtcacaaacgagttcgcgaactcgcgattccaaaagtttaaccttttcctctgcttgctccttggctttcccaagatccttgatgtctttgtactacgaggtcacatccagcttcagcttctttatgccattttgaagaagcgtgtttgcttcctcagaagttcaagctccttagaaactgcgacaaaagcccacgagaatatggtcataaattatgaggccaattctgcagatcgtggcatcaagtcctcaataggaacaccttcgaccttagagacgaactaattgctcacgaatttgtcttgaagagctatgatgtcatgggccctaacagcaagatcgatcacaaccttcttccccttgtcttgggtagatttatgctacttcttcgacgagtcggccacttgcgtaggggcaacatcgcttttcctcttctgcgaaataattggagaagttgtcacatttccaaccttagactttccattcagaatgggagcttgcttcaggaatgtcaattctgggagaagaccatgagataagaatatttttcataacataaaagaacatgtatatgttaaacgcattacctgatgtcggtcttgatgtctgtttagataggtgcttgtctattctttccttttgtttctcagaaggctccttgtatactggttctcgctaaagactggcgttctcaggtatgagcttatgttctcgcaattttgcagtagtgcataacaatcgccaatcacgatcttgaatgggcaagctacctaaaacttcagcgatctccctacgagcagaatccagtacaggtcaattcggtctatctgcatttgataaaaatggacattagcgactatacaaggtaataaaaaatctatactaagtgttagggtacgcgacatactagatcgatgattgaagttagtcctaactcttggtactttaaacgcatagaaccatttagatttccaatctcccatattggaaattgtaccttctaccccgttaatttcagagttggcccatttgctaaaacaataaaaattgttgtcgtggccaacgctctttatgtcataaaaatagctaaagtccaccatcgttggctccccttgaacatactccatatacattgcacaaaaccccaatattatgcaataactgtttggagttagttggaaagaagagacatcgtaatgtttgaggatggcttttacgaatagatgaaaaggcagtgtcaccccgcattgcaaaatgggaatcgagaccaccacttcttgcgtagggatgatcgcatggctagtgaatggaagatgaggtcgctgagatgctgaaggacgtaaagtccctatacgaactaagttcagccatgcaaatgtctgcaggtctgattttgtgactcgcgagaccagatcctcggatgaaaatggttcgttcagttggatgtttatttctgtctcacttccatcagcatccctctcttcctcagaatcggatcaggtacctcgaagtcttcccccatttcttcaaccttgatgtcaggggcatgtctcgaatgaatgagataatcctgggctgacaccgtgaattcgctatcgtgtatttcaaccgttatcggttcagtagatagcgagccctaacgggtcctggcgctaggggcctcctcctcagatatcgaggtgggtatgaagctatcgctcctttctggctcaggaggtttaaatattaatatccctcatttattgggatggagacacgtgggaagggaatgcctaaagtctcacaatccaacagttatccataaccacacctgcacgaactccgaaaagttttaatgacgtggcaccccaaatagattaaaagtaataattacaagtgtcttttcaaaacccttgattagacaaccaaaagtcaccatctcgtgataacctttcgcctgcctctcgcttatagtttccctcatgacacagttgtcaatcgcaaaactaggggcatgtgttatagtgagaacttttcacctagaaactcgagaccaggctcccataaaaatgacacgtggactcactttcctcgaggaaggctgaaatgtcagaaggagacctcttgagtgtaaacctcgcctgaactagactcagctggatgatgtgaccttgacagggtctagtcgcattattatgcctcgcatgatgcaggaccgaagatcagatttaagactcgcatataccgagatatatgcgataactataaagatcttcccgcgagatagtaaagatctattctttactcagcgagctggtccggatgacccaacgaactcggtaacccgataaggactcgcatgtcctaagttatcgatcttttacaagatatccatatatgcgactcaaacatgacgcatatatcttatgcatgtgagactcgattagtcttgtacacatcttgagcctgcgagcttatgtgagaatatgaacagacaactcgcaccacaaaggtcgcatacgttgttgtagttagttaattggggcgaaacttttctttatttattatatttacgttttaattgatttaaatgttgatattcaatgtaaaaacgaattgataattaaatcaatctccatgtattcaaagtacacttactttgtatataaagaagtgatccaacataaaaaggacatgacagattacccttgcaacagtggactaaacagaccgtgatctgactgaaccactatactttctttgtgttatttacatttccagtacatctgtgtgtccatag

SEQ ID NO: 24966 - DNA, 4853 bp, Cannabis sativa
aatctttggttcaagatgaattatagaacataataacatatgacaagattaatagtagtacaatacatgattggtccaataaaaaagtcaaactacaaaaaagcaaattgttgtctgcagatgatttgtatgatgataccagctctgtgagttcttcacactcaggaacttattccaacttgaattatctctctggagatgagaaagaaaccaatacaagccccacaataggagacaaacttcccaacaatacaaagagtcacaactactccacaagattttgtcctgaagaaaaccataagaaaagtcaatctacagctcagaagtacaatgagcaactcaaagcattactatcaaccactacttcaaaggaaaagcaaaaaatggttgctatggacaaccttaaactgatgaggaacaaatcattagttgacatacgcagtcaattactacaccggtctctggtagaggaagtttacaagagacggctgtttaatacaattggagctgtcgaaaacatcggttttcagtcaccttatgatgtttcaaaaccatcatcaggtggtgctggttctcataatcataaaagaagttcaaaaaatgtaaagggtcaacaaccaagtagaagagtttgagatctttctcatcattgaagtcaaattattgagttgctttaaaggagagaagaagagatatcatctcctctccttagtgaagattcaaggaaattacttctccaatttatggttagatcgatcttcacaacatattatacaggagttttggcatgatttatattgtaaatatgttttgtgtaaattaagttgcattgcaatgtgagaagagaaccaaataacttgaggttcttaaatttgtggcgatgtctttctcttgttgtgttcactattgaagaaaactaaaaaagttgtaatattataatctttaatcatagccttcccttgaaaaaaaaaataagaaatgcttcatttgcaggtgttataaatcttagaatcagactaatcaatattttgttctagctatagtttgcatattaatagttgagatcattaaatgaaacaaagttgtgatttaaagctaccagtttacatggatgaaattttctgttatatgttgctagccatgaagtcagtgttacatccagtaatatctcaaacgaaacgattaagccccatttgggcagtttcttaaaaagccaagggactaattggtttgagatttttcttttaattttttttttaaaggggaatgcagcagaatatggaattttatccatttctttcttcttttcttctgtgctaggacactgtttttcagacacttgatattggcttgctataggttgtttagtaggtttggaaccaaccatagagaatttctctataacctttctaatgtagtttctttgaatgagagttagctttccttccttcccatttcttttgatgtccattattataattcttttagcatttctcaagtctttcatatcaaattcagtttcaaggattattctcttcaaaatttcaaccttagttttctctttattaatcagtaacatgacatcaacatacaacaaaaggtttttcgctttctcaattttgtaccctctgaagtactacaagcagtaattatgaaagcttctcctgaatccttgtttgatcatgaagttgtcaaatcttttattctattgcctaggagattctttcaatccatacaaggatttttgcagtttgcataccatttcaataactaatttttcttcataacctttaggttgttttatgaatatcttctcttccaattcaccatgcgaaaatgttgttttaacatccattttttcaagtttcaggtcatattgaacatcaatggacaacattacccttattgccttacatttgacaacaaggtaaaatatctcattaaaatgcactccctctctttgagtgaatcccttagccactaacctaactttatacctaatctgctctccatcttctttgtgctcgaatatccatttatttgatacaatggattttccttcaggtcttggaactataatctaagttctgttctttctcaaagatgacatctcctcatctattgtagtaccccattttcttgcatcaggaccttttatagcttattcatatgagtcaagttctttcttggaaatctctattgcagagtgaaaggcataggcaataatgtcatcttaaacattcaaactcaacttgttgattggtttggattgtcttctttgtttgtgttgagttagttgataacatccaagatctggttgctcatgatgctacttcttctgctatgtattctggatcaggttccacctaagttggatggtctctttgttccacttgaacagtgtgatctaactcccttgtatcttatacatgctccaccttaacattagattggttttggttctccttccctacttctaaaccaatttctttccctttgctacctgcattctagttagtaatacaagaaaaatctatttcattgaatatcacatccctactgattattatcttgatccattcctagatctaccctgtagtttgtagctctccaccccaggtggatatcctagaaaaatatacttgtttgatctaggttcaagcttacctatgttttgatgcacataagcagtgcatctaaaagttctgagatgagataggtttggaattttacgtcaccacatttcctcaggtgtcttaaagttgattgcactaaagggacttctatttatcaaatatgcaattgtcatcacaacctctccccataatccctttggcaatcttgaactcatcatcatacatcttttttaagagtgtcatgttcatccttttagcaatcccattctattgagggccactcttaactgttctatgccagttaataccttaatctgcataaaactggttggatctcttataaaattccaaaccattatcagttttgagatttttaattctcttccctattatgttttttgttacattcttccaggttttaaaggtaataaaatcatcatttttgtgtttcaaaatatgcacccaaactttcttaaagtagtcatctacaatggacagaaagtaagagcttccaccaaaattttgtaccttcttaggtccccacaagtcaacatgcaagtatttaagtatttgttttattcttaccaaatacattttgcttgtttagaacatgcaaacctttcttaccgacgtgtcgaagtctggtatgtcatagcacaatcttgtcttctgttgttccagttgcaacatatgcttatccagtcatagtttctcctttaaaatagtatagctctcattgtttctctcctttcagcatgaccagtgcttcctttgtgtatttttcattttctattgcaacatttgaattcataacctacatcatcaaactgacttagtgaaatcaaatttatagaaaaagttggaacatacctgatgtctttgatctctctaactgtgccaccattcagcctaaatttcacatccccaattctttctatggcacaggtctgaccattttcaactactattttcctgttcttttggattttcatgtttctcatccaattcttgttgtttgtcatgtgaaaggttcatccaaagtctataatccactcattcttgatggtcatggcatttcttagagttgattccactataagaacttaaccatcctcaatgtaattttcattataatttaaagatgttttaggatcttgatcattctaatcattatttcttggacccttgccttttcctctggtgagttcatatcattacttcctgatgtggccaatcttaccataatgataacacttattgttggtattgggtcctcttgattgacaccttcctcttcctttagcactgtaacttcttccctttcctttgtgatgatgatttccttgatgttgttatcttcctctagaataatatgcctctaaattattcttttgaagcttagcagtttgcttgatagacagttcctttgactatatgacacctattatttctttaagcactagggtgtccttagagtagatgatagtgtccttgagttgttcatattgattcggcaatgaatttaatatataaatttccttgcttcttcctcaattttcacctccaagttgtttaaattaaaaaccagcttataaaactcatttaggttatcatctaaagacttacccttacccatcttgaatccatagaactctgtttcaggtacactctactaggcaggctcttgattgtgattatctattccaatctagaccacattgtaactattgcggtctcttttaccatattcctcaatacctcatcttcaagacagagaattatggtattcctagccttcttgagtgtgttgtcccaatctgtttgttccacacttgctggtttgattacatcctttgataatgcttcatctaatccgtgattcccaatataagctctcatcttttctctctacaaatagaagtccttcttcccactaaacttttctatgtccaccttgacaaaagtcatcttctcgtttaaggcaatgctttccacaattcagttcttagattcttaatgaatcttggttcttaatctacacatttaagattaacttgctctaacctgtgctctgataccactgttaggatctcagtcccaacaccaatctcaatatcaatttgcacacattaaaaaaacacacactccttcacaaatttatcaagaacatgcatcaaacatgtaagaaacatgaagcataaactggacacaaaaaaa

SEQ ID NO: 24967 - DNA, 900 bp, Cannabis sativa
aaaaaaaaaacagaatcaaagcccaatccaaatctaaacccgaaaactagaagaaggatcattcgttcatatttgtttctcctattattgcttctgtctccaccaccacctatcgtcgcctacgtaccatcacccctgcccccgaccaccgcttctccaaacaagatcaaggttttcttcttctcaggtactagtttaatttgtatctattccttataatatgttacattctttaattatttgaatttgagttttgatttgtgcaagcactagggtttcgatacttgattgggggctaaactctgttttgaattcatgccactgactcgtttggcttgtttatttttgtttttaagcagttgaaactgactcaagtaatgatattcgaaaatttccatattagattgtcttgcttgtaaaccaaaaattacagagtatttgactattttgtatgttaattcatttgttttagttgttatatagacttagtgcaaaacaattttttctacttgtctttatttattttagaattttcttttattaaatttaacaaactctgaagaaaagtcgaaactttctaggctctcagtttcatacatcgattttggattttggattcataggaactgggaagttattgaaggaggacatctgggttacaagtttaaatggcgtcatcttcactgataaccccagaagatgtgttggaaatgttgatgaacgatggcaccattgattctctcagactgaagatcatcaaccagctcaaagccaatgtaactcctctcattctttgctaataataattagcaattcattttttcaattatataattgtgttgtcctacaacttcattgaaatttggtctattttgagctgaaatactgtgttggggtgaa

SEQ ID NO: 24968 - DNA, 3227 bp, Cannabis sativa
tcattaaacttcagggaggatgaagtaaaaagattgctgaaataatcaaccataaggctaaccaagttattcttccaatcaatccatacaccttgatcatttttcagcttctggattgaattattccttcttcttgaagtggccatagcatgaaaatacttagaattctgatccccctcctttagccatagttatttcgatctttgtcaccaaaaaatttctttttgaatcaacacttcttgtagccgagcctccgcatttttctattcaacagatgcagcatccctgccttctttccacctacgcatctcagttttacaggcttgaattcgctctctaaaattccttatgtagtctttcccccacaccagcaacttctccccacaataaatgattttctctataacagaaaagcccaaaaaaagttcccaggtgtcctttacaaggtgtaaacaagcaggctcacgaagccagagattttcgaaccgaaactgcttttgagacacagttctcttctctacatcaagaaccagttgtatcgggcaatgatgtgatgttgaaacctctaaattaatgagcttagcaagtggaaaaaaatcaagccaactctgagagactaacactcgatcaattcagacttcaatccaagcactagtacccctacctttctcccacatatagggatatccacacaaatccatatcacacaaactacactcttccaacatgttaccaaagccttcaataagccaattgggatagggattaccacctcttttatccgattgagaagtgacattattgaggtctccaacaacacaccatggcagagaactcttgttcttaagaacccgaatttgatcccaagtatttttcctgagacttcggtttggctctccatagaggccagtgagatgccattgtttcccattattcccagaaattgaaacatcaataaaattcaccccttaaacaagtaacttaacatcattgctctcacaccaaagcatagctacaccaccacttttcttcctagcatcaacagaaaacacaccctcaaaatccaatgccacacgaatcttttccaatacctcagctttagacaaagtttcacaaaaaaacacaactttgggatgcttttggataactaaatccttaatgaattgaataacccatggcaattctaagacaatatactcatgatgattggtgggcctgaacatcaaggcccacctgcaaatcgttttttgaagtagcatctgaattctccatacggcccatattgctatctcccaaatcaacagactccttcattatttccttatcagtacgtctccttttattatctaaaataagcacaaaatcatcattttgactttccacttgcaattcgtcattatcatttatagtctatgatagccttcccttgattctctcaagaattggtgacttgattcactcccttatttgctcctaaattccctctatcaaatcgcatcattgtaggaggatttacttccatcgcctccgccttactccggtgccttccactgccaacagccgagccatcatcttcctcacaacttgaacgtagccattgagccccaatgagatagttcttcttcttagtgatagctttcatccactgcccataaggtttaatatcctgatcaaagtgtggatcgaactaccgagggaaaaacttatctaaatgaccaataaatccacatataaaacagaatctttgaacatgttcatatttgaatgtagtccaaatccaagttccatcttatttaatcagtttcatacgtcacttcaatggtttattgatgtcaattgtaacccccactcgaagataatcacgccatatccctatgaaatttttcggattcgatttgatgaactttccaatgtaattcacagcatgcctaacaacccaatccgacataaaaccatatttcaagtcatgtagcgaacccacatatccaactcatgcaattgaaccaatctaggatcctcccctctctttaagcgatgaaacacaagttgcatcctattgaaagtccatggactcccatcaataatagcttgaacatcaagttcaagatagaattgaaaaaagtagcgattagtatccagttctttgatatagactcctttaccatgctgccaaagagaagccaacatatgcctcagagcgtcaaaatcgatcgttctattagtgagatattttctaaccaaacaccaccaatcatcaaaagctttgacatccccttcctgatcgtcagtaatcagagctccctcctcttcctcctctatttgtaactgtgcatactgatccatccaatcaccatcttgatgactactcgaagccataacagaaaaaccaagacacacaaagaacaaaaaacaagatactctcaaaacatgtcaaaagacagggcattagtattcattttttttttaatttttttgtcctacgtaatattttacgcgaatgtctatttttagtagtatatgctgcatatatatcataatgcagattattagagttatcttagtttgtaaatcacggttaaattaattatagtagttaagtttttcattctcccttttagcctatataaaggcatgtatcttctttgatcaatttggttgttcaataactaggaaacaataccacgctttgcgccgtttttataacatttgaaaattaaattttttattttttttaataaattttatatattattttaagataattctcaatttttattttaaaagacacatatattatacttgaagctatagtcatcattattattatttaaagtgctacaacttattataaaaataaatagctaccttttcttcaaaactataaactaaaaaattatgttttctcaactattaatgaagataaacattcccaaactattctcattttctatcctacattggaaagttaatttcacatatttacaataatttacatatcatattctttttttatttattttgatataaaaattttaatttgtatttatttttaaagttatttttctcaatcataaaatttatttttattttttttaaaaaaagtcatttaaccaaaaattacataaaaaaggtaaaattttacataataactcattaatatcagtaattttttaattatttgaaaacaaaatattattaaacgattgtgattaatttaaaattttact

SEQ ID NO: 24969 - DNA, 2131 bp, Cannabis sativa
aaatcttttgccacagatcggggtttagatgtagcaacaatgtcatctgcattatatttgattctgaatatttatttgttgattatgatttgaacatcaagtggtttaggaactagaatccaaattttgttactttttagagcattgttttcaatattcatagcatttgtccacttagaattagcagtggtaagttctaagtctaaattggctatggtgaggtaagttttgggtttgtagcatttgttttcctttagcagcaattagtgctgagcatctaattcaatcaaattttattattatgtgatccaatttaatttgtaattcgatttagaaaatcatcatttgaaccaatttaattagatctcaaaatctaattaaatccaattaaattggatcgattttttaattagaaatctaattatacacctaattttcaataatatattaatataaaaatatataaaaaaataaatatcacaatttatataaatttaatattccataaaaatattattattataattgtaatggaattaaataaaacaccagcattaccaagtaataaaatagtgttagaaatgccttcttcgagacaaggccaatctccagccgaaatcgactatttcattcaacaacaaccatacaaaatgtttcccaggtttatataccctgttgcagaaattacaaagaagaaataaaggaaaacaaacgtaacagaatactccaactgctgccttctcatctttgctccatcctaacaaactccttgagccatcggggtcgtacgcgcactcgtgtctcacgcgctggtactctcgctccatcaatttctggatggtcttcctccttcttctcctttcccactctttcgagtcgctgtgttggttcttcctcacaatcggcttggtcaatccacccacttaccctttgttgtatttcatttgagtcaattggtattgggctcttgaattgggctgggctctcaccttgggctgggctaacactactcccccgcttgaaaacaaccttgtcctcaaggttggtgaacccgtaaatctgacagaattgatgaaagtcttcccaagtggcatcctccggggcacatagagaccattgaaccagtacttgtcgttggccttcatggattcgtgcagcgaggattgcttgcggggtcatcactggtttgttgttgacatcgtgttctggtagtggaaagcaaggagtgttggagttgccatggaacgatttgagttgagagacatgaaaagttgggtggatgcggctacccgcgggtaaacccaaagtgtacgccactgaccctatgcgagccacaatagggaacgggccgaaataccttctacatagcttgttgttaagacgcttggccactgtcagttgtctataaggttgtaacttcaccaacaccagatcacccagctgaaattcaatatcccttctgtgtttgtttgcttgttggcgcatgcgatgttgagcttggaggaggttgtctttgagttgctgtaaaatagtgtctcgagtaaggagatcattctcaaccgtttgaatggtggtggaccctctagtataggctggaatggttggaggacttcggccataaactgcctgaaaaggagtcatcccaatagcggagtggtggctggtattatagtgatattcagcccacgagaggaacctgctccattgctttggattgtccgctgtaaacgcccgaaggtattgctccaaatatcgattggtgacttccgtttgtccatctgtttgtgggtgatatgccgagctcattttcagctttgtacccataaactcgaacaacttcttccaaaaagtgctagtaaaaattgggtctctatcggaaacaatagatcgaggcaacccatgtaatcggatgaccatctgtgaaaagagatcagcgactttggtggctgaataatgagttggtaacgcaccaaaatgagcgtatttggtgaaacgatcaatcaccaccaaaatgttagtgaccccataggaatttggcaaccccacaatgaaatccattgccaagtcctcccatacacgttctggcacttccaatggctgtagaagtccgtaaggagcagcggctgagtat

SEQ ID NO: 24970 - DNA, 3146 bp, Cannabis sativa
  modified_base (1662)..(1668): a, c, t, g, unknown or other
tatgtttatatatggaacaaaagaagaggcatttattgagctatggaataacaccacagctcaaatgagtcaattaatggcaacttaattagcttaagaaatgagtcaaataacaatatttctaagccatgaacatcttcaagaaaaataaaataaaataaatttaatttatgatcaatgaatgcctttgcaatattgtctttcccctttactataaactggatatatgatctgacccgatatctgattgaagattaccggaggaactagaactcgaactactaatatgaactgcaaaagattcggccaactttactgcatcttgaacccgaagacgagtaccctgttgtctaactacagttgcagctattcgagcagctagaccacccattgctctcaagtccgacatccctcgtagcagaccatacaaaacaccagacgcatatgcatcgcctgcaccacaagtgtccaccggtacacatggagaaggagacacatatacagcttctccttttacaccaatgtatgatccttttattccatccgtgaccgagactaagggtactaaatggcttagataccttgccgctgcagctggactttcctcggaagaaaaatcacataaagctctagcttcatcgctattcgcaaatatgatgtctgcgtagttgccaacgatttccctatgtgaaataatctaacaaatatgatgtccattttggtgttcaataaataataaacagcacaatttaatataatactatacaatacaatacgatcagatcaggttttatggtatttaaaagcaaatgaaagaagcaaagtaccagaattcgtcgtagtgtctctctatgcaggaaacatcagatgctgtgatagcaaccagggaaccactccggcatgcttgctcgcatgctttctttatcgttttgattgtgtcgggaagctcaaataaatatccttcaactactaaaatctttgtattggaaactatcttagctaggctcagatcataattaatggttgatgatgtaccctgatagtgtaaacaaaatgatctcaatgtttcttggaatgttgcttcaaaaccaattttaatgaccaatttcttggattgataatttgattgtaagaagttggttaggtgaacaaattttacctgatacgataacatagtgcggtgggcatctggagttgtgagaactatcactgtcccggttgttccatccttgatcggttcagaaagaaagttaacatttgcacggcgcaatttcgccctgtaagatcaagcaaatggtcaaaactaaatagcacattgacagctctaattaatatgatccacaaactgattgagattatccacaattttctacaaaacaatcaaaaattaaacacaacacttgtatttggttcatccatgaatggctacataacatcaataataaaactactaattaaaaggtgtattaggatttttgtcccaaaactttaatatgtaccaaatcatgtcccttaaacttttctagtaattaaaaattctccctaaattattgaaatcgttagatttaaggactttagtccaatcgcattcaattttactaattaagtgattttttatgtactaaatcatgctcccaaatctttgatatctaccaaatcatnnnnnnngaactttgacatgtaccaaattacgccccttgaactttcatccatgttagacttttcttactaaaattggacaaaaatcctaaaatccaacaatctcaatagttcaagaggatttttaacgaccttaaaagttcatgaaacattatttggtatatgtcaaagttcgggggaaaaaatcctaattagcctaactaaaatgcaaaatccaattatgtaactctctcacaacaaacacattcacaatcaaattaagttgcagaacaagttaataatcttcaccaagcataaattttgaaacaaagtagttgacttgtgcctgtgttaataatgacttgggatttcaacaaaggcattcatacatgagatcagaactcacactttcatgctttcatttgatttagtccacaatttaatttatcaactacattgtaaaggctaaaattaaggtactaatgagtgagtagtaacctgtaaaaacttcccaatggatcactcccaacactaccaaccaaagctatattgagaggaggacccccaataggcttattaccaagcctagccaaggcaacaagagtgttggaaagagaaccaccagctgcagccttgtagctacaaccatccattgcccttaaaactcttcctctttcttcatgattcacaaccttcctagtccccttttccaattccaaattctccaaaaaatcatcatccaccacaccagagaaatctacctaaaaaagaaaaaataaagattgaaactttaacaggtaaaaatcaaaactttagcaaataaatataacaaataccattgcttgaccaagtcccaaaacatcccatttttcaggcaagagagaagacccatctgctaaccccaaaagattagtttcttgttcttcttcttcatcatcatcatctgatgaggccccatcatgttgttcaaaatgggcagctctgttttgttgctctggggtgaagcaatgacagaatgagaggctgtggagtctggtaaagctgatagaagaagaagaagcagggaaagaagagaaaagggtgtttttggtaattttagttgagtgaaaagaagaagaagaagaagaagaaatgggaagaagagagagagacatgctcttctcttcaaagggtttagtcttcaatggatgactgtggtggtggcctcatccaccgaaggaaagccaaccaaagtttcaatctttgatatgatatgagactttctcttactctatctctgagttctcagctcagcagctttagaaatagaaacacattatcctttcattttgtctttttatctctcaccgcgattcattttttattattaaatacactacgtttttcttttccctctaacaataattaaacacacttatattggtaattaaataaaaaataattttttacctaaaaaaaatataaattgatattttatttataaaaatattttcataaagtgtggacaa

SEQ ID NO: 24971 - DNA, 5493 bp, Cannabis sativa
  modified_base (5467)..(5467): a, c, t, g, unknown or other
ccgctattaccctttagcggccacaattgagactaatagcggcggagagatccgccgctattagtgttaaatgttgtagtgtataaaatattatttatatagatttctaaattactcaaatttttctattaattatcattaattgtaattaatcactattctcctcattagtttcctaatttataactcacatatttgtataaataaaaatcacccaattgaataaaatactgataaattcttatttagtttctctttctctttctctcttcatcttattgttcttttattcttatctattttatattattcataacaattttataacacgttatcaacacgagtatctgctcaaggtaaaaaaaattattaaaattttgagttatttcaaggtcacgatgcacaaaatataaactcatatgactaaaataatttcaagaattctttacttttgtcttctttttttatctaaacattataaatgtatatatattcttattctcacatgtctattcttgaatttatatgtatatatacatatgtatatattatttacaatagatataattgtgccaatgatatgataaaaaaatatatataaattatgtttatatctgaaaaattatgtatcttcaataaaatcttgcatatattatgaagattatatacacatgatattcattataaaaattgactgaaatataataaaatagataaatgcatgaatgtatatgtttttgtgttctttgatgataataaaaaagtaatataacatcgttatagatttgggcaaacatttcctaaagtaaatattttatatttgtcaaaaatattgtatttatgtatacaactaaagaatcattgaagtgatttattattgattcaaatgaagattgagttttgaacacagaagagaattttaaagaaatttcatcaaaatatcaaaatataagaataacaatgaacatgactaatgttatctatacacataaaatatttatttcttgttcatcattccctgcagagaataataagaattaaattaatttaattgtaaagagtatatatattctatatattggcctactgtacacgacatattgaatatatattatttaatatcaaattttctgtacattttgaagattatgcaaaaataatactcacaaaatttttaaaatattataaaaaaaattgttgaatattttcttatatatacggatgaacaatattttattaatttttaagaaagttataatcatgttcaacttgttcaaaaatattctttgaagcaaatttaaataattaaagaaactatttactcctcgaatattttcagaagaaattgaaaaaaaaatatcacacatagtcaaagtgcatgaagtaaacattttatatgtggaattaaataagagtggtcatgtacctgtagaacatacatacttataatcaatgtgaaataatatttgactgttgaatcaaatgtgaattatacaataaataaattaattttattttatattcagattattataatatattttcctgaagagaatgaatggacataaaatagtatttcaaagaatatagattgtacatatattagcgttgactgtgaatttagccaccgcgcagagtttgactagcatcgttgcttttgactggtactcgtggaacaataataaatgtaaagagatacacgaatttatagaggtttgtccccttttacttaggtaatgacctactctctttttagttgtattcactcttgagataataccgagtagattacaggctaagacattataatttctagctgggctctcttcagtattacaatgtgcttggcaggtgagaggtatgagaaaagagagaggacttattgctatagtgcttctgagcgtgattaaaacttagaacgtgagaatgacttaggatatagggttcatttcacgtgtgtatcttgccctttatatagtagtagggcttacatagtgtacatagagatattcttagaaaatagggaagttacaacatatattcaaaatataaagataaagtaaataataattactccttaaagaaaaagaataggaatagggttgttatttattgatggagagtccctatctttgtgggcagtttgaactgatccaaagttgtgggaatgctgaaggcgagttggaaggcttgtgagaaaaacacaagtgctggtgtgtttctgcaccttcggccagccaaccttattgaaggttgcctagtgcttggaagctgacactcttggtcggctagctataagttcggctaggaccttgctggcaggttcatagatcctatttggcttgtgtgtaccgtgcaacatagaatctcaaaggttgaggggctgcttgatactaatcttggcaggttagtgctgacctatcttcaatgtgttttctactttttaccatgtggaagagccacatcaggtggaaaaaatttaggattatatttgccccctaagttcctttccgaacgtctagttgagtagggactttttgctttgtcttgtattgcaactccctttgccgtgcagatatgcatggccaggtatcggacttttcgacttacgtgatttgatggcagttattaattttacgtcgatcaatgtggaaaggcgtgcaatagttacacattttcccttgttgcaactcttggccttctctttcccatgcatgcctatttttgtggcattaactccccactaagtttttgggggaaaatttccagaaattatatataggcctcattcttcttttcattcaatactttcacttctgaacaacaaaacctttctcaaagactccttagagccaaattcttgtgaggttgagttcttcgtgggtttatgagtttctaacatacacacttgtcgtgcatactagctcaagcctccttatgtcttctagtaggtaagtttgaagctttccctctcttttgttctttaaagttccgccattgttgagttttaagcttttatgaacttcttgaatcccatgccttaggacagtttttatgcattataatccgttcaatagctttagggtgcataatgtataactcattgatgcaaaagataaaaaaaatcttgagctttcttttgacattttggttttcggggttcaaagaacacaaagaatgtagtttgaatctttaaaaatatgatttttgatttgtttaggggtctggccagcaattcaagtctgctagggaccatggctggttcttggtcctgcctcaagttccttggtcgatacttggtacctttctaggaaccctatctggctcttctatggaaaaacatgttctggtcaattcatgatgagctgaacatgacttggccagttcatgatgaatttccctgaagctggccggttcatgatgaaataaccatgagctggctagtacatggtttgagacttcatgggtgggctggttagtacccacatgtattatcctgttagcgcatgtttttatccttatcttatttgtgatctctaattgttcacctccctttgtctttttgcatagatgaacctgcacgattattaaggaggtgacaactagatcgatgaggacttactttgtcttctatacgaagactatcacccatctagctcttcctttgagagctcgttaggcagctctttgagtgacttcaaagcgagcagtggttctccaaaacttgaagtttaacataaacaatattctgagcgaataggtggtgagatctacagaagattcatctgggaactgaatcaagggtggagatagttcctacctaagtcgtggacttacattgtccgctagggtattcctgacattgtggctgttggataagcatcttctgcatttatagatgttcttgcagcaacagctgttgtgactgttgcacaatactctaagcaacattcaaaattggaaaggacaaagtagacttattgcaaggcacctctgactaatccctacattgccaaactcatagaaagggggagagtttgccagatcgaggaggctaaacaacttgaggctagccaagtagaggaggctatggtcaaccaagaggaggagcaggatgtagatcagcctaagcctgagattgaggctagggtagctcgaaagtgccctaaggattgtgatgtgatctagggtaatcctttgggctcctacgacaaggctggagtgcctttgaatagcagaggccaaccctcgtagattggggttgaccatattgaggataaagctgctaagccatggattctttagataagggaaggagatagggggtatcccctcgttctacactatcgagtgccaatcttgaaggcatcatttatagaggacttgttgggcgggtttgatgaattaggcctggtctagaccacttgggtcaccatctacaaccaaacttgatagcatggtctggcccccatgcagagaaaggtgcggtgcttcctctgcaactgtattttagggacatagctaacttcttcaagatgtgtccaacttagattgcactaaagagtatcaagtacctgtcagcacttttttcctctatgtttgagttaggttagtcgcaaccttccccttttgaggtgaattacttctttgagttgaaatccagtctaagccaaaatgagaccgggtacttctactttagccaatagggctatcagtggcttggcggcactaatgatgcagccatgtcaaaggttggaggctatgctataagttactttattgcatgcaacataaagggcatctgttagctttttcactgtgttccaacctacagtcagccactccccacattgagactgagtgacattttggaatatattttactaggatctagattttctaacaagtatgttataatctaatatcctaaacgtgaattcctaaaacagcaaaaataaatacatataaagtttagaaaaccttacattggtggcagcagaatgttatggctcctttagttcaaatctctaacccttgaacctagatctccttcaagtgttgaaattattcacaattttccacactaggattgagtatttgacttgatatgagtgggcgtgtactcttcactaggattcaaaaataatgaagaacaagaagaggatgaattcaaaattctatagaaatctcaattcctaggtttccgacaaagaatgaaaactaggttattagagtttttagagagttattagaataagagacatcttattccttttatagtattttaacttgggttttggatttaaattatatggaataaaaaagataaaataataacaaaataaggcttaagtggacggccatagttagtggaccccaatagttataattttgttattttttttcaacaatttatcttttctttcactaatgccatattttctaattttaatcctataaatgtcanaactatttatttaataattataatta

SEQ ID NO: 24972 - DNA, 3680 bp, Cannabis sativa
tttttatttttatttttttgtcataatatttaaaatataatttatttttgtttgaaatttatattttttaagaacatgaattagaaaaaaaaaattaatacaattaaaaatataattattaaaatatggtgttttagaaatttttggtgttttcactctataccaaaaataccttctccctctctttctaaccaaccaacacaagcatcatgccaaaccaccataactccaccattacatcacgctggagctccctattcgcccactgtccacttccattcctcaacctaaataataagtaagtaatttctatataaattgttgttaggtttcattatatgttgtttgtgttgaatagatccacacattttactttgggttttgttgattttctcttctagaatgaacttatgaacttagtattgctgcggaatttgcatttttttctgggtttctcgtatttttgtgatatttttattgatttcttgtgattaattttgtggtgtttggtaaaattagaggttatagaagatgtttagtgatatttatcgatatttagagttataaaatgggttaaaaggtaattttacgatgtttagcaataaagtgtgataaattttgcgatatataactgaaaaatgccaaatttcgtaattaggaatgcttgtccacatgttttcaatgtttatcaatttgtagttgcaaaatgaggattttggaggaatttgcaatatttagcgattcttttgcgatgttatcctaattttttttatgtttgtggggtgttttttcactttaaatttgatattcttctaaatgacaggttcaattgtgtttgtgcttatactatatgatggtgtttgggttgtttagggtttcaattggatattcaaaagccaaagtataagatgttgatgtttgagattgacacaaacttacagaagatgtgtgacattttgtacgaagagttgaaggtggtacgcaatcacgtgagatacactttagcaagttgtacacaacaagagagaattaaaacaagtagtgggaaggtttgcaatggagaacaactttgagtggatggtgagaaagtctaacaccgatgtgttttacattacttgcaaggatccaaattgtaaatggagatttaggggaaagaagaaaattcattgttacatgttttaggttactgtattccacaatgaacacacatataacctagattttagatagtctgatcactgtcaagcaacactgtggattgttggccacctaattatgggaaactacacaacaggtggaactaagtacaagctaacgacataattagggatatgaaagacgactatcacatccatataagttatgagaaggcatggaggtgcagaaaaaatgcacttgtgtatgtgaagggtatgccaaagatttgttatacaaagtgttaatgcagattttcgttaactgataatgaacctttttcgtaataaatttatcatagatatatatgaaaattaaaaaaggtataataataataacaccaagaattttacgtgattttgcagttaaatctgcatactccacgagtctatcttattcaagatatttctaagtatttaatacaatatacaattagtaatctttttctctcaaagatttttttgtccctttttctgtagaatccacccctatctataggaatataggttgacagttatttacatttaaattcgaattgcataaatgtttcatgaaacgtgcgtgggatttgatcacgtttcatttaaacacatgtaaataacaattgataatcgtataactgtttatcattctaatcttcaaggcggttgatgctgacttggacagtggtatctcgctttacatatagatgaccaataatgactgggtttaatcatatgccttccagcaatggcatgagctccagtgtactgagcaaacttaagaactgctctttgaccataaggcctcgcagactggacaatcatgtcgtgtatatttctaagttgatacacttagttattataatgtggaaaatatgctaaatgtttaacaaccaattcgtctcgtcgatattttcttatgtgtagcgaggtggatgtctcgttatacattgcccgtggttgattcaaataactttacttaaaaatgaatcttgttctcgagactgcgtattttgaggcaggctagtgtctcgataatacatatattaatagtctgtttatccttgtcttgcctaagactatacagtcagcgagttatgaatatactctatcaattttatatttaatgagttattccttttgcattaaatgatataatcgttattatatctggtggttcatattctacttaattgacacatgtcactctctgaagtgtagccaaatttcagatataataattgccccttaaaaagttcttttttaataaaaagtactttttaaatgattagaaagggttatttgtcttaacccaatttgaaaaattgcatgctttcgaattttggcagttcatgatttcaaggcacatcattagcattcattacccatcttttcaaattctccttgtttccatcagtgtgatctctattcctttaatctaacgttgattaatcttaaggtataaaaattgaaaagaaaccattattcgaccatttttgtcttttcaaaaatttcaatctctttttgcgaaaaaccgtttctgatttctctaagctctgcatgccctctttgtcattgacatattttctatgcattttttaagatatcctcttcaacctcaggagttcacagaagttgtcacgccactcatcccaacctcagtttcaaagcttttcgtcgtgcgaaaacccatttttgaacagtaagtgatttatccctcttttctctggtcttttccattttcctttgttacgatccctattttgttaattaattgcacctttgtttgctccgcttggttttagtaattttgatttaattttttaggttatttttagggtttagacagagtaaaaacttaggtttatcgtatttataagtttttggttttaataaattttctctaggaattgggattgctctttttgtaaaaatgtctcaatttggttttgaagtttattctccagaaatagagtgtcctaaggaattagccctcccattcaaacccagaattcttaaacctcaatccaaacttgagataaatgatgcaaaaattagggaccatttaataaaaaccaataaggacgaagttgctagtcgctatgggcattttctacaagagataactgagagtaaatgtcgttacttgcgagatgcagcctggcctgaacctttgtcattatcttctattcctttggctaaactcttctttttacccagagtcactattgctttttcaccaggtgacctggactttgaaattatgtcttccaagcctcataaatcaaagactccccaggatcctaatgtcacttttgaggctgagctcattgagtcaagaataagagctataggagattacgttggtggcattttaaggacttgtggcatcaaccaaaggcgaggatgacgtgttagatctgttacccccagggccggccctgggcctaggcgggctaggcccgtgcctagggcccactccaacctagggcccaaaaccagcca

SEQ ID NO: 24973 - DNA, 5902 bp, Cannabis sativa
  modified_base (1961)..(1975): a, c, t, g, unknown or other
  modified_base (2064)..(2064): a, c, t, g, unknown or other
  modified_base (2153)..(2171): a, c, t, g, unknown or other
tgaaatgagcagaaaaatcacttccaacacgggccgcggcatacatgatatatccttgatttttttcttcacacatgcctcgacactatccttgagtgtcacggcccacaaatgacaagttttggcagtgagctctccttgcttctctgccttattaaaccccagtgttaaggcgcgcccatgaatttagcaaaagtaaccatttttgccaaattttggccttttagcgccctgacatggaattttaatgttgaggcgctactctattatttccaatttctttgccttaggagctccaaacgcatcagaacttttggatttttcttggatgaattccctggtgctctagcatcgcgagagttaatttatttgaccttttttctcatatttttccaagatttctctatttttctttaagattaaacctgtaatatattaactaccaaaaacgtaaaatagcactaaatacgaataaaactatttaaaaatactctaaaagtgacctaaaaataatactaataaaaacataacagtatatatctttgatacttagaacaaatattacattatccatatttatatatatgtaggttgggtgtgatactaagggaccataagagtgtaaggggtgaaaagttaattacttggactaacccaccacccttgggtggatgacccacctttgaggggtgactgtcgaacccacattaggatagttacgtatctcactcccgatgggtagttactttaactactttaggggtagttacatatctcacccccagatggtagttactttacctaccttggggggcggtcacttaacatacccctagagggtagttaattctatctcattcctatacatagaacatactcctgggagtagttactcaatctcatctccatacataaacatacccctgggtgtagttactcaatctcaccccatacataaaatttaccattgtgggaataattactcaaaccaaggatccgtgcttcttttttttagaattgtccttgtactaagtgatttcattttctattttattttagtcttgggtaatctcataccacgtgctatcatactcaacacgtcacttttatcaaaatttggataaacaccaagaaaaaatattttgttaaaacactataataaatatctatacataaatatttatatacttatttattatatattactaaaaataaaatatttgaaataaattaatattaattttttttatcttttttaaatacttatatttattagatattttttatttttattacatgaatctagaatttcttattacatgtgattaaataaagtatttttaaattatttttagtcaaatgcatatttttttaaaaaaaaataaatagagatataaaaaataaaaattttatatataaatttagatatatttatgattataataaatcaaattataatagcattatcatcattataattaaaattttagcaattcacaatattttaaaactttacactaactgtaactttttttcagatagctgttttcctcatataacagttacaattacttttcttcatagcacaactataccaaactagtcataaatactataaatttaaaattaattatttttatagttacaaatttttatttattttattttttgaacaacaatatttttttctttctaaaaaagccaaatactttttttaaaagaaaaatatttaaaccaaatctaataaataataataaaaaattaattaatttgtgacataaatactaaagtaagtataacccctagttgtaaataaatatctaagtttaatttttggcgacaataatacctaagttatatttctacaactctgtaggtacctgattgttaattgttaaataaattgacatgcgtcaatccttgattggtccaagtcataaatttttatttttttaaaaaannnnnnnnnnnnnnnataccaataaaaaaatgacatgtgaataattacttaatatttaacggccatacctacagagttccagaaatataacttaagtattattnccgccaaaaattaaacttaagtatttatttacaatcagaagttaaacttaaatatttatatcgcaaattactcataataataataatannnnnnnnnnnnnnnnnnntaataataataataatagttttttacatggtatactgtatttttgtattttgttacttttatactgtcacaatgcaaaaattataattttaatgtacagttttatattgtctttttcaaaccgtatgaaacttcagtttatccctatattgacagttgttttattgtatgctattttttttatatttttttaattaaaaaattttataaaaaaaattattgatgtgatgttgcttgtcatattcatggtagttcttttaaaaaaaaaaataattaaaataaaaatatttcatatgatcactaatttgtaatcgccattgctgtaccctttttcttcttaaatccttttttttagttttggaaattttaatcttttgagtcgtgtggttggttttgagcagttttcttacaagttgcgtgttgatcggtttttttattttgtttgaaacccatttttcctctcattttttttcctattaatcgttttccctttttttctataaattttcattttatttttctttagcatgtttgtcactcgttctatgttttcatcccatatatttaaaaaatctcaaaacactcataaatctaagttaccccaatcttcaatgtggaaacaaaaatttaaagatcattctccaagtcctacttcccctgctccttccaaacgtaagttagatgttcattctccttctaagagagtttctaaacgtcatcaacctatggaggaggagtctaattccaattttaaatttgacgacgagttcattcaattagctaaagttgccaaggtcagtcgtttattttcgtatttttttagggttgtgttttattttaaatttttatgttattgtgttttaattttttcatttataatttaatagtattttattttaaatttatattttgtatgttttgttattttgagttgatttataccttctataacagttgtattcttcttttttttttgtaggggaaggggaaatcccctattcagaatattccttctaaatctgggtatgaagagccttctgctaatattgttgttgagatttgtggacctttttttaattatttttttttattttttctggttgttttggtgttatttttgagttgttttgaaatagatttgcttatttttttacccaggagtggacatgtaaatataggcgttcacaatattatcattctaaagtaaaaacttctagttttattgagtcattaacgatattaaaagtattctaaccccaacctagttgaaaatcttttcccaaactgttattgatcacattattcatttccaaatcatgcatggtctgttgttgagggaagttcaacaacctaatgagatagaattctgggtatctcttgctgagaagattcttaaatttagtgtagaggaatttttcttagtgacaggtctagattgccacattgaatctaatatttttcagttcaaatacaacaaaaatatgctagttgaacattattttaagggtaataaaaaaacttaccaagattttgattcaagttgcctttactgctaacaaccttaagcataatgatgatctcttagtcaagttcgcttttttgtattttgttcagtgttacttgctcggaggtcctcctggaaaggttgtctctattgagaaacttgatactgtggatagtagctgttataatgagtatggctgggggaaggagtgttttgagatgactattgaatctcttaagggtaagatttgatgccggtattaggactgttaggaagaaggataatgatggtggatttttataggttgttaggttttccttaggcactacaagtttggttttttgagtgttgtccgtatatcgttagaaaaatttctttgtattcaaacattagcatacctaggcttcttaactggcctaaaatgccaaaacttaaagtttctcagctaaaaatagacaatgtgaacaacatcatcttcaatcggcctttaaagcatgtataaacaatgatgatgttgttggtgatggtgaaaatgaggatgatgaaaaaattgattatgaggaagacgatgagcctggagatgatgatgttaaagatgatgatgatgatgatgatgatgatgaggatggtgggggtggagatgattgtggacagtctgtgtccgttgttgaaaaggtaaaaattgatgaggtgcatgttgctgttgatggtggttcaaagcttaatgaagatgtagtagatgcatctactgcacaagagtgcacaaaaattgatgataaattggttgttgcttcaggaatttttgctgatttgaaagaggtttgtttttgagttattttcttattgttttactgttttttttttttttgccctgctttgaattttttttaagttgtctattttattttaattttatttgactcttttttgttttattaagcagaatttattttctaaggatgatgatgattttattgatgttggtgcttctatggcttgtggcgttcaagctgttgagaagatgatattttatttatctattcttgtttgaagttgttgctgttttgtttttttaatttttctctttttattgttttgttatttttaacattagttattttattttagatggagtcttcctctactcctgttgttgctggtcagacttctgtttcttttggttttcacggtttggttcaaaatgatgtccgtgacattgttgttttcgaggagacaacaatcttaattcctgaaaagagggacaagaagaagggggctatgttgaagtctccctttattgaactaggttcttctggtgctaaattagattacgtgtctaattctcctgatgattctgatattaaaattgtgaaatatgttcgtggatcatgtccattggatgataagattggggaacctgttgagccaactttggagattgcttttgatgtttggctagggcagagtctccgatcgaagaaattatcgtaattttttttattgttcctttgtataattttattaatttcagatttattgttgctaaatttatatctcttttttcttgttttaggaaaacagctaataatgtttatctaaagggcaaatacaagatatctcctcccttttggtttggtgttgaggaagttgataacaagacgtagtttcacaaacttagttatcgtgattactttttaacttcttcattaagtagtttttttcagttgtttttgagttgtttgcatattttcattacctttgttttgtgttgtttcatagttgtttttttttgcattttcctttttttttcttttttcagcatattgatatgatttttactacctgtgtaaaaagaataagtatgcaaaggagccaaaattgaaggttaccacaactgattccctatttagtgctagcatcacaaatttatatgataggtttcttgcaaacaaaatgatatttctgttttatctttggatcatactatgacacaatatattatggggaaaaagattttatgtgctactccttggcacttgattgatcatgttatttttcctattaatatgaaagagcaacagcatcggatatgcgatcgcttaaatatttctgagaggcgcatatttttgtacaactcactcaagactaggggtgtacaaaaattttcgtaaaccgcccaacccgaataactgcctaaaccaaaccgacaaaaccgataaaaaatacaa

SEQ ID NO: 24974 - DNA, 2402 bp, Cannabis sativa
  modified_base (403)..(415): a, c, t, g, unknown or other
tcttggaagatcaaaaccttctctgcaatctccaacaatggctcgccacgtaactctcatctagttaatatattgtatatttaggtattcttaaaagtcaatactacatatataattttacataaaaatattaaataaaatacaattcaatataatactatacaatacaatatagtgtaatatgtcataccaaacgaaccctaaaagaataactatttgttctttaaaaaacataactatttaaaagtaattattgatttgttaactttattaaaataaataataatgtcacccacccacattctccatataggaacaaaaaattgcataaagtataacaaattaacaaatataaataaaaattgatccaatgatcacacaccataataataataataataannnnnnnnnnnnnaataataataataataatgtgaaagatgtaacaaatttgtttagaactcctttaatatttttataaaaacaatatcctaattttcatgtgtttctctaaggtttgcaaacatccttaaaaaaatagccataaacttatttaaatatcgccttcctatgggtaatttttataagaatctatatatattttgaacagataaaaaatgacaacaaatgtatgatcaaaagtaaaacctagaacttaacatatgatttactttcttttttccattcattttttttttttaaaaaaaaaaaaaagcatataaaaactattcagaagtgagagagatatgatcgtcatgatcccaaaacctgcaaatcccattcaatgcaaacgtaaggatcatgagtctacatcttgtggatgcagctttggaatagaactaggtgagaacacaggcaagcccggaaactgctgatgttctgtggccacaaaaggcggctggggtatcagatttgtggacgaatacaaagcattaaagttggggagtagatgattactgctttgttgatcttgatgatgatgatgatggtctaataataattgttgttgctgctgttgatgaataagttgcctttgttgatcagtacttcgctgttgtttgggaatgttaagcttttcgccttcgatttctcgatacttttcgaggtaaactttgagagggcctacatagttctcgaaacctagagttgtgatagcccagatgatatcgtctccattgattgtcttcctcttttctctctggcatttgtcggaggcttctccagtaacgaagcttatgaactcagagacacattcttgaacggtttcttttgcgtctttggagatttttccgtttccagggatcattttcttcatgattcgaccaacgttagctatggggaggaacctgtcttgttctttgttgtttgtattgatggggtgctgagttttggaagtattagtagtggggttgttctttaaacataatgggctttctgggcttcctccgtcaagcccacttggcccatctgagtaactttggtggtattgatgatgatgttgattatgatgaaggccatgatcatcattcattttactctcttactggtgatgttggaaaaatgaagagtgatgattaattgtgatgtgagatttgtatttggaattggggaataaatggaaagataaagctaaaaaataggcaagtgaagagggaaaacaaaaggaaaggctgaggttggtttttcaccatttaagtcccagggactcgttccatctgttgtacaaggttatttaattaactattgtgaagacctaatccttgctataagctaacttgttgcttaattaatttttttatttttaattctttcttaaataagtcaaaaggaaaaagactaaatcataccccatgtcccatgacggctgcaatcaccattttcgtaagttgcaatctgcttattgtaattttattatttattttgcataagttagaaaattacaagacaatatgatttctataatacacacgtaaaacacttataaaaaagtattatggaattgggctttaaaaataaagctaagtgatgaggcccattcaatcaaatcagatagtcatgactcatagcaaatcaactaaaaaggcttttcaacaacatgtacatcattttgcccaaattgaaaagaaaaacccaagctgtcctcactcggcaatcttttcctctctcttcctctttcgccatggttctttactagtaatttctagagtaactctatccctcccccacatttttctctttgtttaattttagtttgaatttaatatcaattttcggtgctctctcctttaagttgctcttttttgagaaatttacaaattatactaattttcaatttttcacaaaaattctactaggttgtattttttacttttttactgtgtatttttataagtttttttttt

SEQ ID NO: 24975 - DNA, 1374 bp, Cannabis sativa
aatggggttcacggtgaccaagaaaaattaagcttgatcaccaagaaatgctcgaggcttggaaataccagccttattcaagtgatcgtagggtgagtagcattagcaggattgtgaggaggagccggagggggggaaccaagagagtctgcaatggaagcatgagactctgaagtagaatttgaacctgctaaagcatgggtccttgaattttcttgtgagatagggctacctgcaatggacaaattgtgaggagcaatagacatttgagagccaatttcaggctttgcaaaaaaccatgatttgtggaaggagatgcctaggattgtggttctgctgcagattaagaatacttgaggagaaaggtagttgcattcaggaatgaggcatggggataaaaacatgttgtccagtggcataattattaagaaatccagcttttattgttttgctcattaaaaaccacatgtctcaagatgtatattcttccatggggacatagaaacttataccctttataatgctcactatatcccaaattcacacatttgattgagtgaaattaaaacttataagattgataagacctaagacaagggaagcatgctataacaaacgttttaaggaacctgtaattaggtttttttgaataaagagacgtatatggagactggttttgcagtacagcagttgttaatctattgattcactaatgtactaaaagcatcataccaatatcttaaaggcattgcaacctgtgccaataatgtgagccctatttcaacaatatatcgatgttttctttcagcttgaccattttgttctgaggtatgtggacacgagtgatcaaaaagtatatcgatgttaagaactaagttagaaaatgcttgaaactcagctccttaaattgttcttaacctcttaattttcttaaattgattttttgccctgtttttaaaatgtgcatcagatttattttgagtggatatagccaagtgtactgaccaaaatcatccaaaaaatgaatatactatttgaaactgatgtatgaagggatgggggctggtccccacaaatttgtgtggaagagttccaaaaaacgtttagctcgagaggttgaattggagaaaggaagagcatgagattttccatactgacatgcatcacaaaaatgttgtttttcattaactggaagtttttaatttgacattgtcaagacttgatttatgttaatattggaaggatgtccttattttctatgccaaatgtcttttgaggaagatagagaagcatgattggtagtagatgtacttgacacaaagatagaaaattgagggtgagactttgaggactgagatgcactgggtatttata

SEQ ID NO: 24976 - DNA, 2145 bp, Cannabis sativa
aatccaggtttaatgggacacttattatctggtaatccatctaaacgtgccaaatttatcatcattgatttgtttttatagctttgctcttgtttccacaatagaaaatttataaatattttcattaagagtgaaataatagagtataacaatctgattaattttgatattaatgattcatgaacgtttgatactaagaaaatattattccatacatgccatagaatttctccatataacatcataataataaatatgggaaaaaggacttatttgacttctagaggcttcatcattgagagaaaaaagaaggagaaaaatggataggccgtacaattacagggtctagtctggaacataacattaacatatgagctttacaaatgtttaagcataaaaatatttcacacgtctactacaatacaagtacctaaaataaccaacaaaactggttgcatggtgtgctcaaaacagcacgcgtagaagtaaccagattttgctgatcttctcactgtgaactgtgaatgaacactttttgttactacagcaactttcttacacaagagagggtattaacaccaatattggatctaaagctgaagaactaatatgacttgtactatttctttggtgagaagcacaagaaccagtaattgatgaagacacaccccttgctgaaacaacacattatgtgaacatttcatctaatttctgtctgtaaagggccaaagtctgcaacaaaattcaagtagcataaccatcagttgaggaacaaatccccccgtcttgccgagacacaagagaatgagacaatacgaaaaaaatacaccggacaccaggtagacactagcgaaaaaatagaagaaagtgcagagaaaatgtgaaacaagttgcataccctggtataggcatagacaccggcctcagaaggtgcaactggacttccccttctgatgaatcttccctctttgaaaatgtaaagcattggtattccggttgatagttctaaactaataacctgccaagggatatacagaaaaatgtgttaattatcacggtaatccttgttgctaagacgatcaagagtgttaagaactctggattatcacctcttgggaagttagtttgtcaaggtacataatgatggacctcaatgaattcccatgagcagcaatcatcacattttttccagttagaagttgcggttcaatctgcattaaggtatatcagcaaagcaatcagaaacctataaatttcagaaaatggatttaacacaaatagctaggagaaacagatcataagcaattaagttcatgcatacttcttctttgaaataagcaacagctctttcagcacacatttccaagctctcgccatttggaggtggtatgtcgtaactcctacgccactcatgaacttgttccttcccatatctatcagccgtttcctgtttattaagcccctgtaagtccccatacctaagaagaagaagaattattagtatgcagaatttttcaaataataggggcaatgtataaaacgaataatcagaaagataaaggttaacttagtacattctttcattcaattgccaagcttgcacgactggaattgactgctttttggtatcttcactaaaaatttcactccactttcttgcttgctcactctcattatgtataactataggcacctgtagcaaagtaaataataacaggtttgaggttagtcttggactaatgacaaagaataaaaagcttcctcaattaacggtggagtcaaagacactgtgttcaactacatatgtagctatgaaattacctttttacgacgatgttgggtcatagcaagcatagcagtcatctgagctcgaattagtgcagatgtatagatcatgtcaataggtatgttactgattcttttgccagcttcaatggcctcttccacaccctttttggtcagtggtacatcgacacaacccgtgaacaagttcttttcgttccacaaggactcgccatgtcgaatcagaatcaaagctgcctcctctggaattttgcattcagacaataaatattactttatggtattttaacacacaaacatgtattatgcatatactatacataaacaaaatgagccaattta

SEQ ID NO: 24977 - DNA, 3094 bp, Cannabis sativa
gatttttaacataacattaccactcgcccatttactcactatgcaaaataatagatcaaacaaaacaatgtgaaattcaaataaaaaagcccggaagaaagaaataccagccaatgagatagccgaatcccaagaagaaggtgataatcccacaatgacggcgaaacaagaccatggaagcgtaacccagtaacatggggaccaaaaaatgcaaatttgaagagaacccaaatgagagataagataggagaacccccgatagtgccgcgtagaggttcttagcgaatcgacccggaacgaatcgccataagaagctaacaggtattgtggcggcgaaacagagtaaaaaacggagcaccgcgaccgatacaccgatcgaggccgccatggattccatggcaaggtccatgtctgagctctgtattctcttgtctttcgaccccgagttcttactcgatgagaactatatctgactcttttgtgaggtcaacaaaaaatttcccagttgccaaacaaaattttcattcctttatataaccataaaccaccttgatccaaatgacaataatgcccccgcttatgtccctttaccaatttccactgctattctatttcaagcgcgtgggtatattacacctcgaagttatcgaaaagagaaaaggagaaagaacacgatcaagttcggacggcgaaataaggcaattaacttctctttatcggaagaaaagagaagaaataattctgttgaaaattattttattttgtttatataattaattaaaaaaaaagtaattagaatgtttttaatttaattatattttttatatacaaaatgtcaattattataaattaaactgagttatttacaatagaaaaaaaagggttaaatttcttctaaccatatacaattattatctaacactaaaatttgtttagtcatgtgcggcttgattagcatcccattgaatatgaaatacacaaactgaaaaaaaaaataggataattaatgtgaaacatctagcaccaaatcttgaaaacaagaaaggtttgatgtagaaccatttagaaaattagcgagaatcatcaaatcagtttctacaaagtcaatacataaatcaagttgtctaacccaacaaaaaccataaaaaataacatttgcttctatttcttgagatttaaaattgccaataattggtttggcaagagcagcatcgacatttaatttgaatttattctctggagaggtaaccaaggttgatgtgtagcaagtccatactagtttattgcaacagggatagcaacattagtatgatactgaaagtttcgaatgtaagccatagcttttgaataaatttgaaatggagtctgtagcaattatttctatctaaccgtatataccacataatacaaagaatcttctccatatcatcagtggaatagattgaaaaagataaataagaaattctccatcacgtatttggtttgccaatctgtactcgaaagaaaaactagctgctctccaaacagctttggcatgatcacatgaaaataaagcatgtcgtatagattcccaagcattagaacacaagctacatgttgcagagtttaatatcttttgatgaaacagtgacttcgcaactgaaagggaagattgagccaccctccaaccgaagatatattttggctttcgaaggaagtttaaaagcccaaaacttttttcaccaagttgcttgagatgtagaacttgaagccagctcttgttcttcaaaagagcacgcaaaatggtagcctgaattgactgaatattcacttgttccattataatgccaaatccatttatcatcaatagcaagaaaagaaagaggaatggtaagaatatgatccacattagctggagagaagtctaattgtaaaagttccaagttccattcttgattttcaattatataatctaaaactctactcaaagcatcaccctgataatgcaagggagtgaaaatagagattcctgggatgcaagggtccacaccacatctaatattagtacatcacccaccttcattcctaaacctttttaccaacagatctcgtccccaactaataccatgccatgttaaagatgacatacccccagtagcagccattaaaaattcattattaagaaagtaacaaaccttcaaaacttttaacctcaataactgactttggtctcggctagttcttaactgattccacttttccctaatcaaccatgattccatccaatccaacaatatggcctaagaaggatactggtgataaccaaaactcgcatttcttgaatttagcatacaacttaatgatctctaagtcgtttcaaaaccatccagagatgttgctcatgctctgcttctatctgagagtatacaaggatgtcatcgataaacactatgacataattatcaagaaaatccttgaacaccttgtccacaagatccacaaaatttgtcggagcatttataaacccaaatgatatcaccaaaaactcatagtagccatatctagtccgaaaggcagtctttgaaatgtcgtcctccctaattcttaactgaaagttctccaaatctgactctaatacctcaaatatgtttgtggtatgtctaattcatgtcccaatgcaaagtttgacctatttgcactaagacggtctcaaaaactgaaaccctagttgaggatgtcaacctgggcggtgggtgaaacccacgttgccaaggttgactttcaaggtgttaatttgtgtattttcagctcccagggcatggatttggttgctacatgtcttcatggtacagaatactgaaagatggtgagttggaaaaaaacttggtggaatcaaacaccatttccgaagttcccaaagtcaacttgggtgcagggctagggacccctcccaggtcgacttgctatgattcgagactactcaactttgagatattttctttcttgtcacatgtcaaacattaatgtccacgccaccaggctactttcggtgtaaacaaatacacttttaatttcaaaaccctttgattagaggtttagcaccataattacaaaa

SEQ ID NO: 24978 - DNA, 2744 bp, Cannabis sativa
atttagtcacaaaaaatttatgctgtgactaaaaaattgtcactaaaggtagcagttttttgtagtgtgcgctgaaagattcatagagagttgttggaagtagaaaaaatttagtcttacaaatttaattaatgttttcaaatctaatatatattttttttaaaatttaattccaatttaatttaattatgaagaggagaggaggaagaagagcggaagcttcctaagaaaatgatgtgtgtgcactattgagagagtcacttaattaatttatttttattgatatagtacttataataatataatgtaaaagtcacaaaaataattctcattcctatgataatgaaagcaagatactgaaccaatatattatttatgagaattatttaaaagtattcttggtgcttaatacttttctcagtgtcataccgttataagtgtaattaagtagtggatctcatataacttaaaaaaataagtttttaaaaaatatcaataaccaattatagagcgccacctataaaaaatattagacatattgatacttaataacaatgctcgttatatattttattttttgccacgataactttaaatagttagaaaaaataagtcaataaaacttattgtttatctaaaagttatgaaaaattttacaatgtactcctatttgttttggtatctaaaataatattttagtcaaatattttttcatagccatgtatgttatagttatttaagataatttataaaattttaagaaatttaaataaatttaacacaccgaaaattaaaatagtatgttgcacgcatgactattttattgtatacgtgtgtgaaatagactatttaaatattttctatattgtaaattattttgaatttctaaaattttgtatcatattttaaataattataatgtaaaaattagatttaattttattttatatgctaaaataaataaaagtgtatcagtacatcatttttaaagaatgtattataaaatcatctaaaaactttattgtcctaatataaattacgactaagaaaaatatagcctagagaataaaacttttaaaaaattaaataaccagcaatttgagtaaaaaaaagaacaagaccaaaagccaatataatactttttactaataccatattacaattaattaatattttattttaattaatgatttagtatgaaaatataaatatataataatgtagaatacaaaattcacatttaaagggatataaagcatatgcataattccatttcaaaaaaaaaaaaagcatgcataattaaccacgtatacatacatatttgaaatttgtgcaagtgtactactacgtacgtgttatttttttttttttttgtcaaaacatacgtacgtgttattttgaaaacaaaaataagaaagatattattgaaattaggttaaaaaggttagacggcttttgtgatatatagaagggtatatcgatattaattagcgaattcaataaagttaagtgatgaagaaacttggttgatgatttcagttcacatgcatgatgatgcatctctattctctaattctatccataagttagatgccttatcaccaccaacgctgctctttcaaccttctcatcaagcccattttctgtacggtctctgatcatcttaatcctccctcaattaatgacttaaacgcgttttttggttacttttttcaaacacatttaaaacaaataaagtacgtactttacagtacacaataaatttatgtatatatatcatgacctctatatcatatcattgtacttccacttcactctcctcatctcatctcatctccactactatactaaacttaaaactatttctcttttctttctttctttcagaaaacaaaaaaaaaacaaaaaacacaaacaatggcagtggaatactctgttcacgaatactacaactcagacgacgataatggcgatgcactctctttctgtgatcttccagtattggacaaagatgacaccgagctcgacccttttctcgactccaaccaacgaagctgtacttcttctccagagaaccacgatcatcacgatgatgatcttttcgagttttccgttagccctgaaacaaaggatgatgagagcattattttttgtggagttcccattatacccccgaagaaggctgaacacaacaacaacaataacaagatcaccatcaacaataacagtactagtagtcgacacacgagaagcggtcgtttcatccgaagatcagagaaattatcatctgacggtgtcgtttcgaaccgggccagctcgttccgtttcggtaatgggaccaataagagacctagtaataataataataataataatttagcgggcattgggagcttccggtgccgtggtgaaggtgcaggagggtttcggcgaaagcataataaggtgataatgggattggtgaggttccaggcggcgccaaagatggagctgagtgagatgcgaaggaggcagagccggcggagtcctgtgccgatgtttccggttgaaaatggcagcggagaaccaaccggcaccggtggaagtcattggggtctctttaggcctcttcggtgtagggcccacttcgttagcgcctggaataaggcctcgtttcgttgtttgtgaatcatacgtagtctcgttgagacgggagagagaagtcaaaaagagaggaggaagaaatattttaagatcttccagtt

SEQ ID NO: 24979 - DNA, 1539 bp, Cannabis sativa
gtttattttaatatcaggtctcacaaattataatttaataaataatacggtaactattagaaagtgataaatagcaatactctttattttttgaggattgctattggacaccagtgatgtcaaacaccttctagaggcagctcccgacaattgattagcgatattttctaaaagctattacattaagagcattactattgagcatcaataatgtctattaccttttataggtagtgccttacgattaggttagcaatattacctaaaaataatttacttaaattatatgagatatgatatttaattacattaatatcggtatgatactataaaggccactatataccaatagttatattaaataatatgaaactgaatatttaattatagcaatagtaatattaacactttaaaaaatattagacattaataatactttttgtcttatttttttttagtggaagatgaagatgaagatgttgtatagcttataggctttgtattttgttattatatttatttccactttaggactttttgttggttgaccaatcacaacaagcaatggtttagagcttgacaagtgtgttattcaacatcgtgtattctctcatgtgtcatgtgaagcttttttgtgttttgtttattttagtattgcagctttagttatatgcaaaaaacatagaaagtttagaacaattctaggtaatatattgttttgttgtgtctttgctagttatgtacgcaataccatttaattccaacacttgttgacaccttatttagtgaaaataaatggataataataaatacacaatattgggtcatctaattatgatactcccaattttgctatatttattaataataaatgacaaatcttttttttcttttcttttctttctttttttgttagtgtgtgtgggaataaatgacaaataatattgagtcatgagaatattgtttttttttttttttgctaaaagtcatgagaaattatattgttgtgaattgtgatgatacttcaaatttgttttgtggagatagtgtaaagttcttgtaactcttgaattaaaaacattatactaatgagatgaaacatgagaataatacattaaatgtagtatcataaaaacaaattaggtattttttttagaaaataattatattttttaataaataatagttaaaatataaaatatagtatttcaaaaaaaattttgagcctttttgttaaagagatttttgaacttaggtggagagccttagatgtgagcccctactgctccacctttgagctaacccacactaatagagttgcttatagttttgctaaaagcattttgttcttttttggataattatttcagtagaaaaatatttatactaagtttatgtctatcattgtagatgattgttcttctttatgaagttcttttccactaaaaaaatattatacttaacttttatttaataatataatttgtatcatatattctttttaggggaattacttcgtatattatttttttaactttt

SEQ ID NO: 24980 - DNA, 2581 bp, Cannabis sativa
tttcttaaaggtatttttataaataaaattaattttaggtatattattaaaaaagccccaataaattttcatatctaccctatttacggcgaattaagattttatgttaaaaactgatgttccataatatattaaactaatctaaatttatttagattctattaactatctatatatatattttttaaatgttcaaattaattgatgtattacaataaaattggtttaatatattatgggatactatcctttaacagaaaatctcttaattgacaataagatgttatcatttatattcccatatataagattctagtttttacaagaataaactttttttttaaaaaaaaatatttacttatataatatattaatatatgtctacaagcactagaatatagtaaggcacctgcattaaaaagaaataaaaaaacacaaaaaaatgtacatgatgatagaaaaggccaagaaattaagacatgaaaaagttgacaaaaacaatttgtatatatgtgctcaaacttttgttttaagaataataaatatgagataaaatgattaggtagagaataataccatttaattttgggtgggtctagctggatttgatagacatatgaagaaagatgccaaatgcattggtttaaaacttaggatagataggaggtagttctctgagctcagcaaaatgacagcttttctttcctgttttagtggttccctcttcacactttacacaatctcactcaatatggtttattggtttatcttgggtaccatactattattaatttctgcataattactatccttttttttggggacagaagaaaaaggacagatgggtatcaaaaggtgacaatatatatactcagggtcaggggccatattgatatattctagtgtggagacagaaatgattagagccagaatatataatatttatataatatatctaatacaaagttataaaatactagatagaaagaaaagaaaaaaaaaggtgggctccctatccccaacaatacatttaaaaataccatcttagactaggattgatgggtttctggcttaagaggggtttggttttgagaaagagggaatctctattatgcaaattgatagggtgtcactgagctgtagtgtagtgcttaggaaatttattcattttttatcttttatttttgcattattctcaaattcatcagttaattgtgtaaatgaagaaatatttcaattcaaaaccaaacaccaattggaggcatcttaatccatccatacctagtattagttagatgatcaaaacatgcattaatgaaaagtggtcctatgatttgaatgggatgatgagattatttgagaaagactaaactggtcttaactctcaacacagagtagaggaccagctgataaaggcattacatggatattttcatgagtcgttgctgttcaattattattattattattgtgtggaataagataatctatgaaacaacaattcacatggccgtcgcgtcgcctatcaaaacactatgattataattatttcaaataatgtaaaaactagtttcaagtgcagctttgtaatttgcatacttaaatgttgttagttgtccccatatgagggtatataaaaatataaataagaaaaagaaaaattgaaacgtcgacagcagggttcgaacctgcgcgggcgaagcccaacagatttcaagtctgtctccttaaccactcggacatatcgactgtacattatttcttccactaaatatttataattagtaaagaaactaacatcattgtacttatggcttagagagaacaacatcattgttttaaaacctataattaatttatagatgtgtaaatataatttattgttttgtaaaagttattaattggaccttctattttaataaataacaaaattgactttatattttttaaaagggtaaaaataagaccttgagcttaatttttaataatttttttttttaatataatcaactttaagacaatttctaacactaacagatataaaagaaatgtaacaaattttatcataacatctctaaatcagattattattaagttttattttgacaaaaaaatcagtccaggtcctatttttacaattttagaaaatacatgatctattttgtcatttaacaaaacagagggttcaattagtaacttttgctaaacataaaatctaaaataatatttaaccttttatggataaattcccttgttgatgaaactaaagataaaatatatggaaagggaaaaaaatgcattaattatctcttaaacaaacattcatggttagaaaactctttctgtccatttagactattgccaaagctttcagaagtatctccaaacactactacagccattcttgaaggtttaaactttgattaaaccatcagcggtaaaacctccattatcagatataatttataactcttacgtttgttggattaaaatcctcaatatgggctcatatgtatattagtgtattgctatttgaagtttggcccaaaataaagtgatcattttagtaattatgggtcat

SEQ ID NO: 24981 - DNA, 4377 bp, Cannabis sativa
gatcacttaatgttttttcccactagaactagagcattaaaatcctaccaggtaagactcgagcccaatccattcaatcggggaagggaagaagttgtcctcgatgttgaggacgatgtcggtgttgatcaaggaggagttgagcgggccgattaccaaactagttgcacctagggctgactgatcaaagagagcggattggagaagacgaatcaataatacttggttgacaaatttgatcttccaaccctatgaaggcacgcccaattcctagagttattattcaaatctgacccacaagagtacaaataatataatggatcacttaatgttttttcccactggaactagagcattaaaatcctatgagacaagactcaagcccaatccatttaatctcaatttagagtgtgcccactcaagcgagaaatacttaatgtggctcatgggttgatgcaatgggaccctggtaaagcccatttacatgttttttatgggcctggacattacaaaagaaagcaagtgttaattaatgagcaaccccacgtgatcttttctcccacacaaccctgcttcttcatttacgatttcatcccttttttctccgttcattcattgcagaagaatattttttagactttttttctaggcttcaattttaatggcagaaataaaattgatgcaacaactatttcaatctcatcacaatatccttatttgacttagacaaaagagaattcaagaaggttttaattttgagagagaaaatcaagaatttcttgttcatggggacagtttactctgagcgattggatatggaagacggaaatgctcaaattctttgggtggatttttgatagagggagcaaacacaccaaaaaacagcatgaatcaaagcttcccaagaacaatcaactcacaatttgggggtggatattttaagctttcatttggttgcaagggattatgctattgctgggttgttgaaaaaagatggccaacaaatttatgagcatttactctgtggttcagtcaccagaaaacagatggaaaagtcgaaccactaggtttttgatagaggaagaatgaaggtactgtctcaacctacaacggaaggaaatatgactttgctcagttggttttttgagcaaggtcaacttgccgaaagttggtgtttctctcacaacttgaacaatactcatttgctggcttggttctttgacagaggacgagtcaagatctgcgatgttagcttaatgttcttcaccttaaggagaaggtgaatttcgcgcggccggtattgataggccttagataaataaaaagggtatatgggtcattgtagtgaggtattaagatagtatatatatgagagcattagaagggatttaggggtagagaattgtttggttaagagagcattagctcttgggagagagttggtattgaaagtgaaaactcgtcagccaaattgtagcaggaaaatagaaatttggatgtaagacctagaacaaagatggagatctcaaaatatgaaaacttaaagaaaagagtagaatagctatggagaaagaaagtagtgtgtatttctctaggtcaagtgttacaatgattttccaacccacctcttctcacttctaagaatggagtatttataggctccaatggtcttgattacacttgtgattcccaaaagacaagttggccttatgtggttgtaggttgcaggtgcaggaggtggtcttgcgccgtgtaccgtcgggtgttaagtggtcccgagttgcaagggtagtggttgtagagtacctgttgtcgtcgagatgtcaggggttgcaggtggcatctctccactacttgtaccctcttgccatctagccacgacgaggacttggtcgtactcggtctcgtacctctccgcgcgcatgctttgtcctttgattcctttctcaacgatcttctcttcaacccttaggtaagtctagtcttcatttctcttctgcatcttctccttctttcacccattctcatcactcactcgcaacctcaccccacttgactccccaactcgcaacctcacccactcgcatgtcaccccactcgcaacctcactccccccactccccactcccaacctcactcccacacaccatgcccaaaaggctccgccactcgcccaaacgctccaccactcgtacaagggctcctccactcgcacaccccactcacacacttcagtggtcttagtgttttggccataaccttttcgatatatgtcaaaattggacgattcaaaatgctttgaaatgataagaaagagatctatgaattttatgttgatgacaagatctaattctaaacgcatcattatgaaaatcctccaacaatttccacttagtaagttagtcttacttactctactcgtgcccgccgacctccatcgaaaatacctcaaacaatcacatatgcatggaccttttaaaatcttcatggagtgatgtctcctcctttgtgctttcccaacttacccaacactttgcttgcaggcgaccatgagaccggtctccgaaatgcttggacaagtctccgagaatcgtaattgccaattcttggagttaacaccgggttaaccgttgactaatctcgaaggttagctttgctaatttttggggttaacagttgggtctctcgaatacccagcaaacttgttcaaactattttctactaccaatatatcagctactagtttccataattacttctgtttggctctattttcttccattttgttactgtttataccaaaatgttaggaaactcctatcacagacatgaaacagaaaaaatagagctcgtaccacaaatcatacaggcaaagtatcaaatataattttgtaaacagaagtcttagtgtcttacttgtcgtgcagcagcctttgaaatccaagatggaagcaaacaaggggtgttatttagtgcatcataagatgtctcttttgctttaccacagtcaaccacaaaaacaacatcattaatagtgatgctagtctcagccatgttcgtagcaagtacaattttcctcactccatcttctggcttatcgaaaattaatttctgtttgcaaaaattgatagggtgacaaagaaatatctatattagtaaacatacaatcaataaaattaatgattacaaattaccttttttctgttaaatattgaaaagagcaaaaatataagaaaaaagaggataaggtataaaaaaaaacgcataaaatacaatctgaaacaaatgcacaagtatcttcgaatccgccacttaaaacccaaagcgaagcaaagaacttaattctctcacagagaaaacaagtttgactagacccaaacgcagcagctaagtaaactcaacagaacaatagccaaaacaagaacaatagcagaaaaatagagagaacttgtgtatagattgatattagaacagagacaatttccctaggcattaaataggcctaagactccatgatgcagagaaataacctcttaattcttgcacgactctcccactccctaaactcgccaatttatactattctattcccactcaaacattatccttcaccacaatgacttaactaccctttatttcaattgaccatacacactctgcgtttggctcaactttatgcatgaaattgcatggccatagctaataagaaaatgagatctcttaacaacagacaaataactattccacgtacaagaatctagcaatgcagaggagctttatgccacaaagaaaagtacagctaccctcccattcaatgttgatgtaccctcccattcaatgttttaataatgaaattcttttttcacacaaatcctaatccaaacgggcaaagttaaaaacagaataatgtccagatatatctaaatatacaaaagttctacatggtgcactcctaaccaaactgtaacagtgagaaaagactaactcattcaaaactaataaaaaaaaatgtgaaagtgagaatttgcattaccttgactactccctataatctaacagaatttgtctaatttaataggcaaaacccttgaaaaattgaattcatcaaatattgggaaaaaaaaaatggtaaacgcttcacatatggtgacaagaatgctccaaaaccattagggtgtgtttggaagtaactgtgtaattactagggtggtagttacaccaatagcaattacactatattttaatgtgtgtttgactatgaaatggtaattacatatgaattcttaatattttatttggcaaaacaaatagtaattacacaggttaataatattttttagtagttaaagtttgaaatggaaagtttttagtaattac

SEQ ID NO: 24982 - DNA, 1641 bp, Cannabis sativa
gttgagtctcgcttatgtctcgcatgcctcatggactcagacttgcaaaatgcaatcctgttctcatttgcgataaatatattttcatgagtatcattcaactcggtgtatattaaataaaacgagacatacttgtcgtgctttttctgtttcatgagaagctaccccgaatgaccatcacgctaattgatttaatgctaaggggaatgaaaggaacaaggtggcttgccaaaatgactatcgatcccgataaacgagacaaaagctgatattgtgcctttcatggggagcatggccatgcaacctatgaatgcaggcaattgaagatcgaggttaacaggctagttaaagaagggttcttccaagattgtctatctatggattcaatgctgcatgttcaacaaggacatgataagaatcaggaccaatccctccttccatatatcaagaagattgtgaacgtgatctcagaagtatcggacctaagtggaaattcaatccgagcctcattggctcacgcttgttggatccactccatcaaagcaatgacagtaattgataacgaaggacccgatgtgcagatattattcaatcaaggggaggcttttgaactagaacatcctcatgataatgccttgattaccttagatgtggtccacgttcatatgaaacaaatgcttgtagacacgggaagctctgccaatatcctacttgttgcggttttgaaggaaatggaaattgaagatctaaaggcctaagaaacacaagttactctggtgggatttttaggagaacgcaccgtcgctcaaagtttgtccaactgcctgtctatgctaatggagtaaacaagtcgattagattcttgattgtggattgtccctcagcatataatgccatcctcggccgaccatggatcaacgcaatgaaggcagtcgcatcatcttaccatcaggtgatcaagttcccatgcaaaggcgatgtaacataaatacgaagagatcagttggggggccgcgagtgttacacctcgtccctgagaagtaaaaacaagttataataattaattaactcctcgaccccagcctaaaagcaacacccccacaatcgacgagttacaagaggtacccatccacctgacagacccaaccaagactacctacatcggcatgggacttacggggaactggaaggaccagatcgtaaatttttaaaaagaatatattcaggttttcgcatgggaacactcatatatgctcggaatagacctagctgtgattacccacaaattaaatgtgaatccaaattatatcccagtcaagaaaaaaagaagaaagatgggagcagatcgaaacaatgttgtgaatgatgaagtcgagaaaattctggaaaatgataccattgaggaagtacaataccccacgtggctcgccaacctggtagtagtgctaaaaaagaatgtgaaatggaaagtgtgcatagactttaccaacttaaacaaagcctacccaaaggacaatttccctctaccgcatattgatatgataatcgacgctaccgttgggcatgaattgatgagtttcatggatgccttctctggggacaaccgaataatgatgcatcctctcaatagggagaagacat

SEQ ID NO: 24983 - DNA, 2132 bp, Cannabis sativa
gagagagagagagaggaagagagactagggttttagacttagagactagaattagacttaggtcttttaggttagagttaaggccctttatataggacagcgtaaaccctaatttacagctaaaatccttaaatatttgtatattaaattgattaattgcaaaagactaaaatgcccttaaacataaatactttccatctattttattgggttgttaagggcctaattcatagtttacttgcagtccatgtatcaggctatacagcataatcttgtcaggtcaatcctaaccgaccatacacctacaggatgaggtctcaccagccatgctcctgctagggtctagcaggtcatgttactgctaggttctagcaggtaatgttcctagaagctttactaagaggaggccagccttcggtaagtgaaggccagctttgtacaccttttccttgtagaggtcaggttcccttggtcgaacaaaagctcccttagtctgaaagtcaccttttggctggcaagcttgtgcacagatcctggttggccatacaagctcacctggccatcctatagggttctcttgtccggctagacatgttgctacagccccttgatagttggcttcactgttttcagttgctgcttgacagtcttgccataccttttatggagaccttgtcttactaatgccaaggttatattccacatgtactctatcttggcttacatggacatgccacgtcaggtggacaaaatttgtgataatattttcccccaagtccttgttcgaatatctagtcaaatagggactttctagctctcatctttgtagtatatagtcttcgtcgagcagccttatctagctaagtgttggatttttgcatggcatgcttctagatctttgaccttctctccctatatacgtcgcatcttatcttctttgatatctcttctttgtacctgccattaataagtttgaagcgttttaagcttttagaaactttttaattctcatgctagtttgtaacatctttggtatattgatcctcatcatagttttggaatgtatgatgtgtgattttttgatggaaataattcaatttcggccttcgttgtgattcctaactcattgattcataaagaaaacgatgcacatattcaagttttgaaaaaaaaaaacatatttggattccaagctaaccttggctagcctaggaggtcttgcttgagacttggctggccttaacacttaatgatgggagttggccagctctaggatttcaccctataaagcaagtcggttcatgcctggctttggtgaccctggtcagttcttggctaagtcatgggaccccggataaccctttttaggattgggaaccctgcctcgcatgggccttggttccaagcaggtggccagctttctatcctcttttgactttgacaagaatcttattatggccttgtaggcatatacaaccttagtcttgtacgtggttcccttagaaactttgtatgaaacttaatggtgagtctattattgttgaatgttcaacttaagacccaacatttgtccaagttgttacaattgagacttgtactttgctgatatccagcttgtacgctgacatggtcttccaagtacccatgggtacagttgtccaaagttttatctatggcctggaaccaacagggaactcttcctttttgcttggagcctgctaggaattatgccttagccttagcccagtatgtggttcctataggaactctgtccggtacatctctagctatacaattcttgcagggcctgtgccctatgcatgtgaaccgatttcatattcggccttattgctctcatgttcttgcttttggcctataggccctctattttcaaacactactatcatttagccttaaatcctttaatgatggacatgtgattgtcctggctatcttcttatggccttgacatgtaagtatctgaatttacttttctttatgtcaagtcgaagtatgcctgaagttgacttagaggcaagtttagtagcttattctaagtgttaaaatttctctgcataagttctatctgctagatcgatgcattgtatagtgtaggtgcccccaagtgagcg

SEQ ID NO: 24984 - DNA, 1828 bp, Cannabis sativa
ttttcccctaacatgccctaccatgtgggtcacaaggaatttctctaatgtagacaatacattggatttggacaaaaaattaactgaagtatcctcaatattttttttctgtgttataagtaaaaaaggtatagtaaattcaaataattatataatgtaatgattgaagagataccaatttaagtgactgaagatagttcagtgttaaaggaagtacgaaaaaaaaaaaaaaagaggacatgagtttaaactaacacccttgagatatttttaaattataataccattaagttacactaaaaaaaaaaggagagatactaattttaccgagttaaaaaagttgaatgtgataataagatttagtctagtagtttcatgcttcttcttacaaaaaaaaaaaaaaacatgtctcaaattcaaatccactcttgtattgtcaaaaaaaaaaaaaaagttatttcatctgttttatatcttatttttctttttccttttatgtaaatttatattgtaatttacattttataatatttaagtttataatctttctcatctttaccaaaaaacaaacaaataaaaaaaaattaggaaaaatttatgatacaacctttaaaaggaatgttctcatatattttgtatctgttttgggatctaaaagaatttttagtctattcataattatgtatgttgtacttatttaagataatctataattttttttgaaaattcttaatagttatagtgcaaaaaataaaattcaaacaattgtttaccacatatataaagaaaaacagtcacacatgcaacaaatattcaaactttatttttgacacagtaaacatcttaaatttcttaaattttttacaaataattttaaataattacaatttatttggtcataaaaaaaaaaagactaaaatactttctagaatgccaaaacagataaagaaatatacatgaacactgtattaaagatgtcctatagaattatttaaatttttgcggtgtgatgagtgcacatttgtacactcattactaatcaactattaggtgaattagtatttacttcataagttttgtataaattttaagtgttttttgttgttgtgcaattttgagctttaaaaacgataataatatgaatttggcaaaaaaaaaaaaacaataatcaagatatatgtcaaagtcaagaagcaaaacgtgattgaaagaagtcaaaattagaaactagcgacacaattaatttggcacatgcgaattaaaaaaagagaagcaatctcgaaaatatagttcaggcgacatgtcgccacttctacgaaataaattaatttttgcacgtagcagttaaaaaagataggggatcccaaagataaggtccaggcgacatgttgcctggccttaggtgacatatcgcctgacgatgctttaaaatttaaatcctaattccaaatgacatattttctatctttttaagcctatacaaaaaaacaacctatagatcaaaaaatatattaaagaataagagagagagatttcaagcttaagcatcatcaactttcattagagtcttcttcttcttcttcttctttattttctaatttaaattgttgtttgtctgtttactttttagttattttactatttcgttcttaattattatttactttaaattgtctaattaaagtgttaatgcagttttttgttaacggatctaagaagatcgtaatcaagcaagataaacacaagcaatcgttaatcaaagtaaaccggtttgtgaaaaaaaaaaattgacaaagacgaacatgaggattttatagtggttcacccc

SEQ ID NO: 24985 - DNA, 4310 bp, Cannabis sativa
atgtataatgaaatacatggtcttccaatcttgtccaataagccaaacggaacaatatcgtcttgtgcgatgtgtaaaatatgttcatgacctaatatctcaaaatccataggaattttgatagtgaaaccttgctccacatatttcacaacagttaatagagacttaagagagcgaggaatcccatcaggaatcttgaattgaattggggctctaatttgagttgagactccatcatttttactagttattggtgaactagttctttattgcttctttgtcttcttaggtggcttcaacatgaaagtaaaaggtgttagttaggaaaaataatttaaactaaatataattgtttgtgtccattacttaccgaatctatattataaggaatggtcagatgagatggccactcaacgaaattaccgatagcgtgccatacaaaaactaattcatccccatttggaaagggaagtttagcattgttattgtggcactcatctaccaacacacggtagttatccttttttaaatcattacaatgtatttttccacttttctccattaatcgtccaattgcaacaacattaccatttgttgccaataatttatattttttattatcctacagcaaaagatgaaaacataaatagatatattgtattacatttattcttcaataataatattaaccaaatgctcatttactacctccattgacgtatgggttggaatcttgcatcttgaagagactaaaggatcatttaccaccttcattgacataggggtcttgcatgttgaagaaagtattggaggtgagctctctacacttccttttaatgatgaaatttgagatgataattcagcaaacttggtcaaaaacaactctcgttcttgttctcgttcttctttttcttgttgtcgttttgcttcatactgttcagcttggctacttaatttttgctcaaatgattgctctaactttttaatgtcctctaaatactttcgtgattgatgttgttgaaattcaaattgttgttgctgaagtccactaaaaccttttgttggcttcagaaagtagtctctttgtgtaacgccccgactttggcctctgacacgaccaggatgctcgggtttccctaacacttgtgttaatatatcatttgtcccaatttctacaagtgacccttcttttctcttatctaggaggccatcctacaatagttaaatttataaatttaacaataaattataataaaggataaaaataatggtttataatagcagtttacaacttacaatggcatccccaatatgcttgtcacattcatttacatattttcctgatgcattttttcttgcctccttccaaagtatagatcgatcaattggctcatccgtgtcgagttcagtttgctttaataaaatgaactcaattagttgtaaattttttaataatccaacacaaaatctaaaacgcacttacaaggtcaaattctatttgcttataactacgtcgtgatgagtgatgaggatactccagagctgcgcgcctctcttgttgtttctttctgaattcctaattaaattcatataatttttgctttcattaaattaattaataaatgaattttaaaaaaaaacttagtatcaaacacttacttgaaattctttagtttgtcgtttggaaacaaagactttccattcctcttctcgaatgctatatctttttggaggtacgtgcaatgcagtaggattttctttcaacaactttgggttgtctatgaaaggagatataaattttctattcaaatatgttttgaatgccctccacttgttgcctaccgaactcatcacttcctttttcattccatcgttgagatgaaaagctaactacaaagtttaacaaaatcaattagtataaataatataattttaagagtttgccactagtataaaaatcttacatttacatctttccaaacattttctaaagtagcagcaggaacatcgtgccaattatcaattgtaattggcaccattgacttcgcttgcatccctaaatagcattgtaatgctctttctggagttccaattgattgtcctctcttgttaaactttaaatacatcttaatcccttttattttgtctgcaattatttttgccaatcggactattcctttagtcttcctattttttttctttttagtagcaagatcgtcactagaaaactcttctaatttctcttctacattgacgtcttctacttcattttcttcaagttcctctctaagatggtccatgatcctattgaaaaaaaaaagacaagtataaatattagtactaaataaaatagacaaataataagacaaaagaaaagtaactcaaattttaattcatgatccaagtataaccaattgaattacaaatatagataattcaaataccaacttacaatccaaattccgtcacaatcttgtcgaagatagggtccaactattgattcaaatccttcaaattcacttatatctcaaatttctttctcaaaagtttgaagttcaccaatctcatagtcatcaccatcatcaccaatgaactttggttgtgatgcaagtacaattgacaatttagaatttgatggatcttcaatgtaaaatacttgttttgcttgacttgctaatataaatgattcttctttatgggctattctgttgagatcaatcaaagtaaatcctaactcatctaatgtaacatacttatcatctacccaattgcatttgaacattgctatccgaaaagcgcgataatcgagctcccatatttcttcaatgactccataaaatttcatatctccataaaatgggttcttatcacgagctgaagcaaattgaagagtttgagcaacaatacacacaccgctattttgtgtcactctaactttatcacgagcttttgtactaaacctataaccattaatagcgaaccccttgtgcttaattgcctttatattcggacctaatgaaatccatcttaaattttcagataccttgtgagactccttactcaattgagattgaatctacaataattttaaatgaattaaaattttaataataattttctaaagataaaaatacttatgatgaagtaattataatagactaccctatcacgaaaccattgatgaaaggttcggtggtggcaatcttggatccactttcttgatttattacgattctcacgatgaagatattccaagtgttctctaccattaagaatattgttattaatacaaaataaaaattaaggattatattattgcatatgacattaatacttactctatgtaaggttgaacttcagttgtattctctaaaacatttcgatgagcaacatccctgtcttctttttttattaaagtgagccttccattattgatgcctcttccaaccacatcttcactgattgtctttttgggtataccaattgtttctacatcagtaatgtactcagaacaaaattcaactgcttcttctgctatgtaagcctcaactatacaaccctctggacgatttcgatttctaacataacctttgtaaaccttcatcagtctttcaaaaggatacatccaacggaaacatactggcccacatagtcttacttctctaacaagatgtactgccaaatgaaccatgatatcaaaaaaggatggaggaaaatattgctcaaataagcacaaagtcttggcaatttctatttccatcttctccaacttagatacatcaatcaccttggagcatatggcattgaaaaacaaacacattcgcattatagcatttctaacatgctggtcaagtgatcctcgaatagcaattggaagtaattgttgcatcaatacatgacaatcatgagacttaagaccgattagtctgcaatcttttagagatactaaattacgaatatttgacgaatacccatctggaaccttaacatttgccaaagtttcacaaagtttatgtttctcatcttttttcaatgtgtaacaagcaggcggtaaatatgtttttttttacctactttgggtgccaaatctttttttgattgagataataacacaaggtccttacgagcagatatactatctttagttttaccaggaatattgagtaaggttccaatcaaactatcgcatatatttttctcgatgtgcatgacgtcaagattgtgtcttattaacaaatgtctccaatactccagctcaaagaaaattgacctcttcttccaacatgtcgtattctttgaatcttccatta

SEQ ID NO: 24986 - DNA, 2204 bp, Cannabis sativa
  modified_base (1964)..(1965): a, c, t, g, unknown or other
attttaaatgcaatcacgccttttagaagataaaagatctgttcttggatgaatcttgggtgtgggatgaaagctttatatgagggtccatatgtgctattttggaaggctgctaaatcaagtaagttctcagttaagagcgcttattggataagccaacaacattgatttaaggaattaagtgtggtgtgggaaagcttgtggaaacagaagctacaccctcgtttgaaattacattgctggaaaattttggttgataccctttctactaagtctaggcttggttttattcctaacgactgccaatttcattgcttctgcaatatggaaaaggaatcgacttttcatcttttctgtcaatgttctttcattcgtgggatttggtttaaaagtcaatgggggatctgtattgactgctttaattggactaacttaatggactttggcaaatagtagattaacttggaggattatgggctaaaattttttactgcctgtgtttgtgagactatttggaaatggcataatgagatgatctttaaggacaaactgtgtgaaatggaactgttttataaggattgtctttcgagatacaataattttaagtgcaaccgtatctagtttgaagaaatggatatgaatgataagtatgtgcagatgcatcttcatcaaattatggaggatttctagtgttgcaaagtcgatgcttctgtagttgatgaagaagcaggttttgttgtttttcacaataatgtctaagtttttgtaaataaaaaagtttaaaaagtaaaaatgaaaaaaaatttcgtgttactgtatttttgtatttttttttttaatttttagtcatgtactctccactcaatattgtaaagttaaagtatgagcaagagccaaagatcactctgcacccaatagggtaaagtaatagcctccacaattgttacactggaattgtggaccacaatagctccaatagctttctctcctctcactgtagcatcaacataaatataaatttccccaactgggaggatggatctatcaaaggtaggactgtgcgtatgaggaaaacaatgtgcaaataatatagtataatgttgttgtgaaaaataacaatataactttaaacctgtaaaaatatcgaaaaaattataaattcatacttttataatatttttatctttttaagtacttatgaaaactcccaaagtaataacaagttactcgttcgggttcggtaacaatttttcacatttaacactcgtagaactcgaactcgaacctgaacccaatgcacccaaaacccaaaaaattggcacatgtcttgtgcactagtaaggtgggtaagtgtttcttcttcttcttcttcttcttcttctttttttaatagaaatatattgttgtgtttggccactaatagaggattacacatcaactagctaaggtcaactaatcctaacggtattacctaactgtcagttatgacagttaggatcgagtcttgaaggaaaaggctataaatagccatctgctgcagcattgaaggagagaggcttttggtaacttagagagggctagttctgtgtatcatagagagaacttgtgtgagattagttgttattgaagcttgtcttcacgagtgtatgtgttttgtgaaaacaccttgtaaagcaacttgtaatttctctcatctagcatcaataaagataaaggccttaggggctgttctggccgaggagtaggcaagtgattaacaatcacttgttcgaacctcgtaaacctactgtgtttgatctcttttctctacttcctttactgtttaattgattgcctatcattgttaaaacatcagttcttgttactggtttatctgctactggttttactggttttagttcacagttgtattttttaattttcagttgtttagttctgttcttgatcaaattctttgtattgtnntgtttgcgaggtgtttgatcatgcattgatcacatcatatatgatatgtgagtaagcagtacaataagaaaatagtaataatattttggtatttagtttatttatttatttttgcattccttgtctattggctatacttttaatttgagttattttttcatattttaattttggtaatatatatatattatactttggatatatttttttagtttattatggatagggtatatatatat

SEQ ID NO: 24987 - DNA, 1040 bp, Cannabis sativa
aaaaaaaattgattgacagtccgtggtgaaagggaaattaaagagagtgagaagagaggggggtcctatgtatagcttcctctctgaaattaatggaagtaaagttagatgtattatgagttgtttttgtgttgcaaattccaagaaccaatttatagttattgtgatctggatttataatatgcactatatgggttttatcctaaggttttacactgtttcttgaaagagaataactgtacaagtgtcccctcttttgctacttctttaggaggaaaaacaaaagccttaccatcttatcaaccaagctcttcttttaaagacacacacattaatttatttaaataaccaaacctcacttactcactcactcaatcttccatctctacattttaattctccttaaagttttggttacacacttacacaacaacatatatgttttatttaccccactcatgactcaattcacaaccccacaaaaaataaagtttataattgaatttttaacacacatactatagtaataaatatcaaataattaaaacaagttactttctctagaatctttgacaacatattcaagtgtgtaggccattatacaaatttatatatatactaataatagttttatttccttaattagtaaatacatatgtctttgttaattagtagccgaatcactttaaaattctatgttggtaatttattttttaattctatacattaattattagagtattgctattgaatattagtggtacgtccagcactttttataagtggtgctccacgattagcgatattttctaaaagttatttttttaaattatataatattcgatacttaattacacaaataacgatatgacactgaaaaaagtgtgacactatgcatcatcggcatgagctaataatgtggatctctaatagactctttacacacaacataaacaaaatcgaattgttaaaggcaggtcttgcagtaggattgttggatagacaaaacaacaaaacagagtggttcgcgaagtaggtgc

SEQ ID NO: 24988 - DNA, 2657 bp, Cannabis sativa
  modified_base (1253)..(1253): a, c, t, g, unknown or other
tcctttactttaacacaaatgctactcaagcaactttgtgaagtgtaatttaatatctggttctatttattttattataaaaaattactaattaattatatagcaatattttaaccccataacaatgctcttactttaacccctaaaaaaatatcaacttcgagttgtacaaccacatgtaagtttatgtacaataaaagtcaaaatagcggtgtaatgttatattttagtgtttttgagaaaattaattcttgttaaatagtgtatcattggctaaatttaatataaaatatagcattgttgttaaatttgacaaacaacaaatacaaatcttttaactattatatatatttgtgagaatttattttaggaaatcctaaataactacattgtttaaaaatattaagtcttattacaaatattgttgaatgaacaatttgaaaatagaattccataattcttatcacgtctcgacaaaaagaaacaaaaatggtcttgcttgcccctacaaattattctctttcttttttttccaaaatagtaccaaaaatgtaaagccatacgatgaagacaagtaatttttgaggcttgaatgatgatgaggatgatgtctcccatctcagtactgtttaattaatttttgcttttatatatatgtatatagttggggaaagaaactatcatatggtctctctgtaaacaatgttgtttgtagcaggctttacttattactttaatatatatgtctggtctgcttgtctcctcctgtcccaaaaaaagcaacccagcgtgttaacacaaagcattgtataattggttagcgatattgcttaaaatttatagcgatatgataccgaaaagagtggtagtataaaaatggtctttctcatgtattagaccctataaaagtaaccccatatcacgaggctttgcttatttaattttactcgagaaaagcagacaaaagagagaataacatatggagaagtgtgaaagaagagattttgaagatgactattatatgtattataacatagttttgttcacagcagtaatgttaatggcttgtttgaaaagagccattgtggtttttcttttaaaggagtggagagcttgggtttttctactcctaaatcttcttctcttagctattctttttacttcttcatctctctccaaaaactcaattgaagaagaagaagaaaaagacaacaaagaagaatgtggtactaaaaacaacaacaacaacaacnacaacaacaacaacaacagcaacagcaacaacaatgaaggtgagtttgaggttaaaaaatgcaaaaagagtagttgtagtgatgttattgttaaaaatcaatttcatcaaagttgtacaagtaaagaagatgaaattgagggtcctaataagggactatctaaggaagagcttaatgaaagagctgaagcttttattatgatgtttagacaacatttggttttggatgcaagaaaatgtggtggtcaacaacaacaacaacaacattatttgtataaacaaagccctcatcagagatctgtagtagggtgcaatgtcaattttagaagtactgcttgttcaagatgattttatatttgctacttattacttaattctctttttgatgggagtaatgggagttttgagatgttgtttactaattaagttctttatgtgtttcaatttttggtttcatttatgcaatatttggaggactaaatatcccatagttttgtatttctagttataattgttgtttatataaagtagaaacataatgagctgtctacccatgtttttgttttttgttttttgaggaaggtaaagggttgttattaagagatttaattcaagtattctaagttacatcaagtgaaaaagggagaggttatgagttcggcaattaattgattgtaaaatattattacgctacactcaaaaaaaaaaaaaaaaagattaaatcaagtgaaaataatttgtttttttttgttttgggtgtttttctcaagtgatttaattcaagtattctaagttacaagtgaaaataatttgtttttttttcttttgggtgtttttctcaagtgatttaattcaagtattctaagttacatcaagtgaaaataatttgtttattttttgggtgtttttctcaagtgaatttgcaaaagtatcagtagttttaattgttgtagctaccttaggcctcccaaaccaattgatgttgggcaaaatggaataattgggctttttgtatgtatagttataaaaatttaaaatatggtatttttaaaaattaagtaggcttttttgataaaatgtaatattttttgatatattttaaaagatatagaaaaaaaaaatagagaagttaatgtgtactacactgtcaaaatgtgagaggtaaaatagaacaagtaaaattttagtgatattttgaagaataaaatagaaaaattgattattttagcattatattaatttttaattccaaccattaatactattaagttaacaaaaataaattctctaataaaatataatatttttaagttattattattaaaaatgatataagtacacatatttaaaagttaagaaaattacttcatataccatttttttttaatttacggtttgagtttct

SEQ ID NO: 24989 - DNA, 3621 bp, Cannabis sativa
  modified_base (2301)..(2304): a, c, t, g, unknown or other
cagagattgtgaattatgaatagttataaatatacttgattatgtaataagtgtgctctcgtagacgttaagttatttatgcaccttgaatgtgtatggcctattggtgtttatattacattgtaatgaagtttgctagcactttctatgattttatttagtagcttttcttgctgagtcactgtgactcacgggtacttcatggtgcaggtaagaagattaatagttctgttcggccatgagttagaggtctcccagcaatgtacatatcagccgtggggtcttggcttctgggaagcaggatcgaattaccttctatgtttgaaaatgtaacctactacaaaagattttttattttttttataaacaggggatccctatattacgacagtatttaaaatgaaagtctttattttgaatttaattaaagatttaaaatgaaccacacttttccaaaatttatagattagtgataataagtttataaaagcacacacatggcgtccctaagggttaggacgttacagcccaattaacctgattgggtttcattctcttagtttttattttataattatattatagataatataacctaaataataatatataatataatcttaaaaataaaaagagagaaactttattattagcctaaactaaagtgacacattcccattctattattatcgcactctatctatctaaccctaaagtcaaagactcaatcaaaccctttttcttctttttcctactactgttaacactcatcactcagcagtcatcacctttggtgtagcagcgggcagcaggaggaggtgactttctatctcggccaagacccaacgtcgacgactccacccacccaagacccaacgtcgatggctcccccaagaacgaagacccaaccatcaatgacttctagaaagctaacaactacacaactggttggatatcttcctgtagtttcactgacgaagttgacttgaagtcttgctctggcgtaggctgttgcaaaacttccatccttaaaggacttgtcaactagagtttgacattggagagctacaataatcatagaagtgttttgagttttaacccgtgtagctatggttttgttatgcaagaaatagagtttaacttttcaaggttggaagaatttagcaatgtcacaaaggttttggtggttctggaatgggctattaggttcaattcttgcaaaacagctaagaggaatatggagacttacgattgcaaggagaatattgtgtgtgtgtgtgtgttaactccactactagatttgaaaagtttatttttttttaaaaaaaccttaggttggtttggacgggttaaccgaccaaactgttggtcgaattaattttttttattattttatttttaaattgggcaagttgcacttataattttgcaacccggtccttacattgagttagaaaatatgtagtataaaccgaccaaaccgatcgacgtacatccctaagagatttttttgtttatgtatctttctattcaatcttttaggtccatactttgcctcgacggttatgtcatgacgtccttaaagcctacgtacgatgaataaactccgagaacgatgacatatatgcttatttggacagaaacataatttcatttctttctaaacaaaaaagaatggttaattacaaataacataaagaaataagtctttttattcacgaggtataactacaaaattgattatttgttacttatcaatcaatagaaatactctaacactctgcctttatcatgtattccatacatcacactggatagatatcatattcatggagtacgattcactttcaagataccttggtggtgaaatagtagacacgcgataatcaaaatctcgtgctaaagagcctggagattcaagtcatctttaaggcataatattgaatattgagaatgctcattgaattggaataagttcctagcggatcacgaaatcttagtgatcttctctatctaattggatctacattggatcccacctaaatcgccccatctatcctcctaaggagaagtttggtttcaaatcccggttcgaacaggagaagtatgccatgctaatgtatcttggatgatccacatctcagggtcaggtactgatgagcacattgaactatctatgtggtttagagccctcacagcccaggcacaacgacgcaattatcaggggcgcgctctaccattgagctaatagcccgtcgtgcgagcctccattgtgtgcccactatgccaaaagcgagagannnnccatccctctctttccttttttacgcccccacgtcgccacacgggagggacatgtgttaataaaaagaggatcctatcaacttgttccgacctaggataataagcgcatgagcttagtcttacttcactgtcgagaaatgaaagaagttagatcaatatatcacaagctaagtagatctagttgaagatatgtattctatataaaatacaaataaagaatctattcttttttcctaagaaaaagaatcttaaagattgtttaatgcttactctaaaactatttgtttacacggtagtaatattttttgtctctctgtaatatcccaataagcctaatggtaagtaattaggatttataagtatattacgggttagctaggtaataagtgggattatgatcctactaatctagttcaacataaattttaaattcactataagtgagtaaattagcattatttataaattacagagatttatatagcatgtgtgaatgtaatatgagatatatgtggaataaaaatatttttaggtttgacaaccttggagactcgatcggggactaaaaatgtcataacgggtttaattgatagaattgatgggaatattgtgataagttgatagtgtaggtattaggataattaggagtatgtggaatttgacttagtaccctaaaagtagaaattcttagtagctaaaaaataataagataattattaataataaaatttttatttatattattattatattattaatattattattgttatattattataatattatttttttataaacttatcagttattgtttatattatatatttatattacatgttataagtttttatacaataatatgaaatagaatgaaccctccttctctttcgacgaaaccttcttctccttctatttattttttttttcgatttttaatctgaaatctagcgatttaagtttcggtagtagcaggatagcgaatcattgaagaatgagtgtttaaggcaaggtttaatttcgttttaagttagaaataattggtttcgtgtaggggtttcgtaaattaaaataattataaaggttctgaccttataagattgttctcgggtaatcatgggactagttccgatgttttcttgctgaaattgaggttattttgagttagattcaaaatgaatgaaaacgtgactgaaatagttctagttactctttggaatgaagtggaagaagggagaggttctcgaacgaggaaaaagatccaatgaattaaaagaaattgaacaaggagccgtatgagatgaaaatctcatgtac

SEQ ID NO: 24990 - DNA, 4726 bp, Cannabis sativa
taatccaatcttgtccagtccagtccagtttaattattttcagtccaatcttgtgtatcaaacggacccttatgggatagctaaatacttaaaggtttggttcgtgtttataatttctaaaaaatacatatataaaaaaaaaattaaagtgtataaaataattaattaaacatgatagcgaaaaataaattgaggcctgctctaactttggtccaacacaatacagtggtggacaaatatagagaatgggtctgatagatgatgattattttaattttatttctccttttacagacgagaatttttattttaaaaaaaatgtcaaaagtaagatgtttaatagccaaccaacaaaagtcactacttgttagagtagtgggtggcattatatgtcattatcttaaccaccaagctaattaattatgacaagatagaatagttaccaattgccaatattgattattaaataatccccgtagatttacacttagaatagctagttcaacaagtctacagtgctactgaactgggcccaatttgctaactgtgttttgttatggtagaattagaaataattcaagcctcaaaaaacaaactgcgcatgaaaaacggtagctccttcgaattttaaaaaattgtcgtttttataggctattcgaaacgacatgatatttgctatttgaatgtttgccgtagcactgtagaaagacatgcgttttgatctttatatgtttaaaagacatatttgagctttgatgaaacgatatgtcatttgcttgtctaaagatgcccttaaactaaaccacgtcgattggtaattgaacatttgttatcattacagtaacattgtttcaaataattcttaggaaaagcattttacagctattttgtttcatttttcccaataacaacgtaattaataaataaattacaaatttagttacaattagaaataaactctcatctctttacttaagaattcgttactcaggggcatgagaacttttaccaagagtaacaaattaattcatcaatacccagttctgggtgaaaataataaaaaatgtcctcatcttcatcaccaaaaacataaacaaaatgcttaattacaaccagtaatataattgggcaggagaaagatagttcagtaataagataacttttttttttttgatggaacagtaataagatcacttaaaagtaagcatctgacattaaaaatgatttagttatatatcctaaatcttattagatcattaatcaatccatcaaagcggaaacaaatctacatggcatgtccccaatagtatcagcatgcattaaagtgaaaagtagaaaacctcaaaaacactaaacatgaacaaatcctaaattttctaataacgacaggctttatcattgaacaatagtttaaaccaaaggtgttaatgtcatatgaagttaatgtgtaacgtgggaccaagtgaagtgagggaccaaccaaccaattatatgctgattgtagtaccaaaaaggttgtgttgtgttgtgcttttatcataggtctgtataatttttgttatttagtgataaataggtttcagtaccattcattgtgttctgttgtgaatattactaggtttggtgttggagaatttagcctatgttatgctaagtaacatacaagaatatacacgaataacaaacaaagaagattttattgaagaattccaacgagaaaagagataatgaaattgtagactagactagccttttcagttattattggctactgtatatatcaacaaactgacctctggctttggttaatctttgctataagcgagcattctcctccggttcgaaaagagatctcttcgacattctgtcaggtggagttgaaaaccttgtcaccaaattccccctcaggcaagaaaggatataaggaaatgcttttctaggatgagattgattactgccaattgctggtgcatatatatttattttttagagggagagatatttcatccaagcttttagtttatttgactaattgttctgtctgctgcagccatcgaaatgagaaaaccccaaaaaattcttctgatgaaactttgattcttggtgattgttatttgaatcaaactccataaagtggcagaaagattttgacaaaagagtaagcaagtgcaccagtaaaaagataactgtctaccctatctagtattcctcctgcacacgataatagatactacaattaagatgattgtctaagagattccatggaaaactgttgccaagaaccagttaaaaaatttcttagactgaaatctttaacaaaaaacaggaaagaataaatacagctacaggagaaaggtcattaccatgtccaggtataagagatccagagtcttttacacccgcatcacgttttatcattgattcagtaagatcaccaaaaacagacccgatgaaattgagaaacccaaacgctattgcactgaaaagagtataaaaaaataagtattcaattacaaaagaactgatatcaagaatttcacatagcagtagaaaacattgtacctcagcatggatttaggccagcaaagaatttttgataaaacaacagaagtggctatacaaccacccaagcctgcaattgttccctcccatgtcttctttggactaacactaattagtggtgtcctaccaaatgcctgcattataaataacattatttcaacgaatgcagcgttatcctccttttttttttttgacaagtcccttatatattgtcccactgataacgcataaaagactgaagcaattacaaatgcatgattttgagtttgactagttcttgatcaaatttagtttccatgaattagaaattttattaagatatttattcccaaaactatggatcttggccacagccactctgatggcagaattcaaaattaccagggccattgaaagaatacaattcacaagtatcaaaataataaagccccgattgcagttatatgagaccatgaaatgaaataatgatatctttacagaaactttgaatgactgaataccttgccacccacaaatgcatacgtgtcagctgcaatgatgctactgatagagattaaggttgcaacaagaccaattgtccagtgagttggcccaccaagaagaataggccatgacgctccgattgctgccaaagtgataaaaaaatgttggttatacaatacaagtaaatcatggaaagcagacccttactagagtattcactagaccatacatgcgttaacatatacacagaaaatacaatgggacaattccttatcaataatctttcgtctttgcttaatccaaaacgcatacaaagtcaagaaagtaacaagataaaagctggaaaatgcatcgcctatgtataagatataaaagacaaatttttagttaagtgcatagactcaaccccttactagtgtttagggctggcgctgccaggccgcatcgaagcttgacccagaaacaaggaagatatccacaataaaatagcccaaacatggtactactgagctgtgaaaaacgaggatttcctctctgtaaaagtagtgccatagctacaacaaaggcagctaatgtcacagaaacatcaatatggccaaaatacctggagaaaaaaaattacaaacactaatcagcaaccaatataaatttactttgcatacctctagatgaagcctgtagtaattagcattaataatataccaggttgttcctttagcctatacccctttaatgttgcacataataaaatgataaataaaggttcttgacatgagaatctaattgcagtttctgcatcttacaatctcttcaaataggattagttacaagagaaaaaaaaataacagtgaaaatcaatatgaaaacaaaaaacataaataaataaaaggctgttactgatcatacaaggtgagaataggcatgaaagcacaaatgacagagcaggttcgcgaaacatatcgtggaggaggagtcattcctgaagtcattccacgacttctaaccaattcaaaatactctcgagaaccaacaaagatggcagcagcaaaagccacagtgaaaagccatcctccagccaagactacagccccaacactaagtcctattccaagtccaaaaacaattctcttttttaattgacttgatttctgttggctctctgaagccgtatccatactcatcgatgttgtttggcctttatcaacttcctacaacacacccatttcagcatatcttttcaattatacatgtgtgccaccaaaacactagaaaataagttgtaaagagcttcaatctaactaaattccattacaatctcaatcagcataaatatcacaacttttcaatcttcatcaatcagatgaacagaaaacaacatacattttaaactttccaagctccatagaaatctctaaatttatccaaacctacaaatttattgaagttaatatttgaactcatgttcccatacaactcaaagatcaaatgttttggtttcgttcaaaacaaacctgttcctcattatcatcgtcaagtctatccggctgggcttgagctacagcaataatgaatcgttgatggggcgagacgacgccttttcggcgaaaccaaaaggtccctttagctttcgagccgtccaggaacagacccatttggccgaaattagaggtggcccgagaaa

SEQ ID NO: 24991 - DNA, 1867 bp, Cannabis sativa
agagagagagagagagagtctaatatcatagtgagtgtttatagagggatgtaatgggagtatcactcttgaagtgatttctctcaatgtgagacatttatttgtaattattcatcgtgttgagttttattcttggacatactcaattgtgtactactgactattcaatcaatagagatccatgattcatttattctcgagctaagcttttctcatataatttcaattaagttatagttttgattttgtgattggttttaattttgtttgtacattcttgaatattattattgtaacaatcaacttgattgaaaggggagcatttaccacactaagattattttttaatttttgaacaagtatgtaagatattctttagtaagacctgcattgttagaatatgatgtttgttagtcatatattaatctaatttagctaggtgattataactttttctttggaagtttaactttataaagtaaaattaaaaaattattaatctagtagtgttattttatagggtataataaataaaataggtaggggaataaattggtgtgcttggtttgattatgacacttccaaactttttaatttaatatatttatatatatatataatttatcttcttcttttggagtttgactgcttttgtatactattgttttatgtttaccacatgtatgtaatgccctatatattttgtaagtgtgttggaattattatgttatcttgtcactttatcaactttatttatatattaatttattattaagaaaataatataaaaagagatttatttgtcttctttttctcctaatggaatgaaagtaatttgagctattctattctatgacatatgagttctacaaatgaattttttttatctagtattagaataatacctaaaatgttttatttatttgaaaagggaaactaaattgttttatcttttattatatttatttttagatgatcaaattctccacttatatttcaagttataaataaaattcccacttataacaagaaaaaaagaagaagattctattagaaaatttgcatcatatatataagaaatcataatattgaaaggaaaaaaaacatgttgacaatggataatggattagaaaattgaaggcattgacttcactaatttatatttaattttccaacattttggctgcaaaatgaagattttatatggataagattcttacaaaactatgtacaaatgaatataattctaacatagaaaataaaataaaataatatttaagaaaatggattaattaagttaagcttttctactttttgaaaaatgacatgtttacacatctatagaataaaacattttaactcttctcattgaggtaatattgcacctttgcaacattgactcttagaaattgatatagcaatggccactaaattaaaatactccaactacacaattatccaaaatgatatatatttatatatatacacaatgctattatttatttcagaatgttttttaaaataaatttttttaaataacctccaagtattttgtttaataaaatgtgtcctatgatgttattttagcaattcatagctactaaatggtatggcaatcccataaatttattgaatgctcaaactttttcttgcttaggcccacttgtctaaacaagcctgtatgtaggcccctaatgttttaaagaagggaaacttacaaaaaatattgaaatttgggttaatttttacaaaaatactgtcttatgaatttttttttcaaaaatattatatttttataaaacaacagtagaatacaaaacaaattaactaaaaacaacagtagaacaactgaaaaacaacagtagaa

SEQ ID NO: 24992 - DNA, 4711 bp, Cannabis sativa
  modified_base (912)..(913): a, c, t, g, unknown or other
  modified_base (983)..(986): a, c, t, g, unknown or other
  modified_base (4681)..(4685): a, c, t, g, unknown or other
aatgttaattctgccgtgtggcagtaaaattgaaaagtattaccccaaatccagtatttttgtaaaatgcccaacaataaactattctttggccatgttaaacaacatttcatatttagtaggaagccgcgttttgttggggttatattttgtttcgtcataattatataaataaaattagaataaaaaatgttaaaaatttaatgaaaaataatgtgttcttttttaattaaataaaaggtaaaaaaatctattactttttaaattcgatacataaagccttatttatttgttttattatttttttaaaatttcgataaaaaaaataatacattatatattagtttaagtatttttagaggttttaaagaatataatatttttttttttacaaaatagataaatctctatagaactctaaaaaatttgaaataagtcattataaaattttttatttaataaataaaagattagaaatctaaaaattctcacaccaattagatatctaaaaaaaaagataattgcatataatttcaaaactgttgttataattgtatctcacttataattgtcgttatattcaaaattgatgttatcaccgtatctcacttatacttatcattatcattagtatcatttttaataaatttgctttctaagtatatgtggaagacaatgtgcaaaaccacctcaactttatattttttacacttaactacaaaaattgattttttggagcaaaactacttaagctctcattctgttttactctttacccttctatctaaagatctcagttaatagccatggtggacagctgaagtgtatactaatatacatgtgtcacgtttttagtagtttacgtaatattaattattaaaatattataaaataatttaaaaattataaaanntaaataaattataaaaaatatattttattttattttattctttccttttcttttttctttctttctttcnnnntctttttttttttttctcttttcttcttattctgttgcgtgcaagaccaaacaataaataaataaataaatctttttttctttttttttttcttcttcttttgttgtgtgcgagaataaacgcccaaccctaattccattccttcttcctctctctctctctctctctcacctctctattgtgcggcggtgttgttcagatgaagatgaagctcgcagtgagcttcggtgccctcaaaaacccccaaaccaaatctctatgacggatggagagcaccaggcgaagccctcaccaccatcgatcgaagcccagtcgaagctccaacctctgttcgcccttttcgtcgatgagaaatagagagacgacaaaagaaatgggggatcgacgacacaagagggaagtgtcattgggggtttgggtttctcggggttggggataataatggtgtggctttttgggctgaggattgttggcgatagttcctttggagctggggaaggctgttgcacaaagaggagggctaggtttcggtgggtgtggcctgtggaagatgtagaaaaagagaaaaagaaagaaaagaaaagaaaagaaaaaagaaaagaaaaataaaataaaagaataaaataaaataaaatatatttttataatttgaaaattatttttatagtatttaataattaatattatgtggaccactaaaaacgtgacacgtgtacattagtatacacttcagttgtccaccatgacaattaattgagattcttggacggagaggtaaaaaagcaaaatagaatgggagtttaggtagttttgtctccaaaaaattaatttttgtggttaagtattaaaaaaatataaagtttagtagttttccaccaatatctcttttgtatatgcatgacattataacctactactatatatgacaacagtggcagacttaagatttaaagtgagggagtgcataatttttttttggtaaggcaagggcaaaagtaaacttaaaaaaatgctcttggtgggaattaaacccttgtcctctaatgtatatgctatctagcttaatcattacactaaatctaatattgtacctctaagtattaccttttattaaaaatatatgtcgtaaataattaaaatatatattttttcttaatttttgtttcaagggggtggctgcccgcctcgcttctatgtaagtccgcccctgtgtgacaaggatgatatgtatatatatatatatatatatatatatgcttagaaaagaagaattgtatgctctatgagggatgataatatctttgagatgatatgatatatgtataagtttaataaatacgaatagtttatagcacatatatatagtatgatttgagaatttttttttattattgattttttgttttaaatttttattagttaatttagttagagatattttgtagttagtttggttattagaaatattttttttagtagttacatagtttataaatattttttatataagactgtttagactacatgttagtaatgtgttttggttagttcactttctaaggttatcataatcatataatttatttattaaaatataaaatgtatatttgcatatattttgtgaatgtaaattatattttatacatgaaagttgtctcaaatttggaatgtctctaaataaataggttggtttgggctatatagagttagagtgtgtccaacccataaccaatccataattatacgacctatcactttttagcctaatgagttatagcctactcttaacataacactttattacgaaaattgggttgggttgtctgaattaaatgatttgacccatattttatgcacccttacaactaaagcaaaccgccattgaaatttcactcgaagctattgagacaaaccttcgatcgtgagattcaaccaataatttctcatgaaataaactttcaaacagaaaacaataaagtttccttcgatcattcgcactttcaccattaaattagtgagatattaccttcaagctctgtacatagaaaaaaaaataaaagataaagaagatgaagaagaagaaggatattgatgacagttcttggaatatcattcacacaacaacaaattaaaaaaccagtaagttatcctacctgatgagatactaaatatataactaatataatgtttgattgcttctatctaaacctattaatatgttctataataatgtcatggaaccataaatatataacagaatcatggaatctttattggtggtattttactataatagaaaattttgtggacaaatacttatacacagattatgaagtcacaaatatactaataccaagagatttctcgtaccaagatcttaaaacactaacttgtaattttttggaaatgaataacatcgccaccattctagaaatacaattaaaaatacttgaaggtgcatcaccaataaggatcaaatatgacaattcttgtagattcgaagtcctttgataattatttttaggaagtaatggaatggttagtgaagttgtcaaaccaactacttgcagcccttgttagggaggttgggaataatatgcattgtaagttgtttaaagtattgcttgctcacattatggtatcgaagttgttcaggtgtgccacatgatcatttgtaccatcatactatgcaacatgtgggtttttgaatccttgaggaaattatgaattcaaatatcagtggaatggttctgtttcttcgtctgagtcgtatcccgataatttcccatattctctaccctggtatttctgaacttaattatcttccaacttattactcatatccacgggatactgccccattagttgttgcccgcctgtattttgatttaatcgattgcgcaaatctggtgcattacgattaagtgctagcgtaagtcaagttgtcttcggtttagttgctcgcgaagatcagggtcgcgatgcctttgatcataattactcagagatcttgtcatcgagtaacttttagattggtaactttaagaattactaatactctctcaagcactgtgataataatgtcgtgatccaccttcatctcgtgttctcctgtcatgggcatgagtttgggttgatctgctgtgcctgcgggtcctcaaccttgatccacttggatctgtactcgagccagtttcttgtgactcttcttgcattggccttatccttcggaagagatttgacacacaactggcccctactcttgtaagtgactgtactatctctatcgttgcaattaggcctttgtggacgccttggggtcgacctgtcccaggctgatttctagcatttctcacatcatgctgcaaaatttcatggtttctaggtctcatctgcctagcatttgtattcatgcaagaatactctagtacattaggttgttcattctcttggtttgcaaatgggaagttcctagattgtcacgttgagtctcttaatttcttgcttttgtgggttttctccatccattgagatatctctcacatttttcaggttgttcttcatgagtgtctgagggattcccttggttgtttccttgtcttctaattctagaacctcagggcctcccccatggtcgccttatagatggatcaggttgattttgaggggcctctctgttaggttttatgccctannnnnaactccatttcaatgtaatctatttt

SEQ ID NO: 24993 - DNA, 3779 bp, Cannabis sativa
  modified_base (3422)..(3423): a, c, t, g, unknown or other
taacaaatgtcaattaaaatatcatgattgtgacatgtttttaaaaaatgccactaataaaaatgtcactaaacctaatttttggtgtagtgtctgttcatgcaagttttttgtaaggatgtttattagatcacatttaatatttctaggtctatccaaatttgatccaaataaacaatggatgctggatttttccaaccgatttgatcacgaaacaatccaatctaatagatgtatctcatgtatatttattaaattaatttgaatttatctaatattttagatttagtatttattggattaggggatccatccaatctaaaaaaaatagacaaatttttaatcctaattatcatatgtacacatatattttaagcataacaacataaaatctaattactcattaaaattaaatgaaaatacgatttagttcaattggatattggattgtattcgatttttgaacaccccatctcacaaccgatccgatccatttggatattcaaaaataacatttgattcgatctgaatagattataattggatatctaattgttgcttaaaatttctctaaaaatacgtgcatttcaagagcaagccaggtgacaatgggacccacactacgggacatgccatctttaaatcactcccgatgtttattatttcaaaggaataatactagattggtcatctctgagaaggtccacccggatgatgggtggttcttgtcccttcctcttcgtgagtgaatttgacccggagaagatatagaaggacaggcagagtgtagcacactgctcaaggattaagttattgtatacacatttaatgcggcatggagaagaacatccaacctattatgctgacagacgtgcacaagggtttaaacctataatgccctgattttatgatgccctatacatcaattaacagttacataatgagctatcaaatcataagcaagagataaatcagatctcaccaaacatctatagtcagcctaaacacatcataaaagtaggcaattatgccctatgataaaatttgaaaaattgtgcaaatcatggtttatacaatcatgacaatggtggccttttaccaccattatgagcctataaatatcccaataatgtatagaagaagggactcttggataattctctgtaaacaaaaacactcattaataacagtgactcgtggactaaggctcattaataccccaaccacgtaacaattttcttctttaatactcattaattacttcaaacaactctaattaatagttactaaaaatctcgatcaacattttagtactttcattaagagctgtaggaagcttacgaaaagagaaaatcacaaatagtctaatgatataatagtgttaacaaggaacacttcacgtatacaacaacctaacgacccaaaagatctagaagaagagaagacaacttttagggtggatgctgaaggagaaggagacaccaaattattcggagtatttagaccatgaggagtacgaagaatatgatgaagacaactatgcaaaactagttgagttaaggcaaaaagttgctgaccatgaggctgagttggcagaataaaaagagaaaaataagagaatgcaagaaatgttgatcaccatgaaaaaggcaatggaaaacacaaacattcatgtagacctaactacagtcacgtctgtataagagaagatgggagaagaaccttctcaggccgcaaggggccaaaattagaaggataggtagcccgaccccatcaggtagtctcttaaaaaacctaccccaaaagggaaccctatggccatacctaaaaataatagaacaacataggatccaaggaaagttcattctgatctcccaaaagggaaaggtccgtagggggtggatttcccaaagggaaaattggcccctagaactacagagatctaaggagcgacaccgtgcaccaagagccagaggaaaagagagaggccaccaggaaagaccctcgctcaacttacgataaaagcttaacgccaaacacgaagatctcaaggcgcatcttaaccagaaaaagaaagttgcttcagcctccaagagtgtcctaaatgaaggaattttagctgaacttgctatcctctaaggacatagcaagggtctcccgaagataaaagggatatgaatcagagtcaaactgtgaagatcgagagccctgtgttgggattttataccctaaataaaatccaattcaatataatcatatttactttcaataaagattagaaatcatactatgacctagtcataagctttgttcacatgtttacacatgattataggtttaacatataagttttattaaattatgagcatatagttattcacaattacagtgatgtcatcacaatggaaagtaattgtgattatatgcttcaaattatttggttccatgatttattaatacactggatttacattgacatgataatcatcgatgaggtttacttacacttggataagtggaatgtctttttcatgacattagtaaagtaaactagcattggatgtattggctatacatcagacaggaccgatattcacagcgaaaaagatatcttaaacttaccgtaatatcttttctaggtaaatatctaaaagttgatcttagatcaacgatcttaatcctgagatgattaggttatagctcaattgtgtttcacgtgttctttgatttattcgttaaaagctgtcccgttagtttagctcaaatacttacatcttgggaacatggtagtgcaattgaataggagcgctagtcatagatatagaatctataacttctataagtacatagaagtaaaatgatagttttcttagaccttggctaaacgagtttgaatgtctaaggcctcatttcggcaattatcatttacaaggagctaagtgttttaaagataaaatacattgaagggtaaaatagtaatttagtccatattcaatgtagaccatctatagaagatcattgattatttagattgaaataatagataatttaccgtgtatctatatttggtatatagagcgtctatgtaataaggagtgtaattccgaatctatagtggagtttggaggaattaataaattagaaaatttacttggtaaatctcaagatctacttattaggagcttcgttacataggctcatggtccccacattgtctgagataatatcatcttgtagactcaactaattgattttgtaagtcaattagaattcaaagatatactatattttattttagaattttcaccagcaagtttgggtaattttgagaagaaaagagaaatatagttttatttgttaattaacactctttgtgggtctaattaatgaatatatttaaattttattttatttgataattnnttataattattaaaataaaattggtgtttaaataattagatgagataagtggtaaaatagaaaaagacactttaatatccttagttgaaataaagtggcaacaatctaactctaaagcccatcttttaatttcaaactagaggttagatttgagcccaagtctttattttaagcccatctcatctaatcataaccctaagtgaatgcctatataaagaaaaaaaggaattcttacatatcacaccatttttttttttatcttaatatcaaaaatacgttccctaatctaataacctatttatttacctcatatctattctatataaaatgtgcctatataaccgaattcttgggtg

SEQ ID NO: 24994 - DNA, 3277 bp, Cannabis sativa
tttttttttttttccaactaagaagagaacaagtgtacagacaagtaaggttcaagacattttgtttttgtttttaatggtcccaaagcaaagtaatatgcaataaatccattgcaacaacaaagatagcaagcagctagtatagtagtagtagtagtgtacagagaaggaagataaaaatagaagaagattacagagccttttctatcttaaagcccaatttttttattaggggaagacaagctttgcatttgtttctaaagacattttacctttccaattttacaaattataattttaacatgttacaagtaaaattaaaaactcttgtcatgaaccttgaccatttcatttcactagccaaaatgggctaatggtaaaacctctccctatgcttgcgaagaacccgaaatctcatactttggcaccaaggaaggactgcaagccaaaagaaaaatgtaactcaaattaaaagtctaatcattagactcaaatattttctaccctgctttatagacctttttctttttgagggatcatctatgaagaatattttcctcacccgagctaaatataaaactaaagcaattgttatgtaggtacccaggtgagactcgagctccaaatcaatattggagggactaagaaactgaagcaattgctatgtaggtacctaggagagactcgaacttcaaatcgtgtgggagcaaacagcatggctgatcatttgagctatctctcttggatttggggtacttttaaacaaattagactcttcttatgttgaagaacagagaatctaatctcaaatttaggttgaatacataatgcgcttttgggtttgaccctctcaagtctgaatcagtggaagtttagtgtatttaccttgactcctgctggactgcttccaggtttagctgtagttgtgctcccaaaaacatttactgctgttgaagggtttccgggtttggttgtggttgtgcagccaaagtttaactttaattttttatctgaaggctttaatatttggaaagagcacatcaatgaatcatctacactcatcattgccccagcattatcgaattctccacagtaatttggtgctgaaaatatagttacaagttgtcggttggcaaagaattcatagccatcctccacaacctgcaaaatagatttacgagtacagagcattatcacatggcaaaaaacataaactaaagagtatttggtgataacaaaaccttatataatgtcattgtgcaaagatttattacaaaaaataaagtactgtgtaaaatcactctcaaaagaaagtctgttttacaacatatgggtaattgcaaaatgaaattaccaaaggatatttacctggtgagcacgacaaatgagatccaaatcatgcttctgaagaaattcactgactttatcagcaccaaaagtatatgaaactcccctgtcattcattccccaaccttgaacatctttacttggatcagaccataaaagatcacatagcaatcctgtatctggcacatcagttggtcggttcagatttcttatttgatccaaattagtaaggtctggagaaagaccaccatgcatacagaggatcttctcatcaattaaggctgccacgggtaagcagttaaaacaatctgtaaatgttttccagatccttatattgaatcttctcttacactcatcataaaatccataaatacgatttattgaagcacattcatgatttcctctcaagaggaaaaaattctcagggtactttattttataagcaaggagtagacatattgtttctagactctgttttcctcgatcgacataatcccccaagaataaatagttggatttaggaggtaatccaccatactcaaaaagcctcaaaagatctgaatattgaccatgtatatcacctgaaaagcaatacatggaagatattcaacttcataactctttcttagccaaaaaagattactgaagcaaagcaaagaaaaatttcagttatagataagcacaaaattgaaggtattcttcctaattttacaaatgaatgtatcacacatgattcaccggatttccgatgaaatgtaaggaacaaaatatattagtttcataattagtaacatctagcttaactgcaactctccaactgtatacgaggaaagcagctacagccccaggaatttatatgctaacatgtcattaatgtagttagacttggagggaatagagttaaagagtgcttagattaatatgaaactcagtgttgggtagttagcattatcatcaattaaacaatgacccacttgaaacataaattccttggtcattcaaaatttagtttatcatacatgggttgagtttcacattttgatctccataccaattgccccatcacagtaaactaagaaccagaagagatgacagtcagttgttacttatttcattgttgaacctaaacgaaagagtacgttgctaagcatatggataaacattcaacaacaaattaacaatattagtgttgtaaaatcatcacttaggcgacaacgataacatttagtaaatgtttttttctctttcacatgtactctattccatagaaccatgcaagtgtaacattctgaatctgcatcctatttccagcgttaaattgctaatattaggttaggcattactaatcacgtcaacaatatacacatagccgataaataagtcctgctatcccaccgtaaaaaaaaaaaaaagtcaaaataagtccaattttcattatactcaaaaataatgaattgtagtgcaaatgactgacaaaagccttcaaaaagtgttgcaattcatagatgcccgtgacatagtgtcttaattagactttgtatatcaaataacaaattgggatgaaagacatttatgtccacaaagggaatagtcgatattaccaaatgtaaatatgatcataataaatcaataaatataagcatcctactaaagcgtaatgctccaccggtcttcttcaaatttatgtttaaccataataaacaatcatttaaagccattagccaactacaacttacatcacttaatgaaaatagaaggcacaatcatacttttcctatttcatttaaggtcttctcgtataatcaagctttgttagataaataaatcaattaattcaataccaacaataacaaattaggttgaacacaaaatcacaattcacagcatggaattcaaagaggatcgcaaaacaaatatagctatgttccca

SEQ ID NO: 24995 - DNA, 2503 bp, Cannabis sativa
catctatccaaagccttcctaaagttgttaataagatacgtcggtttaggaaggcctcccaacttctctttttgactcaaaatctcattgaaatcccctccaacaacccaaggtccagtatacattctgtttagccgttttaggagcttccatgagtgaaaacgttgactcggatctgggtcgccatagaagccagtaaaacgccaccattgtccattctcaattctaatgaaagaatcaatatggaactgagagtaagagagaacctgggcttctatgtccatagaccataataagatgaggcccccactttttccacgagcttctaccgtaaagcacccaaagaaccccaacttgactctcaaagcctcggccctcacagcattaaatttagattcggaaatgaaaactactttcggagtgtattgattcaccagggaagttagggaacgcaccgtccaaggattccccaacccttgggcgttccaaataagttcatggttgtaggcgaccctgaatttcagggttcgcctcttccatgatcggagtgactgccaaatctcctaaaggagaaatgttagttactttgttttccatcttcccttttcgagccttggaatctttcttaactgctacccttctccgagtttcttttgcaatgtttttcgagctgcttcccactgcaaatggtgtagatccatccaaaaccagagcatcttgtgtgtatgaaaccgggacattataaagatcttgatcctgagtttctttggccaaaattgtggctgattttttcagcttcccgtactcagaatctccgtaatcttccacaattcgacgctttccacggctaccatcttcacattgtttctgtacatcctctttcccatcattcctagcctttacagtaatattctgtggtgaatattgagagttcttgcctgtattctgttgtagctggttgtgatcaagacccccagtacttaccacttccatagtatcacacagaggaacagagttgcttatggtattccttccatgattagatgttggtgcttgccttggctcttctaaagtatcaaacctttcctttccttgcctatttcccattaggccttctctacctccattatctaccttgagccatttgccatacgcagcagtatcttccttcccttcctcatgaataacaattggttcttgatgacaatctttgtggctgtgcccaattcttccacacttaaaacacatgaatggtagttcttcatattggaatgcaatccaatgtttctttccttcccagggaagactaaaaccaagacacacaggtttgtggatagacatccatatgcgaaagcgaaaaaatccatcagcaaccattttagacacatctgaattgtacaccgaaatcacttcccctgcctttgctgccattcttgttgtgttctttgtagtcagaagatccgttggaactccccaggcccgaccccatataggaaagctagtcaaatcattcttccaagattcatttgaattctccattttccccaaaattagcaccccattagataaataccatggcattttagatagtattctactttgaattgactcagaagcaaatgtaaaagataagaaaagacctgaatcaatcttctctttgattttgatatttcattcaccctcctttaatcgccatatccctcccagcaccttcttgaggaaacccctactgtgatcagagttcgtacagaggcgaccccgtaagttgtatcttgcgatcgtgatagataagcttttgtccacttcccattcttcatcttcatccgtgacttgaagattatgagttttctttagaatttcctccattgcagagcttattacctcaatcccagagaacgggaacccttcgaacacgagggaagaaaacagggacaaggctgagccgacccctgaatgcattgccttgcaagcaaaaatgctgaataaatattatgtacaaagaaaatcatccaacctgaacctagaacatcgcggcgagttcacagaatcggatatggcggcgaccagcgtagaaatcacattttatttcgttcttaattattatttactttaaatgtctaattgaagcatgcaacccaaaaagtacagcaattgataaaatttaataatcaatttttgtgatttcgacaaacctttttataattaaaattttgctatgacacaataatatgcttgcttatcatgcagttcatacaaaatatgaatcgattaattaaattgaatagaccaattattaaatataacttatatattttgtttaaagaatgacctacacaacttctataaacatatatttgttttaaagcattttcaatttatgtttacgctcacacaaactgtacttatattattcatgtatttttactttgaattcaatgtcagtacacactaatacatactctatctctctctatctccatattttgaataattctctccttcc

SEQ ID NO: 24996 - DNA, 2606 bp, Cannabis sativa
  modified_base (316)..(320): a, c, t, g, unknown or other
tctctctctctctcctctcttcataattttgaagtccttatagtgaagagtacatttcccactcatatcaagtcagtactcaatcatagtatggaagattgtgaagaattccatcaatagagaagatccaggtttagatcttggcaatactctacgatagaatggaacaagggttagagatctaaacggaaggatccataatatttcgccgccacaaatgtaaggtttctataactttatatgtgtttaatttattgttttaggaaatttatgtttaggatgtgagattatagaatataatcaaacatacatgttnnnnnatctagatcctggtaaaataacttccaataatagggtggcctagagtcattatacatgtgaagagaattccatggtggagattgatttcctgcattgttcgaactgctttgagcagaattgcggttggtcctatcagctacgtgtggtggacctctaggtctacaatttcgagtctgagtcctttttatgctcactcgtagcttgttcccctagcaggtgactgctccatatcaggcagaggacccatagatccacattcacgagtctgagttcttttttacgctcactcgtagttcccttccttatagagaatctcagcgcttcctgcttgttgagtagtggcacgactaccaggagtggtagtgtggctttgcatattcataaatgattgcttgcttacacttatgaatttctttcagaataaatttcttagtagagaaatcaaaatgtagttgggaaactcgagttgtggttctcaatgaaagcaccaaaatatgacgttaaaaaatagccaacaccagcttgttagattggtaagatgaaacaagaaatgagttgagtaaatagagagacacaaaatttatagtagttcactccctatcttgcgatagtaatggagctacgtctactttgactttttatttattaagagaattgacaaagtgtgaaaactctaatttctagaaagaaaaactaaagagagatgctctgaccttatggatacatttctgaatgtaaaaaatgaactaaatgaactctcctttatagggaaggaggtcatattaaaataataattaaatatgaaacaaatatgaataaataaatttaagccatttttgactgttgatgatgacctaatggtgaaattaactctgaaggtcagccgtcaatttccagatcttgatttgcgtccaagggacccactttgggaaagttgtagtagaaatagctttgaaatgtaagttaaattgcatcaatcagatcaatattaagtgagttatgaacgttttactaaaggctgctcttataccagcacccaaattgataacacagctccacatccaatgcccaagttgacatatgacgtcaacctggacattgggtgagtgggaaaacatgttggggatgtatttttttgatacctaagtgatattttgacatcacttagtcaatttatttgttttgatgaactttttcaccagttcttagaaatgttgctgttttgcggaattgggagacacaaaactactcgatttgtgacttagtcactttaccaaaaaagtgaaaatatgaagttttaaatttgaatttttttagttcatagctctcgtttattatgaaaaacttgatgaacgctcaagccaaaattagaattggattagcagaactcaatgcaccaggtcacatgttaacttgggcgttgcgtgctctttctagagcttccaagaagtcattttgatacttccaaggttctcaaaatcgaggacgacgtctcttaccccatttttaaccatgctgaatagaatgcttagagtagaatttgcatttagatgatcaaaaccagcgcaccaagttaattgtcaacttgggtgttgggctcaactttcatgccacctagattctcgttttcttactgagttcacttgtatcttctttatttctgatgaaagaaaatatgcctagaacacttttttgaaaatatgattgaaaacaagccatgtttacaaaatgtcaaccagggcgctaggcccaccaccaggtgttaacctagacggtgagtccaattttaggccaccagatggttttgtttgattcctaaaaacacttgtatcttaatatttgacaaaaacaaagaatattcctggaatacttctctaaaaaactctttggaaacgacccaggttgacaacatgtcaacctaggcactaggccagcaccaagtgtcaacctaggtgtgttgggagacccttttctggcctccaagttggtctgtttcttcccccaaaagaacttttttcttcatttttgatgaatacaaagaaatttctcaggatagttcttcagtttgtgatgcttggagaagtgcccaaggttgacaaaatgtcaaccatgcgttaggtgcctagggcacctagtgctccgggtgctaaaaaataaaagtacttttaatctgattctgatgcctaaaaaatgtttgtgacatatctaattcatgttttagtacaaattttaatccatttacactaagacggtcctaaaaattgaaaccctagttagaatgtcaa

SEQ ID NO: 24997 - DNA, 2677 bp, Cannabis sativa
ttcttaggcttatccaccttggggcataatgtaattaccgtatcatttatacaatcaatagaagcatcattattaagaatgtttaaacacaccgaaatcacattatccctaatcttagaccaaaaccgttgataaaaaagaacaggaagcccatctttacctggtgctttagccaggttcatctgcttcattgctgaagtgacctcctcctccgtaagacctcacacgaactcgctattcatctcagctgtaactctatgcagcactgcatccaataccgcatccataacttcatcatgttcctctaaagccgtgaataaagtactgaaatccccaataatcttctacaccagacccgatcactttgccaaactcccatactatcaaacaaccccttaatctcgtttttatttttacgagcagatgccttgtgatgaaaaaacctcgtattttgatctccactatccagccacattgcccgacgcctttgacgcctgtacttctcatccttatccaacaacccattcaatgttttctcagaatttttgatagcaagccaattgcctggattttgcgccaccttcaattcattcaataaatgtcgcaccttagaaaccctctcatcattctcctccttcttcttcttcctattccaacagtggagagttgtccgacaattattcacccttgccctaaaatttcccatggagtgtacttccataccatcataccaaaacttatcaacaatgtccacactctccttctcctcacactaagcttcctcaaagtgaaacctaccccttcttctagtcggtccacacaaatcatccaactgtctaattggaacatccaccacaagggccatatggtctgactcaaaccaatcaagaatagtaatatccgcaccctcaaattttgttaaccattcagcattgcaaagacccctatccagcctctccattaccccatttacttgttgtcaattacaccaagtaagttcagttttattagagcaaaaatcaataagccgacaatcatcaattgcctccctaaagttctccatagcacgaggacgtcgctgatggcctcccactttctcagaagatgagacaatctcattaaagtctccaacacacaaccaaggtcccgaaacctcatccttgattctcctcagcagttgctaggaaaattgtctttgcgaggcctccggatgaccataaaaacccgtaaacacccatggtaaacacccctggccagctactcccaccacaatgtgaccgtgagaactagaatcaactcgtaaattcacttcattacgccacaacaataacaacccaccactcaaacccaccctatcaacagagaaatagtgttcgaactgtaaacttctactaacctgttctgcctggcccctatttaatttactttcagaaagaaaaataatactcagactaagctccttcacatgggattgaagagcccgtaatgtccaaggattctcgattctttggacattccaattaaggattttcattgattagattagttaagtaaatatctattttttttaaaaaagtttagcaagatgacctaatgtaataaataagtaaataaaaattatgaaaatactttaacgtcattttttttttaaaaaattatataagtaaaattaaattatacaaatttgctaatattgcatattaatatattataactataacgaataatatattatatcatcaatatataataatatttgatatatcgtagcattgaatatatattgtaataataaaattatatagggaaatcacccttagtacagagttttatacttttttttattcatttttacgtttcttttattttattttcacttttgtattctcatttttttttatttctacattaaacataattttatttttattttttacggttcctcactaatttccttttctcttattttattttactttcttcttccgaactatttcagttttggttttcctcctattcccctcaacattaaggtgagactatcattatgtttctcgcatttgttctgattctgagctcctatcatcctttcctcttgttcttcttttgtacagactttcatttgcattttttaaatttctaatgatgagaaggtatagctgaagactatttgaagtcactcccatttgtcgattatgagctttaatcatggctttccactcactcttcgaattagcatttacatttaagtagttcaaatgctagtttgagtagttatgcataacaatgttggcttgcatgtctcttgaaaataaatttgtgtttgtgtaatttcatttcatgttttaattgaataatggaggatttctacatatctatagataatgttgaaaatatgaattaagttcattcatttgtatctttcttcttataggtctgacttttagattagatagccattattaaaactgtaataatgaatgtatttgatattatgaatcattatacgtttgttgaattgcctcaatgaaccttaatgttatgtgttcaataatattcatttaaaattgaagattgtatgcgtcaaagattataagatacgtttaaacttttttacacaaagatacatttaactttgcatagaacaaattacttgatgagtatggagatattagtg

SEQ ID NO: 24998 - DNA, 5134 bp, Cannabis sativa
attcacatatatatatatactttatgctatctcacctcatttccgtgctcaggtgtgccggtcagcctgagtggaattggagctcgacgttttacaaggccctatatatcacaacatttgtaactctagtgagagacatgctaaaacactttttggggacttaaaataaaaactagaaatattcctatcgatgaaaaggatggcaataccctaaagatcacaaaaatagaaaaaactagggttggcaaaactgccccaactgatagaccggttccctaaccggaattctagttcgtggggtttcttggggactatttggtccactggttgctataaggttccccttaaccggtagaccaattcagtgcaggaaccactaaaaatgtctccaacacttcaaatcaaccccaaacttttcaatattctccagaatacctgtatacactccaacacagccaattcatgcaatacatctccattttaagcacataaatcataatgggtgaagccaaaagggttttaccatgaattagggttttcgaaacctgctggaatctcacctagcagctgaaaattagaaccctagatgattctctagagaattcaaaagagagatagagcttggtaaaagaaatgactttttctaagtttttccatgaaagacaaaacatatatcctttcttttatttatttaggtttttttttgtaaccaaaatcagattaccctactacatattctcacaaaagacaaaagattaaaaaggggaaaatactaatttacccccaacataactgtaagcttaaaggtcaccaaggacaatttggtcattaataaaccacgacaatttcctgccataaccaaaacctaacaatgatgccccgataataaaacgctccaaaccataacaaacacgactctctaatggcccaacgtcatgctccactgctaccaaacacaaaaacagaacaaaacgaggaattcacataaataacatagttaatacattctaaatataagtaattaatcaccacaggcatgcaaattaataactcaatatcataattaaccctaattatttaataatccaatatattgaacttaagcggtctttacagtgttattcattgtaagctctccaatagagggaaaagggaaactaaatgtaattctcaaattaccataaatactcagtgaattttttagattaagggttgaattctcttgcaatacttactcacgcaaacttgagaacttaaatttattgtatttcgaaagacttttcaagctaaagaactagttaataacatcgactcgtggactaaagctagttagcgccctcacctcaccacgtaaaaattgcttgtgtctttcttactttttctcttttaatgattatttataattagtttttcaaaaatttaggtaaatagtttaattaatttttttttttcaattgttagatcaaatactttatcaatctatggctcagattgttccctagaccgatccttcatttggactacagtcgtatcctatatatactaggtattagtaacatgcaatgcatgtctgcttagagttttattagagttgttattacctaattatttttttttttgcaatgaataattcattaaaaaaaagaataacgtcatacaggctaggtatgaatactaaacatctcatgttcatcaaataaacactaaacatgatatgataatcagtataaaactatatatccaacgaaaataagaatattcatatctagccaaacaagttgtttatctatccaaagagcatgcgcaactaatctatgagcaatacagattagggacattcatggaaatctggataagaaacttgtaaaaacttctaataatgatcacataatcatttgagtaggggacactgatagaaaagcaatcattagttgtaaaattttggtagcaaactgcaatccattaccaacatcagcatcacgcaaatttttgaaaaagtcactatcctttctctaaaagcttgaaggggcaatagtgtcttaactgcacacaaacaaactgtacattagtgggatgaaaaaataaaaataatgaggaaataaatattttattttcactataaataaataaaataagcatcaataaatagaatttataaaaaatactaacaataatcacatcaaaaaaaaattccaatagaaaaattataaagaaatatagaatgacttatcttgttaaatgcaattagtatctgaagaagattcagcagcactaattcaatcatttaaatgacttaataactcaaataattaataacttaaattatatttgtagtaatctaatttaactactttagatgaaaaatttaatgatgaaaaaaattcaaaaggaatatataatctaaagatttttttttaaaaaacaatataaatatactttgattaagtaacttaaaagaaaaatatatcatataatattattaaacaaataaggattaaaataatgtaatgtatatcatataaggtatgtattaaatatgtaaaaataattttttaaaaaattaattaagcacataatatatgaaagctataaaaactctactatcatcaaccaaccacattaattagccactagtaactgttccatgagtaaccacccttgcccattggtgacaaacaagaaccatcaagagtttgacattctaaagcaatttggtcacacctcatcagcatcagcaatataataacagaaaataaatatgaattatatacttatcaaatatccatattaattaatgtgcacatcaataatgagaaaaagaaaaagaaaaacacatagatttacaatagtaaaagaatttactagaatttatgaatataggaatagaaacgaaaaatctgaacggaacctcgaacacgatcatagtatactttgattaatttagatatttttctccctggtcggaactccaaccacaaaagacgacgccatcaacgtagaagatgaagccacacactaaaaagatactgggatgcctaaatctcccatctctttcacccttctgcccatattatacaagctttttttttttttttgaggaaaaaattgctattataaattaaaccaaagagtcatttacaataacaaaatttataggcggaggaatacaatccgaccaaaaacaatcttcatctacccctagtgcaaattttgccaaaccatcagcagccatattagctgttcgcttgactagaaacatccatgataatatcaataaaaactgagtaagctactgttggggagcatattgcatttttcactcgaagtgcatccgtctctataagcagatgaggaaattgaaagtttagagcataatgcacaccatggaacatagcaagagcttccatttcatgaggatcaaagctgcctagcagtttcttggagaaagctgcaatgaccataccagaactgtctcgtagaatagcacccaaaccggtagtgttgatgttgcggtccactgctgcatctatattcagcttgtaagcacatgtaggaggaggtttccatgggactttgtgactatttgaagcagagggaatggaagaattctgcattggtgctgctacccgagcttgaaaaggctgctgatatttggaaatagctgatctgtagttcaacaggtagtttctagcaaaggatgacaactccatggcctttttggctttgtgtccatgtataactcggtttctttctgtccagattgcccataaagtacatattatttgttccatttcagccttagagtgaatacttgtaaggtgaaccaagtaatcccctttatgcattgatgaggctttataccaatcaaagttgaaaccagaaattctccatacagctttggcatacttacaaccaaaaagagcatgtcccacagtttcccacgcttgtcgacatattgagcaagtggaatccgtaataatttttcttttgacaaggccagtggcaacaggaagggcgtcatggaagactctacaagcaaatatttttattttttggggcagcttaagtgcccaaaaaaacttccaccaggggctgtttgtatatgaacccgaacaaacagccacatcttcaagtgaggaagctaagtgataacccgtttggactgtgtaaatcccagacgtgtgatgatgccatattaaagtatcactattcctgaaaaaactcaaagggatagtaagtattcgttgaacatcaggttcagaaaaccattgttgaagaaggtctagatcccattctctattatctttgataagactagagactacaccattggttggcccattataatggaaaggaaggaaagtagagtgccccgggatccatggatctaggccacaaagaattcgacacccttcgccaactttcaaccttaaacccgaagataggagcttcttaccccaatgaataccttgccaagttaaggatggggaatgtccatgcgaggcctcaaggaaggagttgttagaataataacgacatttaagaagcttagctagtagtgaatctggttgggaatgtagtctccaagcttgctttgcaaggagagcttggttgaagtgcacaaacgaccggaatcccataccaccatcttcttttcttttgcataagagcttccaagaacgccaatatattttagtaccattttcattcaacccccaccaaaagttagccatcatcgactcaacttggttgcaaaaagacataggcaatcgaaaacaactcattgcatatgtaggaatagattgcactaccgctttgagaagtacttctttacctcctgctgaaaaaaaatttcattccaagtatgcatgagcttccaaatcttctccttaatcccactgaacatttcctttttatctcttcctgagtatgatggcaaccccaagtatttttcatggcattcacaaataggcatggacagatgcctatgaaaaaatacttgagcaactagcgtattgttaggagaaaaggacataactgatttttccggattaagaacctgacccgaagcacgatggtatatatcaagcactcttttgatggctagacatgagttttcattggcttgacaaaa

SEQ ID NO: 24999 - DNA, 2656 bp, Cannabis sativa
ctatctttacaactcaatttcttaggaaaaaacatagtaattcgagttttgattctccaccgaacagcctccatcactctgccataattcggctgttcattttgccattctagcttgtttttagcatcccaaatgctatacactagacctgcaatcacaactgcaagtacattctttctaaactttcttattttagctttcctaatccacctcaagaatagaggaagatcattggcagtcgagccccacaccaaccagcatttggctgcttgtaagcacttttcagcaaaggaacatttaaaaaataggtgttgtgtgttttctgtatgagtattgcataatcgacatctactttcaatttgaattccaaacttgacaagcctttcctttgtctttattctattcaacatggccaaccaaagtatcacactatgcttggggatgtttaatcttgcccaaaccttacggctccaagatactttatcttggtttggtttgagtaggtcataccctgcagcaatctcatactttttctcttggaattcaatcgggttctagatggttttcaaatggtccttaagagttacaagcttcctccaataccaactcgagtggatagaagctgtgtaactccaccaggattctctcttgatatacacactatgcacccatctcaaatttcacatttagttgaaaggtctaaaatgtaccacaaaatagggtatatcaaaaagtaaatttgatataccatttggttgaatggattagaatattatgaagttctatatttttgtctttaattatatatttattggtatattgtttgattagatagttatgtttgtatttggatttttatattgttctttgtttcttttaacattttgcagctacctgtaacaatattgtatgatgaatattggagtgacaacaaaatttctgggctacaagttgataactatgttactagatgatgatacaatattttttaatattttagagctattatataaagagttgccccaaaagttggattgtaatagccactgcattaggatgtttgtagatatgaaccttagagaaaatgaaagtaatattttagaggttgttggtaatatactatttgattcaaagaaccaaaataacattgtagtatctatttttgtctttaattatatttatattggtatatcatttcattagataggtatatttattttgagtgattttatatatcacaatttttattttacatattggtatgttatagttttctttttcttataatttttgtttttttttctttcagctgtggaactatagattaacaactatttcaatgataatacaacattgatgttttattgatacaatattgatgctttagagatttggtataaagagttgtttcaaaaattatattttcatcgtgtacattaagatttaagaagtttgtaaattataaatatgaacctcaaaacgaataacatagattgatgtgagttgatatttacataatgcaaaatcagacaaaataataaaatactcactcattgtaatttttgaggagctcatatagtgaaactagttaaaaaaacccaatgacaataatgtactaatatagagtaaattttcaatcactcatctactacatatagagattcattttaaggttggcaaaaacatataatacactagtaaaaattgaatataccacaaacataaaataatatgtgcaataaattacattttatttccttcataatattagcatatacaactgatgtaccacaattttaaatcaatatactatgccatatttttagtgtcaagttttactggatatcgggttttaagtatatattttgaaataatataccacaaacttaaacgaatatactataacacataacaataatataccataaatttaaactaatataccactcttttaaattttttttcccttaatataccatagcacttagaaaaaccctaaagcaaaataaatataccaaaaacacaaactaatattcattttttagtttttgttttctttatttccttcataatatacgatataccatatcacatacaaataatataccatagcagaatatgaatacaccataaatttaaactaatttactattaattttttttttctttctatgatatacaatagcatacaaaagtcatatatcacaagcctaaacaaatatagcatagtgaaaaaaaaaacaaaaagttaaagttaatattccacaagttttttttattcccttcatgatataccataacacataagaacaatatacccaagtgaaatatagctatatgataaacttaaactaacaattcaaaagtcttttttctttatttcgttcattatatatcatagtacagaaaaataatataccatagtgaaatataattataccacaaacatgctaatattaactaagtttttttttctcttttgttcattgtataccataacaaataaaattaatataccacactcttaaattaatatactacttttaagggtttttttttcttaatatattataacacataaaaaagatagggataagttaaaaaataccactttttgtatccattaatcaaaaataccctcatattatattttatt

SEQ ID NO: 25000 - DNA, 1321 bp, Cannabis sativa
gattcattcaacatactttcagaggttaaggttccactggcagtacttggagcagagactgaccagctctctccaccagagcttgttaaacagttcgaggaggtcttaaatggaaaacctgaggtatgatttcatcatttttgtgtttcgcagtttccttgatcatggtgagatattttctgcatttaatggtgtttcatttcattttcatgtatagattgagtcctttgtgaagatatttcctggagttgtacatggatggactgtgaggtatagtgttgaagatgaaacagcttgtaagaaggcagatgaagctcaccaggacttgatacagtggttcagtaagcatattaaatgaaggctttcgtaataggaaccttaaatgttctatgctaaaactattagaaaccaagtatggagcactatctatctcccatgttttaaatagtagctacaagtgatttgggttaatgtcaaagacttggtctttgtctttagagtttcataaatgtaatgtgaagtattacatcttaattagtacttggatgttcttgttgagaataatatgattgtaagatagttcaaatatgatgttttattattgttatttgttaaagagtatctgttgttttcaactcaataaatgagacactttacaagaaatgacaatgattttcttcttggtccaaccatagaagacaagcttagcacttgtcctgtgcaaatattaataattttttttaaaattgggacttcttgtaattttggtgctgttttgtttaggctgcaaaatttcaaaaatggaaaaactccatgggagttatttatgtaggaaattcaattttctgttctgctatgataaattcaagcaaggggaaattacctttaaaagttattacttatttagtgtaaagatgaaaatttcaagtttacattttttttcctttttattttcactttatgcttcattggctctatttggaacttgagtaatagaagtgaagtgggtatataatgtgtattgagtcatatatgagataggaacactttattaaaagtgtatataatgtgtaactttagcacatgctctgctgagctagcgggtgtagtcattttatttttttagagaaaatttatttattaagttattattttttatttaattagttaaaatagtttttaaatgtgtttaatcaattagtaaatagaaacgatttctcattcgcaattttaataacgttcacatgatcttcattcttcactaccagaaaaaatgattctcttcgttacttcattctgtgtatatttatataatgcatta

SEQ ID NO: 25001 - DNA, 3476 bp, Cannabis sativa
ttaatttaataattattattaaataaaactaattaattataaaatgtgatccagtagtactcttaggaacctataaaacttaatagcaatatccataattaaaattagcatttattatgtatcaaagacacattcttaatataatatatataaatatatatatattatatgctctagtgttataggagaaacaaaaaaaaaagcaaccatagttttttgtattttatgcaatttatataaatgatattaggtgcttttacaatgcacccctcagaaagaatgtactgatgtatcatttatttgtttcgatattttaaaaaaattaggtccaatttttttcatattcgtgcacatttataattatttaagatattttacaaaattttaaaaaatttaaaaataatttataatatagaaattagtgttcaaatagtctatttcacatgcttataagaaaatatagtcatacgtgcatcacaatgtttgaacagcgtgttgaatttttctaaatttttaaaaattttgtaggatgtttgaaataattataacgtataggaccatgagaaaaaattatttcggataccaaaacagataatcagtacatcccctttataagagagtacattgtaaaattttattataatatatatacttatcttcctaaataattatattatattttaatgatttaagtaacaataagactattatatttatctataggagacttttaaaatgtaaatataaataaataaagttatcatgcagaaaattaattaagcatatattataattaattaagtaaatattattttggattttgtgctttacaaaagttattaattagactatttattttgttaaatgataaaatggactcctgtattttctaaaatgataaaaataggatcctgaactaattttttgtcaaaataaaatttaataataatctgatttaaatgtgttatgacaaaataatttatattttctgtatctattcgtgttaggaatcatcttcaagttggttatattgaaaaaaaagttgtcaaaaattaagctcagagtcgtatttttaccattttggaaaatacaggaattattttatcatttaacaaaatagagggtccaattggtaatttttgcaaaatacaaggttcaaaataatttttacactaattaattttaaagatgtaattgttaagaaattaaaaagagtaaataaacctcaaagaaggaggaagcttgggaaataagtgagggttcctcaaggcttgtggtaaggtaaagagatataagtcatctttccaattaagcttttgttcttcagaaaatacaaaagtgtgtccaaagccttctacttctccaggtctctgccatagcttttccttctcctctatcggcattttgaacaatttttctacctcttctttcattttctctaccacagaattacttacaccgtggtttaccaactgcaaattattattattacaacttgagaaaattatactaataattcattataaatattaaggatgtataatcacggtacaagttcttaaataggttcgtaacatttaagtacttaagttattttattagctacgaaagcatttaagttaattattttttttttttgagtcagcatttaagttaattatttaatatgtagtagaatagaaaaattattctgcaaccgatttagttctaatagctaggtatgttgatataaaagacccattgtagttgagttccagatgaatctatgttcatattaaatgacaatatttattaactgcgaaagattttaaaatactatgtttgtacgtaaaacttagtatgtccaagttatattttcggtgcgtgcaaatataaaatgttctaatgataactttaatacaaacataacaacttaaatattttcgacactaagagaataacttaagatgttacaaatttagttataatttaagtattttcaccgctaacataataaatacaagtacttacaaacctaaatacttggttatatattgtcgcccgaaatattattataattaaatacaatatatatatatatatataattacctggaaaaaaccccagtctttgcatgccaagtggagattagtgagttcagaatcacataacaagttttggaaattgataacagggatttcatgagaagaaaaaacatgagaattgagaatattggtttgatcattttggatatatttacttggaatagtcaccatattgggatcctttgctaattcttgcacactagttgcaatcacactacagctttcaaactccattgtatgttttcctcttaaaattttggctatatatagcattttgaagaggacatgtatgtatatataaatatacatatatctatctatatttggcacgttttttttagtttacctactctcatcgtagtgtaaaccatatattaatgtacagatatatttctttgtcatttttaatttattgtattgttatgaatcattgactttatatacttgtagattcctctgtttatataatggctaattagtaatttttctccccgagttttgacatgtactaaattgttcgagggaaattagataaaagttcttaaatttaacaatctcaatagttcgaggaaaatttttaacggtaaaaaaaattcaggggacacgatttagtacatgtcaaaattccggggaattactaattagccttatatatattattgcaattattagacacggagggaaagtaaggggcaaactgttaataaatttttttcaggggggcaattaatatatataataaaataattaatattataaagatatatatttgttagtggtgtcggtggtatattgataatgacagaaaaagaaattagtaggaaaaaggagataaggaaccatgagttgtgattttaaattatttataatttttttttgaataatttatattaattatacataaataataaataaaatgtggaccaatgcaaatttattaggtgtatattaggtgtatacactaggttgatgttatgtgcaatgcacgtataattaattttctttttagttaagtttaattaggtgatgttaagtgtaatacctgtatgtttaatattcttaaatagataatgtattttttttttttttaatttttgaaatggagtttgaaattttgatctttaagaaattatttttagctattgctacattggtgtgtcatttaaatgtgattatatatatacgtattttttaaatttttaatttttttttaatttggtaacgtatctgataatacatatattgtaatttactatattcttaatcaaatttgagcggtctatatatagactgaatttgtaaatttgatataaaagttttttactttcaaactttacgaaaaatatggtatgtgaatcagtttaccataactaaaacagaaagcaatcaatt

SEQ ID NO: 25002 - DNA, 3779 bp, Cannabis sativa
agtatctacactggttgttcctcatatgataggtctggctgaagttccaatgcctcataactcagaacatgggacgagttcgagacatactcaggtctggctgttgcattctcttctctaggaacttgtcttatagtatagcctttgagctagcttaatagtgatgctcaaataggctatcattttttaccttaggctgtatattcacctagaacatgattaatgaccaactaggagtcgttgtatatgtctaggtaatcagcccgcacattgtgttctaacttgaggctagcaattagagcttcatattcaaccttattatttgaaactgaactttattgcctcgtgcagttgttgccccctggtgtagtgagggcaatgcctgcaccggacaggtggtcagtatagcttccgtcaacatgcaacctccatgctgaattttcttattcttgcttcttctcaagctatttcttttctcctaattcttgagagatttcaggagatatacctatgcattcaaccacaaagtcaaggagagcttggccttttatagccactcttggctagtaagtgatctcatattggccgagtttaatggcccactttagtagttggcctgatgcttcaagtttctgtaatacttgttgcaatgacttgtcagtgtgcaccctaatcaggtgagcttggaagtaaggtcttacctttcttgaagctaagagcagacagtatgtcaacttctcaatgagtgggtatgtactttcagcgtcaataagtctcttgctgacatagtacactgggtgttgaacaccgtcttcttctttaattagaactaaacttacaacatattctgttacagccaagtatatgcccaatttctcattgtctagaggctttgataggataggaagttgagatagttatttctttagctcttggaatgttgtctcacacactcaaatttcttctttcctctaagtatgttgaagaaagggaaacatttgtctgtggactttgacacaaaactgcttagtctgcaatacgtccagtcaagctttgtacctcttttatctttgttggcaatttcatgtccaaaaggtcttggatcttctcaaggtttgctttaattcccttggcattcataatgaagccaaggaacttgactgagcctaatcaaaaagagcacttaaggggattgagcttcatgatgtactctcagaggatcttgaagcatttgtttagatcctctacgttccccaagccgttttggacttgactagcatgtcatccacatagacttccatattgcagccaataagatctttgaacattttatttacaagtctttgataagtggcccatgtgttttttatgtcaaaagtcatgactttgtagcagtacaagcccacgtccatcataaaacttgtatgttcttgatttgttgatatattttgattttattgtaccttgaataggcatccatgaagtgtaggatctcatgaccagctgtagtatctaccaatttgtctatcctttgaagtggaagcagtcctttggacatgccttattcaagttagtaaaatcaatgcatactctccacttgttgtttggttagggcaccaagacaagattggatacccagagcaggtagaaagcttcaaggatgaatttgttggtactcggtatttcgacttcatcttttagagcttgtgcttgctctttatcaagtaacctccttttttgttgtacaggtcagaagttgagatctatgttcagggcatgagtcattacggatgtatctattcccaccatgtcttcatgcgaccaggcaaagatgttgaggtttgctcttagaaattttaccaattttgattttatttcttatgttaaacccattccaatcttcaatcttgtaattagaagagtggggtcaatctctacttcttctaacttctctaccattccaaagttgtcagcaggatccctaaagcgaggatctaagtctacctccccatttttggttgtgttgacctcgcttctagccaatgacagtgagtcaaataataaagcaattatgttatataataaaaagagaacaaaaggaataaactaaagtgaacacaagattttaaagaggttcgaccccataagtgtggtaatagcaaactccccttgtattgtatagacttaagagaaggagagaagtgttcttcctcttgaaagctcttacaacgaatctctgagtgtgtttctctcttagatcactattttctctctagaatatctctctgtggcaattctttcgatccctttcatagtgaggctaggtcactatttataggggcttaatacatgagggatggtttccctttcgcttacaatgcacaaaataggaaattacaatgtttctaaaactatgatatatgaaataggaaactagaacaagtttccatttcctctaatcaatcccatgattatagggatcgtcctcatgtctggacacaatgagattattctctgaagtagctatcttttgtaagatgctcggcacaagcactcttccatctggtcggacgtcttctccacaaccctactcagataaccgactattatagatgctgactagtcaggtgcaggctgctagggatatttccctccgcccaggtatcaaaaatatataggacatgtgtggtttgatcatatcgccacgtcaatgtgcaaaaaacttgataacatgctaaacttcattgctttttgtcagacacttagttacagttcttggcaggcatcttttctttcttggctttcgacaaaacaaagttgtaggagtgtcgggcagattattgatctccccttaggcaccctaccccacgccttgttgggaactttaggcctaggtggtaaattaacgtcactgccttcaggttgtatagggctagctgagttatgcctaaagttcccaacacgctaatggtaacgagtatcacttgtcatattagacaggtaattatgtatcaataaatgtttataaacttgtgattacctgagtttaaattgatggtatttgtgcactaatttgttgtattatgttaatattttttttactgagtctttgtgactcacatgtgctatgtggtgcaaataaaagttaaataaaacatttgggcagtcatgagtcagggatcttctttggtaaatgtacacatcagtcgatctgcaagtggagccaagttgtcaagattcatattttttcaatgttctgaactttaaaatgtagttttttgaaataataaatgacatcttttataatattttagaggggattccaaaacataaaagacttatgtcaataaattttatgtttcaaattaattagcaatattttaattaattcataaaatttagttaaatcgttactttattctcattaattgatttataaaactacacacgtggtaatcctaagtgtaatgccccgaccctcaaggacgccacgtgtgtgtgcttttacgaacttattcatagttattatattagtttatgaaaagtggggtttaattaaaaactttttgattaaatcggaataaaacttctttatgaaataccattaaaataaagggatcccctgtttataaaatttctttataacaagttacaaaaccgttcatacaaaaataaagttacactttcccacataaaagaaaagaagttgatcctgcttctcagaagccaagacaccacggctgatatgtacactgttgggagacttctgattcatggcc

SEQ ID NO: 25003 - DNA, 2686 bp, Cannabis sativa
  modified_base (420)..(421): a, c, t, g, unknown or other
  modified_base (2619)..(2639): a, c, t, g, unknown or other
aatattcaacatctattgtcgatataatttcattatatgataatttcctcacatattgacataacttacagagatctctttaaattacatagtttttttaattatttttatcatttataggtacctatatagaaccactttagggattcaattatgatcaaatatgttgtgtctaatttctctaggtagtctcttttagagtaccgtttccattatggttatcatttttaaattatcaatactttataacatttaggtatcttcatgagtccctctagatttaacaacttcaggacaaatcaaagaacatttattaataatttctacattgttcatttacgcttcaggcgttttcaacttattctaactcaactttgaataatattaatttgcagttggtatatatcatttgaactatanngttcttatataatttgtgcaaggatcatttttcaaaaatcatcatcaattccaactgcttctctccccttaggactgaacattttgacaaaatttgacttggacccgacccgctcaacccaaaaattttaaaaaactcgttttgtttgggtgggtcggttcaacccagtacaccatcagacgggtttgcagattggttttttatggtcactaggtttcgagttgaacctgaacccgctcgccaacctggtcactttttattattttctatttttattacatatataatatattaaaaataaaaaaaccttaaaatttaattattttatttttattacaaagataatatattaaaaataacaatatattatattaaatacagttttttaagctatatattatatattgttatactcgaaattgacttgtacttcaaaaagtgacacgtgtcaatctcatagaatgtgaaccaacagatataacaatgattatatctttaaatgcaaaatggaataactcattaaatataaaattaataaagtatattctgggtgttaggtttaaatgggaaggctaatttcttgggacagtctgtttctaagaattcgggagaataaatttcagaaccacattgggacatttctatgagaagagcattcccaattcctaggagaaatttattaaaactagaaacttataaatatggtaaacctaagtttttacctcatataaatcctaaaagtcacccaagaaattaaataacaaattatcgaaccaaaacaaagaagaacgatgatgcaattagttatgactaaaaaatataccaagatggaagagaatgagcaacttactggtgaaagaggtacgtctgcacaggggagaaacttgtatcttggtttgggacaaacgactatacgaactgtagggacgtctgagattgaggattaaatctaaggaaatttgcaggaaatacgtcaatgacaaggtggaggcactaatggtggaaaatagttccttttctgttttatactttgagcttaattactataagattaaaggacagagatccaatggataggagtaagggagaagtggaaaagattgctcattaatgctaatgatgtggtttgaaactataaaccaccaaattcaaaagcatgcattttctcaaattggattatgacgaatataccctctgtaatcatttaaagagcactttttaaggggaaattgttatacccgaaattaggctgtacttcaaaaagtaacacgtgtcaatctcgtggaatgtgtttgtggttagattttgattattggctctgtttatggttgttttaaggcatgaaaatatggtttttatgttcaagattatgatgggaattatgtggattttatctcaaagtttggagcttactttgattgttggtgatctaatcttggatgcatattttactgagaattaaagcttgaatctggtgttcttactctctgttgtaatggctttaatttgttgaagttggttttgagtttaggcttgttcggtgagattttgttatgtttttaggcctgaaattcgaagctgtaattggggttttctaggtttggaacccaggcaccgcggcccgcccctgtgaaatcctaggttttcaacccaggtgccacaacctgcttgggggagtgttgcagcaggcctaactgttagggccttacaatcgtgacaagagagacccaaagaagttctgcatgtatcacaaagatatcgaccatataattttggagtggtagttccttcaagacaaaattgaggaatgaatgagacgagggaagttaaacaagtataaaaagaatggagaagataatccccatgttgataagaacgattctacgaataatgcaagtggctctcaaactccttgcaatattctaaccactattggaggcccacatattggtggagactccaagaagtcacaagaacgaaatgccaaggaggcaagagaaaaactcctcaccaatgtgaccaacctaagtgagcgactagaaaatttattcaagaaagagtgcgatgaaataactttcatggagagtgatgccagatgggtacatcacccccatgctgacgcacttgttatagtcgcaaatatcaaagggaccattgttggaaattattttaccatcttagatctactcacaagtatnnnnnnnnnnnnnnnnnnnnngaactttctaaaacgatgaaatatacacgtataaagtttaagaaacc

SEQ ID NO: 25004 - DNA, 3985 bp, Cannabis sativa
  modified_base (2940)..(2956): a, c, t, g, unknown or other
aaattaatcacaaccatttaatgctgatccaatggctaaaaaaaacgtaaccatgatggttacaataaaaatgtaaccattagaacctcctccatatatatatatatatataaactttgacatattgaagttcatgattagggatcaaagattgtaaacacaacataaaaatcacattggttttagtgaaaaaagttttcttaatttggttctaaaagaaacttcgatcttcaaagtttgtatcatcaaagtatcatataataaaatatgctatatatatgtgtagtgttaattttgattgagatgtggtgattatagtttcttaaatatttataactttgtggtgtaattaagcctttgagtagtgttgatcagtgtttgtttttctctcaaataaataaaacaatcaacatcaatgataacacttaaggataacacatatcaacaaataaaaaaagtattaatagcatatcttttgatcataataatcaatcacacttataaatattatgtaggttgttgatcacaaattagtaaaataaattatataataataattaagaattgtagatatgaaaatcatgggaacatggttgaataggataccccaaatgaataaaagactactcttgataaatttattctggtccacatgccagcaaactattttggaatgaattctacttttcatattatatatcacttttacctaaagtctttcatctatatagattctcccaaactgcatataatattccctcaaatcagaatctctttgattttactccaaaaatgacaatccaatcaaattatttcaatatatcaaattattattttacaccaatttataaatatatagatagagttttttaggtaaaggtattacttttgtctctacggtagagatattttccatttcggtaatttagagaagttataatgtaattttttttatatatacatgtataataattaacttacaaataagatcattagatgagttcacaataattaaaattacaaaataaaaataaacacgcatgcaattagatatttaatactgtaaaattaacaattgctattatataatattaatatactgttatataacaaaaattgtgattatatttaattaccagaaacaagaaatacctactcttatgattgaccacaaaaataaaaatgatacttttaatgacctaaaacactaaaattacactttttataaatgacatttcatcatcatcagggcaataagtcacatgcacatataattatttcttaattgtaaatttttctcatcaggttattatcaatattaatggtatggatactatagaaaatgaaggtagctgtaatattataggaagcttaattaactagtaattgggtgccaaccatgcatatgcatgtgacagtatataaatatatatttgcacataaattttataatagtgggatttggtttaagacatatatgatttcttggtctagaataactcgataaatcataatgggtatctaaaccagtcgtatatatatattaatgttctcattctcttcaagctagtctcaacaagtattgatgctctataccaatatgtcccttaatttaatcataattatcttcattaatagtaccataaattaaccttacgtatcatatatattattcattattatattcggcaaaaaataataataaaaataataatcatatgcatgcatgcatattcatcatttgacaaatatacgtatatatgtataattacaggtaataaaatggaacaatatataggaacatataatttcgtttatatatatgtatgtgtaatgtgtcccatcatgttttactattaataggaagcattatataatatttatgtagataatattctgtgtatttatatatttataggtggcgtataattcccgagaacgattaccaacaattcaccacataattaataataaaagcatataagaataatgcacttgcatttgacacatctatcttagttgcttacaaactgaaaatcacatcgattctacactaatatttataattagtgtacgtacgtataaagagactcaaaataaaagataattaatgctatatacacataattgtgggcaggggcggacccacatggaggcgaggtgggacaatcgcccactctaaaaaaaatcggaaaaaaaatatatatgcattttagttagttacaacaaatatttataaataaaagtgatatctataaatataaaataagctttggtacaatggtaaagttatttaatgcatggtcatgagttctaattctaataaaaacatgtttactttagtatttttattttattttttgaatttctaccaataatacttatatatttaatgtcttaattattgaacctaatatttttattgtttcttttttactttatagtatatttaatactaaaatataaatttgcattaatttttaacatgttatgtaatgttaaaaaaaaaaaatgaaccccctcacttataacaaaaaagtgtcgccccctcaatttaaatcttggatccgccactgattgtgggtaataaatgtgtgtattactctattattataatagccaaatgacaaagttataactaagtactatgttttaagttaacacgattttgatacgacacaattttgctctagctcaacacaaacacgatcgatatgattaaataacgaagctaaaatgtaaatatgtatgatcaatgtataattcaaacgaagatattatgaacaaagagaataagatcaacagtaataaaaattaaaaaggaagaataagagagaattaattaatgaaacaaaacttatcaagagattaggttataagatcggtcacccaattaggttgagaaatgttaaaacattttacttttagtcacaataaaannnnnnnnnnnnnnnnnaaaagttgtgactaattataaatcgtcatttgtggttttagtcataatacttgttgtgactaaaaataaattattgttaactttgtatctaaataatatgttttagtcacaaatagttttttattgtgactagtcacatttaattataaaaaatatatgttgtgactaaaatgttatcactaaattaaagtaattattattttttatagtaaaatcaaatctaatcttttaatttattgccacattgatgttgtcaaaatttgtattcctcctaaataattagttgcttgtgacttttgcactcatggaacaaattttggaattcaagcttttgaattgaaccaattcaagcactaaagtctttctaactcaatatacataaactctcatatattgtaggaaccgtcgttaaatttatcctcaatatcaaacttataggcgacatgtcgctagtactaggtgcgtgtatgctgctttgaagtgcctgattcataatttcaagatttcacaaatcccattctaggcagtacctctcaagcaacatgtcacctagtaccaagcgaaatatcatgcaagcatgttatacatttccaaaaatctcatataattagtcacaaaaattttatgttgtgactaactaaatttaactgtttttaatttctagtgttggacaagtactctttgttttatcccaaacatttggggcaaccttatttactctaaataaatgttgtagactaaatattaacacaattttatttatctaactcaaagtcaaaatccacaatcatatatgtgaatttgtgctaactttttaaagcacatatatatctcaaaggactatagtaccactaatcatttgtacttaatttttttttaactatttgaccaattccaacaattaacagtttaataaaataaatagtactagtgaaaattaggagaggtacaattcccctctaagtacacaagacactacatgtcgatccttaaatataccattacataactatgtttatatatatatat

SEQ ID NO: 25005 - DNA, 2365 bp, Cannabis sativa
  modified_base (395)..(395): a, c, t, g, unknown or other
tttgggcagtttattcgggttggatgatttgtaaattttgttgaatacccctagaaattagggtttctctaaaagaaaatgaagaaagaagaaggagaaagtacaaaaatatatttttttaaaaaataatttatttttaatttaaaaaaacaaaaagaatatttacgtgactaattaaattgtgtcacatgtataatatgtccacataaatagtctaaccaggcaattaataattgaaaatggacgaaaatgactaattgctaatagaataccgatttaaggggttttgctgccaaaaaatgagattttggagttaattgctagtaaaattaaacttttggggattttgccaccattaccctatagttaaaatattattcttgtaaatttttaanaaatttcgaataatttaccatgttgaaaataaatttgaaattttttgaacgtgtggtaaactagaatatgagagattttatttttagtattgtaaactatttaaaaattataaaattaatattgtaattataataaatataaaaaaaaaaaaattattccaaaatgtaattttagatgtaaaaattaattaaggttgtaattaaaaaggagtaatgtgtgtggtcacattactgtagtacaaatttacaactgtttcgttcacaagactagaaagccacaatagcgcaatgcaaagatatgataggtcgcaggtgggccccaattaggtgctttcggaggaagagtgattacgtggactgattcattgtggaattggtggggagagcatagtccactgggaagtacaatgatatatcttctttccagattttgggtaacccacttttttttcttgttttctttttcttgtttttttctcaatcctttaaaacaaaattataattctagtatatcttgttacacatgatacggctggtgaatatctctgaaacataaagacaatcaaattaaatcataagccattttttaaaatgaaaatggaaacccattttgaaaggaggggaagaaaagaaaacgtttcttttagactagactagagttgtaattgattttcttttttggcaaagtggagttgcaattgaataatatgaataaaataattgagctattgacattcggagataccgcaaaatgcagattatacaaacttttcaatgagtagatcaatgcacatataaaagtcatctatttaaatggaaattttgagtgttaaaggtcagatccccacactcgtatagctttctgcatctgagagattaaacaagcactcgagaatcaaaataacacaatcaaaaatgaaagggcacactcgagatatgagaactactacgaggtccccctgtagccattacagccagaaaggaaaaaaaaaaagcaactaaataaatcgttccattcaaggtaacaaatacaaaaaatcaaacgttgcgctcaaataagccacactcttgtatcaacactgaaaaatattgaagaattggtagttcgatgcacaaacacgaagtctactaacacaatcgcccaaaaaaaatcctcatatgtaacatgaaacatatgtaacaagttttaattaacaagaaacttatgtaatcagttttgaattatttttagattaacattattttctcataaccattacaaggaaaaatacaactaaatgaattatttcatctgaggtagtaaacatagaaaatcaaatgttgcgctcaaatgagcagtgctcttatagcaagaagaaggttagaggattagtaatttgatggacgaccacggagcctaccaccacaatcacaaaaaaaactctcatatgtaacacagaacatatgtaactagttttgattgacatggaacatatataatgagttttgaattatttttagattaacactgttttttcaaaaagtgggagacaaaattagaaccaattgtacaatggataaactacacaagcaaagtattcatttaataaatataaaggcaattttatagtgtacaccttaaaaagtttgtttttttttttgttatactctttatctgttttgatatgataattttttagcctaattttttttttatataattatatatattatagttatttagaactacctgtaaatttcaaaaaaataattaaataatttatattataaaaaataaggttaaaatattttgttacacaataactttgttttttatatatatgtggtaagtaattatttaaatttttattttggcacatgtgattctaaaaagagatttttacacctcatgtcaaaattgacaccttttttacatttttatccttacacggttttttaaacatttttaacttttacatttttcaatttta

SEQ ID NO: 25006 - DNA, 5251 bp, Cannabis sativa
  modified_base (2423)..(2430): a, c, t, g, unknown or other
  modified_base (2566)..(2570): a, c, t, g, unknown or other
agggcataaaacccaacaatgccgtcctctggccattccttgaggattaggagttttccattgattaaccacggcctattgtataagatttccacgcagtcatcctcttcatcaaaaaatattccccataggcccttgctaagagtctttatcctccagttgcctttcaatttccatatcttgctgagatatccttcagtctgtttcttgaaacccctactccaccgaagaactttgccaaaacaccagtgttggtaatatcttaagttagttcaaagtctggttcaagctccaaagtcatagagtccaagaactcttttctgagttcttcaacttcctcctctttatcctctgcatcttcttgccattcctgattcgtagcctcattagcagggttttcctgctcgttctatgggccttgttcttgattctctggccccgcttcttcctcattccttctgtcatctgagttgagatcgttgatgttcccatcagccatgttcatctccatcgtggataataactatagcgactttgtttgacgtgtacagaaagtcttttagaatcttaccaaccagaaccgttaaaaccttaaaactgaaggagcaataaaagcttataaaatggtaaaaggtatagataaaatcaccggcaacaatgataagtaattaatgttaagtaataactacagggtgagaaaaacctcacagttggattcccaacactctcatcctagagagaaaaacctcaccgattttttggagaaataatttatgttattttttattgacaaaaattttgacacctaagccaaaagtacacattaattgttgaaagaataaattttacttagtatagccagttttgttaaccggtgggttggcaaagtcttttaataattatttacttggatagtttgataattttatatgtatggtagaaacacaaatatagttttatattacatatagtaatgcattagtgatatatactcatgttatttggtgaatataaaccctccataactaatatagttacattattggtaaatataaatcctgtatgagtaataaatgtagattatttgaaaaaatttagcttacaagaaaaaatataattttatatgagtaatatagagtatgcttagtaaatatcaaattatatgatttaatgttgaaccttttaattttatttatttattatttttttttttttgatcaagaaggaacaacttcattaatcaacaagcaattacaaacaaagcccagctgaggaagaaaaaaccatctgcaaaatcaactaacttttacaaaataaatgctctataaagttcctctcatgtctattcaagctccctcttttagctattattaatctataatacatgatttttttaatatcctgtacaatgcatgtgattgtgctcgagtaaccattaaaaacacaattatttctgttcaaccacaacctgtaaatcgtggctgccatgacagcagtacaaattctgctattcttgtttttgctgctgattaccaaccagattttccaagcctgaaactccttcggccagcccccaactcccaaccacttttgcacctgatctgcaaccttataggagagattacactcaaaaaaatttaaaatttttttagtaattaaaaaattgcacaatatagtattttttatttttaatattattataaataatttatatatttaattaatattatatatactttgaattgcacttagttataacattttgattattataaaactacttacttataatattttatttattattataaataatttaaatgattaaaataattatatttaattaatattatatatttaaaaagtaattgacagtataactatttaaactttaagatttggtacgttatacccagttactaaattgttgggggttaaaccttccaaaatttacgtctattttaattttactacaaaaaaagtgatgagcatataaagtaaatctagaaagtaaagaaagaaaaataaaataacttagaaagaagtttcacaatacttaataatggttcataaaaataagtatctcgttcgatgatcgaagtctatcctcagtgatttgaccactagcactcctagtgcgtactacgccgctagcattacgtctaggtttgaaagatgtcggacatcattctggaacatttttgaggttgaagaaacaaacttattgtttcatgcaatcataaataagcatctcgttcgatgatcgaagtctatcctcagtaatttgaccactttgagttttgtgccctaaataaagcacatttcaatataatcagatttactcattaatataagatcagaaatcacttttatattgcatggttcacatgatttattttatgattatgtttaatgtataaatnnnnnnnngtccagaacatatatatttgttcatgaatacatattccgctgcaactatgtaaggttttcttaatcccttatgtgtttaatttcattattttagagaattcatatttaggatattaattcaacatacttgttagtnnnnntagatcctgataaaatattcctaacagttcgatgatcagagtctatccttagtgatttcaccactttgaccactagcactcgtagtgaatactacgccgctagcattacgtctacgtttgaaagatgttgaacatcatcccagaatatttttgaggttgaagaaacaaccttattgcttcatgcaatcacaaattaataaatgtaaaaaaaaaacattggtgctatttgttctaaaaaaaaatgtaaacaaccttattgtaataaatgtataaatgtaaaaaaaaaatggtaaaattaaaaaattaatataatattagtgctatttgttctaaaaaatacacttttgcaatccaaaataacagtccaacccgataaacaccattacaatctgttatagagggaatttaaaattttataatcctaacttctcacctccaaaattttataatccctccaacttctcataaatactcgacaaagttacataacgtatttggtttggagctaaagtacaaaaagtgatgagtagccttaaactaaagtccaaaaattttcaaaccttaaactacataattatcctaaactatgtaatcaattctttgatattagtgtgttcaattgtaaaaaaatgagtagtctttattatattgatttgcactattttagacacttgttttagtctttgagtgaataaatgagtgatgaattttgagatttttattgagtgaagcttttgggatttttttaagtgaagcaagaaagataatttcagtgggttttgagttttgaatgaaagctcaattagaaagattttttctctttttcctctctcctcctctttcgtttgtctggctctcagcaaagtctctcaggcaagaaatggagggaaatgagtgatggttgtgggtcctccttctcatcatgagggcagtggtggtaacggaggaggaggtggcggtggttgtagtgggggagcttttctcagttcaatgattcagatactaagtcaataaataatggtgttcttggatctaggtttgttaagcaagaaaaatctggaccttgtgatgatgactggaagagctctaaagttgctaaaactgttgatttgttatctttaaaaacaatgccattacaccaaggaagtccaatgttgagatttaattcttttggcctccatgctgatactcgccaacaagaacatatgtttagcttctcttcaaacaaatcacaagtttcttttctcaataaagatactgcgttagtggaaagaacctctcaatactcttgcttttcctttctaccaaagacccccccacctctcaaaattaaaaaagcttttgtcattgttgtttgttggataatttcaaccaagttatattctgtcaaaagaaaattcaatgagagagagaatggaagaatatctaaaagacaaaaacttttttaattttattggagacatcaaacaaaagctattatttaatagctattattttgtccaagaaacaattatattattcaaagacagcacaaaaaacgaaataatataaccggttactcccaattttatgtgaaagccataaatttaaaataataaaaaaataataaaatattatataattctatttgttaatagctctagaatatcaaactgaactaatctaatagctataaactgagatgaggactacatcagggtcctgatttatatatatagatatgtataagtttaagataatactattcttaaagtaataaatatgctatgccaaagccatctgggtgtttcacaaaacaaaaagaaaaataaatgtcattatagaaaattattatatcatcaacatggggttgcaagtgttcttcttttttaccatcaatcatgttagtttcaatatcttatcatatagagaatgctatctttattaaccaagtcaatcgtgtcttctaatgaatcgacattcaactaatggtcactaattaaaagtcatgaaacagactgctctagctgtacggtctccctttcagatgacatagttatctataggttttaattattttgattgggatgttttaagcttacagtattcacttttatttactagttgttcaagaacaaatctaatttcacaactaatgacttcagtgaagactggaatcatttcatttacaccgaaacttaatgtattcttgacccggccttcttaaattctaaaaatgaccccaaaaggaaaagttctcataaagaattttcaatctaaaagaaaatatcaacttagctgcacaagctctataatgcgtttcagccatcttaagacggaaaactggccaattacaattaccacgctagagatgcccatacgactatcattaatcttcgagtcacatagtttgctccaataaaatagagtacaaaatttgtttgaatgaatcattaaactgtagcttccagttgcgaagaatctgtaaaaaaactagcacaagaaaataaaatagttggtgaaaactttttataggttagattaatggttccatgataaaatgaacacaaagaataaaagaaaaaactcaatcaaagagaataaggcgcaaaggatttttaaagaccaaaatattttaaaactagatttgtagggctttaccccgagaggagcccttccagaaattctcgaaggcctaagca

SEQ ID NO: 25007 - DNA, 5182 bp, Cannabis sativa
ttaagaaaatcctacaatgtatgtttttcaaaaaataacttaaacagacaacaaaagtaacattaatatctattcatttaaatggtaatactataaatatttatatatatatatatatatatatacagatatttgaaatcaattcataataagaagaaaaacaaaaaatgaaatggcaatttagagtacaaagaataactgaggtataatactatgaatcttaccaccgacttcaacataccatatcaagtttattataaggctcaagcatgaagcacgtgcataatttgttcaacttcaacattcaagaaccaaagtctaatatatttgattgaatcttcaagaaagggaagactcaattatgaagcacgtgctatattgcctaacagtaatgatgtttttattccaattcaaattttccaaaacactaatcacaacattgcagcctaataaaagttccatgataagagatgtgaccataactatccactgaaattttgcctaccttgcattgtaaaaagagtaaccacacaaacaacaattaagttatgttgcatccagatagaaactatgtctgaaatctcaaaaacttatttttcgtctttttgttgcttttctaaaagaaatctcaaccatgatagaattgtacctttttcatctatgagattagtcgttctgcattgttcatctctgtaaaacttatccatttcttctttctcaatttttagatcttcaaactccttttcacctgccattagtattcgcagattatagtatcgaatatattttagtagtcgaaatctgcagtctcttgttatttataaatggatcagtaatcaaatttagtattgtaagcagcagctatacacgatacaatgcatcatccatgtgtatttgacatccaataacttttgcaagatagagggagcaagaaaactcacgttttttaatagtttcctctgcagtatctaattttaaagacagaccattcattagctgattcaaatcatcaagaacatttgcatttgcagacagtttgccttcaaataactccttatctttctcagctattaaaagaaggaaactacaattagcattctttttctttcaataacattaaactcgtaataaaaacagaataggaaaaacagagctccaaatatattgtatgtaccatcatggacttgactggctaattgctttaaagtttcagagagttgatcgcacagtgctttcgtagaagaaaatttagattctaagccattccacagcttctcatcttctttctgtttcaccttgagtttagcattttcattaaacgcattctgtaacttttcttctaacgcacggatgtgctccatcgattttttcagtttattgttctgcatttaaatagtttattaaatcaccatcagtaatatctacatcactacatcttcagcctcccatagaaaaaaggaagaataccaaaccctaacgatcatacattggtaaaaaattcttgtgtgcgtaatgagacagacattgagcttgatcgaacaaattaaacgaaagcaccgacagacacagggagaaacaaagagaggtaccgccatgtctagatcagtcttcacggaagcttgctctttcaccagtttctctaaaataaaaatatccgacgaaacagtgtaaggaaatttccaaattttcagagaaaatcagccaaacaaccaacaattcccagataaaaatagaacctgcagtgatcttcaaattcgtaaagcttcccgaagatattgaatccgtaggctgccgagaagagaatgagaaggtctttgcagtaccagagaccgatccggtgagcgacttcaaatgatccaagcttctcatggttggaaaccctagcttctgcattttcaaaatttgatcgcatgcaaagaaaaacgagaaagaaaaccttgaaatttgtacggtgagctctgaccccgtagctctgggagtgcgagcattggagtctcagatattaaacgtagttgaaatgaattggcgccaacctgacccgctatttatactctaatacggtcttaaagtactcattattttttctttatttttcttattttttattaatttttttaatattaactattatatagctaatagtataaattaaaataaatataatttttttttaaccatctttgattttttatataactaataatttaataaatatcattatttaactctaaaatttatatatgtatatttatgataatatcatacgtttttttaaacatttttttactttattctttatatttttttcaattacaaatctctatatatattttaaattattttttaaaattttattttttaatttactacttattttctctcttcttctcaatactgatacagatagttagagcctaaaaattagagtttatagaatgtgaaagtctcttaatactaaaaagaatggagaattaataagtcttgatatgatttttattgataagaaggtgattattattttattcatattttccttgtattatttttttaatcatttatcaattattaaatactcatatttaccatttatcctgcagaaaaatctaatgcatgcaacaataagaaaaaatttagtttctaagtttaagaagctattgagtgaatgttctttgtattatctacaaaatttggcaataacatgtcatcctaaaatctctttaattggctctatttgttttctctttcattctctcattattttaattttttattaggtttgtaatttttaattctatcattattgatatgtgtataaatataaagatcaacctctttaattttttctctttttttttttcattttttattcaacttatgtatatatattgattcattaatttatatagctataaatcaaattattaaatatcccttatttaaaatatatttatatatatatatatatatttaagtgatggttcataaataaaaaccgtatgtgtatatatatgccaacatttttttctaaagatatataatctataatctccctcttttatcttaagtcattgttctttctcttcctctctcatcttataagccaatttaaatcgacctaattatgataaccctaaaaggcatatcatcataatatatgtttaattataatttttgctacaactatatatgaattactctttatgattttatttttattgtctttgtattcaggtaccaatatgatttccttccattctctctccttctaaccaatatctatataatgtatatgtaactaatacacatgtatatatgttattggtctttgtagatattttcggtacaacttttttctcattctttccatctatattatttttcacatatatgttatttggtctcttttaaacatgttgttcaaattttcaaacaaaaatattatatatacacaactttttagtctaattaattttgttcaaattcttgaattgctaagtgttgatgcgttgctcgaattatccactgctcggctgggtagacatcttccgtgcaggtgtatgtcgtgccctgttcggaacatctctctcgggcagatatggggaatcagatccacgtgtcaccagcatgtgatgtcacgtcgtagtgcaaaaaatgggataacatttgcccccaagtctgtataggacttccgaagttacgtgtagacttcaattgagccgaccttacatctggatgggtgacacgtgttgaatgcgtctgttcgtgattcgatgtgattctgactaggagtcccttcagttttcggctaattaatgctctgatcaattcgtttctcaagacgcgcctttcactcgcacgcttttgacgattactcttcttcagcacttgattgcttttaatttcccaatatttgctttttggggagaaatcgaagcgtttgaggttttaattaattacaccctttcacaaatctgcttataaatagggtggaaaatcctcataaactacttttccatttttctcactaagcaacttcagagcaaaaatagttttttctctcgagactatcgtgggattctagcagaaagatccgaacagcttcaaagcttcaaacggtgagtaagtttctcatctttctctcctttaatttcgtattttcaattttctcggtttccattgtagaaaatacaattattcttgacttgtcttaggagacatgtagaaaatctaggctcgagacttcgtaatttttactgtaataaatcatatgacttcgttgtttgtgatattttgactttaacctcacactgttcgatcttcactttgcccattcaaggcttaatgaaaattaacccttaattttaaattttcgaactcctgggttacgaacttaacctttacgcatttttcatctttttaattcgtcgggtagacctggtcggtatatttgcctgtttctgttcgatttcccggccaaatactcatctcgtgtattgtcttttgtagatgaaccctggtgagttttggagaggcgaacaccatattgaccaagatcttcttcagcttttatacgaggaccaacctcgtcttcgcgccagtccttcctcttcgagtgacggactctctaactcaagtttcgaagactgggaagtgagtagtgaaagttttcctactccggaacccgaggtgcaacatcacttttactccgagcagattgcaggagaaggctacggacaatttgtttgggagcttaggaaggggtggagacgttatctcccatccaattggacttatatcatccgacctggtgttgttgacactattcctgtaggtcgtccaagctctcgtgccttcggcattccgattgttgttcctcaatacaagaaaaccagcttttgccggcgcattgttacgccggcaaaagtacccttactgcgccggcaaagattatctgggaagctcggtcggtaaaggactttttactggcgcatagagtaactgcgccagtaaaacttccttttaccggcgagaaatcacgtcggtgaaaaataagcgtcggtgttaaaaaatagtcttattcgccatgaacctactttgataagcttttgccggcgcaatacatgcgtcggcaaaactattggcgccaatctgatggttggcgccaatagttttagccattttt

SEQ ID NO: 25008 - DNA, 2386 bp, Cannabis sativa
gcaacgtagaattttttaataccattttagaccatgtttttttacaaaagctatatattggatcttttgcttaattcaatgaaaatttagatattgtatttttaaaatagtacaaaataaacagtgaccttaatttgtgtattttttttttaatataaccaacctgaaacgagtttttgcacgaataattattttaaaaaaattgtaattaatcttgttataacgcctccacatcaggttattgttaagttttaatttgacaaaaattaacctcaaggtctattttgtactattttaaaaaatataaggtttaaattatcaattaacaaaatagaaggtccaattgataatttttaccaaacacgtagtccaaaatagtatagagaaattctataatgcatccccttaaaatggatacatcaatacatctctatttgttttagtatccgaaataatttttcagtgaaattttttctcatggtcatgtaaattataattatttaaggcatcttgcaaaattttaagaaattcagaaaagtttaacacgtcaaaaattgcgttcaagcagtatgttgtatgcgtgattattttgttttatacgcgtgtaaaatagattgtttgaacattattttctatattgtaaaatatacagaatttcttaaaaatttgtaaatagctataacgtacatgaatataaaaaaaaatagactaaattttttttctagatgctaaaacaaatagatggtgcataagtatatcctttttaaggggatgcattgtagaatcactcaatagtatataccataacattaattagataataaaacaaatttttcaatgcacccgctaaaaggggtgcaccgacgcactcatatctgtttcggtattcaaaagaattttttggtctaattttcaattatttatttatttttgttgtgtatgttttagttatttaatacattctttttttttttttgagaaattcaaaaaatttaacatgctaaaaataaagttcaaacaatttgttgcacacgtgtgacttttattttatatgcgtgcggagtagattttttgaacaatattttttatattataaattattttaattttctcaaaattttgcaagatatcttaaataactattataaaaaaaaattggactaattttttttttaatgtcgataaaaagtgcatcgttgcaccttttttagagggcgcattgaagaaaaatataaaaaaaatattcataagcatttttttttttttaaaaaaataataatatatgagaagagacctactaaataaatccaatatgtattttagggtgcttttaccatgtatcccactaaaattagtatattgtacaatccctaactcttttagcttgtgaaaaatctcttagtctaattttacataatggtataggttatgttaaaactatttaagatgttctctaaaatgttgagaaatttgaaataatttacaatatataattcaatgttcaaatagtctattttacacgagtaaaaaataaaaaaaccacgcgtgtaacacattttttgaaccttatatttttaacatgttaaatttttttggatttcatataatcaagacaaagtgaactataacaactattacaaatgtagtaattcagagttgcattctatttattttttaaacagtttgtttgtgaatgtagtttaataaatgaattcaactcgttgagttaatatttgtatgtttaaatgataaatttaacttttcatagtttaaatttattaaatacactctcagtaattatatcagtggtctataactattggccacatcaataatttattttaaaaataaacaacacataattaaaaatgcacatttataattattattaagttaattagctttatatctttatatattttaatttttatatacttcacatctttattttttttttataataatacattcttaattttatttttatttatgaatttgaggtgtcacatgtgtacacttaattatgtacacaccataataaagtttaaaagcaaataaaaacatgttatatatactacaatctcattaatatctaacaatgagatttaacaaatttaactggaattcaaatttatatataaaaaaaaaaaattaagaaagtgttagaatatgaaagtgtatggttaagttatcaaaataggtgagtgtatagtaaggtacatgaggttctatctcaaagccaattagtaatgaaagcagtaccctatacatcttatatagtatttagtttcaacgcattattaatgtgagactctctaacatttttcctcaagatgatggctattttttttcgctcatcaatcttgcacgactcgggcccaccctg

SEQ ID NO: 25009 - DNA, 1686 bp, Cannabis sativa
tatacttggcataataattgtgttaatggcactaatgtcaaagagaggttggattatgctttcaccaataatgcttggccccttgactttggggcagatgaagtcactcacttggatttttttaaatctgatcatcgagcgttaatggtttcagttggcagtgttcttgggagatctcagagacagtataagtctcggtttcaatttgaaaagttatggctgaatgaggatgaagccttggacattatcacttcacattggattaacacaacaactgaccctattctccaaatcaccaataatatttcttgctgctcctctcgccttcaatcgtggaatcgatctaaatttggtgaattaccaaaacaaattcacagtactcagcataaagttgctactcttcaaaactcaactctcactactttcgatcactttgaggagctcaaacattgtgaaaatatccttgatgaactcttggcacaagaagagtactattggaaacaaagatctcgcatgaattggctcaaatcaggggattcaaacacaaagttttttcatcaaaaggccaataatcgacagaagaataatgctatcaagaaattaatggatgatcatggtgtcgaacatacttcccaatcagcaattgctaatgttgttcagtcctatttccagaatatctacgctactgagggtgtagataatgaagctttgcaatcggtctgctccaacatccagtgtaccgtttccgagttagatagcagagctcttaaccaaccatttactgttgaagaggtctttgaagccttaaaatctatgaactcagatggcagcccaggaatagatggtatggctgttatgttttacacaacttattgggccattgttggtgatctagttacccgtactgttcttaaagttctcaatgaaggtggtgacccaacaagcttcaatcaaactctcattacactcatttctaaggttaagaagccaaccaatatgtctcagcttcgacccattagcctgtgtaatgttctctataaattggtgtccaagtctatagttctgaggctgaaaccgtatctttcccaagtcatatcggattcacaaagtgcatttctctcttctagattgattacggataatgtattggttgcatttgaattaatacattcactgaaacacttgaaaagagggaaagaaggctactctgccattaagctggatatgagtaaggcatttgatagggtggaatggcattttgtttatggaatgttaattgctatggggtttccagtcacaatagttaatctgattcatcgctgcatttctagtgtttcttactcttttctcatcaatggttcaattcatggacatttgtttcccactcgaggcatacgtcaaggtgatccactatcgccatatttattcatcatatgtgctgaaggactctctcggctgttacagtctgaagaaggcagtggtaatctctcaggattgcgtgttgcaaggggtgcacccgcaatctctcacttattttttgctgatgacagtctagttctttgcaaagctaatgtccgttctgctgaagctatcaaacattctctaacaacctactgccgtgcctttggtcagcaactcaatgcaacaaaatctgttctctctttttctccaaacacggttccacaa

SEQ ID NO: 25010 - DNA, 2116 bp, Cannabis sativa
aagacaatttattgttttttttttttggactgtatatggattataagttaggacaataattgtgttttttttttttttctgaagtgtatgttttttctcagcttgaaacagagtttttcaaaagatcattgaaagaaactacttttagcttatataaagaggtactgaaatagtcatggaccatgggaaggactatggatggaatggtcatagaccatgggaaaaactatagagaaaatgttaagatgtttatacatgtatgtgattttggattttattctgcacatcacacatcaaattccatttaagcagtatttgagggtgaaaagaaatccagtatttgattaaaaatttaaagaaaaaagaaaaaaacttgaatggggaacatttaataaaataacacgtggacaatatttttatctgtacatagagatgttttttctaatccacccaagtactatccaatactttattaatataatagccatgcaaaataatggaaagaatcaaatctcacaatattattcaaaccaaaccagatacacaagaacagttctcaaacaaaatacatttcaaatattatgaacatgtagaaaaatgacatatttccaacatgtaatttggaacttcatctcattctacctaattaactacaattgacacacttctacgacttttctagtaactgagacttagtcaaaagcaggcttttacaacttttctagcaaaaaataaacaacagaacagagcataataacatgataagcagattatctaagcaaatattaaacaaacgcttaagaaatgaaactatcaacactttgaaatttcacatgagagtcgggccaatctcagttcctcaaaaaaggcctccaaatccatataagaggagccaccttcttctattgctcttttggccatttcagcaaatcctttggctttacttctcatttcttcggcttcttctcccttcataacctttctcaacgcactctctaacttttccctcttgacaaaatcgcccccacatctcgaccatttattaacaccaacttcaatcccaatcccaagaatttgagtcaccaacttctcattgtagaattgctctgctgaaacaggccatgccaccatcggcagccctgcacacactccttcaagaatcgagttccaaccacaatgagttacaaatcctccaaccgcttcatgaccaagaatcaaaacttgtggtgcccatcctcttattataagtccttttccttccattctttcctcaaatccttctagtaaccactcttctttaatcccttcttgtttttcttttctcacaacccaaatgaattcttgccctgaaccctctaaagccattcctatctccatgagttgtttgtcttcgaacgttgtcaaactcccaaaacatacgtaaacaactgaattgggtttcttggaatcaagccactttaaccaaacttgtttgtcaatggaggattccattcctctattccctgtttctttaggattcattcctttactgtttaagaacaagggaccaatgtgccatgacttgatgcctaaaacgttagtataatgatctgcataagcaggttctagctcatagaagctattaacaagaaccccattgcacctcatttcatcttcatgtatatccttaaagagctttatgaattcgggttccacatcttctttataaaaatcagccaccctgcttgctgtgaattcgatcttatctggcaaatttggaataatgaatgtttcgtattcagaggatactttcgtatgaggctcataccgtatcatactagtacaagcacaaagagaaaaataacaagtcccatgaaacataaaccttggaataccaaactttgcagcaacatcagtagcccaaggaaataacatatcagctattagcccatctggacggtgtcgttttataagttgttctatttgtggtccaagcattggaagagcttgaaaaaactttgaaaccatctcaggtgttgtagccatgtgtaagctttcgattccttctgggagtccaacctcataagttggaatgttaatggtgagaacatcaatttgggtggctgaatcagtgttt

SEQ ID NO: 25011 - DNA, 1229 bp, Cannabis sativa
tgtcactcccaaaagcagcactcaatacattgactcatatgcccttttcacttagagttcgtttggtacaccatattgtattgtatagtattattgaattgtattttatgtaagtaaaactatatgtggtattaattaacttttattggcatatacatatataatattttagtacaaattaaaatttaacatggtattctataaaaatatgatatataatccaatttaatataatacaatacaatatgatctaatacagcgtattaaagtaaccaaacgagtcgttaatctcttaaattatattttactatctgggagcctaacatataaccaactaatggactgatttgagctaattttagtttatgtacgatgagaagtagaatagctgtttgtagaattgaaagattttctatgaagaagaaggataagagttgtatactatagtgaatttgcattgtcaattgtggatttcactttgaaaatattttgtttgtagaatttggtcttaacctaaatagttgagagatttttattgttttaagaccaattgctatttggatcagtgctcaatatgtcagaaattcacccttgcttcattttgaaaccgaaattttgccatgatttaagaatctatatcgaatcacaattttgcatattcagttttgttctgcttatccacaccaccattgttgatattttgttgggttggtatcataacaggagcaacgttgttacagaagacataaacaagctttttgtcaaaaagcaagtggaaccttcatcgaagtaggtggtaaccaacaatgattgtagtctagtgtttggataataacacatttcatgaacgaatctcaacttgttaagagactagtagaatgtaaaagctatgtagcaattgcattctacaatggttttagttaatgagattgttaaagtagaatttacaactttaaacaagtactattggattgaaagtagtcaatgcagttttggtagtttttgtgtacagtttccatttttaattgtcctgcaatttattgttctctatatcggattctcacattgatgtgggatgtgggatactctacttccctggttatagcaaataaaggatcaaatatctctaaattattgttaaattgttgagttttatccttaccattacataattgttgtctcgaatttcaaatgaagggacacaatttggcagttgtaatagttcggga

SEQ ID NO: 25012 - DNA, 4464 bp, Cannabis sativa
ataccttaaattgaaattctggaacgaaaccctaatacctcttgatcataccaacttaaaccttcttaaattactctgaattacagtctggaaaaatacctcgaacaaaaatcaaactcgaggagaaaacccgagatttccccctgctggccaaactggtcgatcggtttgctagttgcctagaaaataagtcaaccaattttctgggcagccatggggacctctggttttccaccccaagaactgatcgaaccttcaccaaacctgctcaaactttccagaatagtataataaccataatacaacatgtctcaagcttcaaaacacaacaactcaatcatttactcaaaatcacacattaaagtgaagaaaactcaatcttgacttcatcaatccaaactcaattcaagcagccatggaaacctctcaaaaaatctctaacatactcaaaagcctagcctaaacataacccaaactcaatttaagtcctacaacaacgaagaagcaaaaccctacttcaaaaccaacttaaaacctagagttttcaatccaaaaggttgagaacttacctcaaaactcttctaggctagcttggggcaagaactagctttaaaaggaaggagactcgctgaagaaaatccttttagcttgctggttttagggcttgcacgaagaggaagaagagaaggagaagcttggtttgattccttgctttgtaagttatctcattaaataagtttcctttttcccttttttttttaaaaaaaaaataatggtcagccctaaaaagtcaaaagggcaaaattcaataattactaaaagactaatctacccctcaaaatttttttaaaataacctagggatattttggtaattttcctaacccattaaactgtcattttaaaaattctaacctagtccggaatatcttcaaaataattctcccattaatatcatgatatttctcactacattgctaaatttcaacagtcgccgggtccgataaaatattttcatttcaataatagaatcctcgatacccacatatctcaatataatctccgtaattaataaattacgtttggtataatcattcaataaatccttactaattaccctaagtaagatcataatctaacttcgttacaaaaataattacatatttaataaaatatgtttatttaaatatcattttatttttccgagatattacacaaggctttttatgggtgaaataggctccaagggcctagaatgagaagcttaaaaatgctctctttcaatgtgggttttcaagcctctaagtctgatacttctctctttattcgtgggataagtaactctctagtttatctcttgatttatgaagatgatattctcttgacaggaccaaatactgccctcatatctcaacttatctctgatgtgaatacaaagcttttacattgaaagacttgggactagttcactattttcttagtgtagaagtttatagagatgccacaggtatgaacttaagtcaaagcaagtatattcatacatggctacacatgaatggagcgaagagttatcctaatcccactagctccacaaccaaactcaagtctcacagatttggaaccgtttgaagatatcacactatatattgaagcattgtaggtgttttatattggtttatggttgtgtccaacgaattctctgtccttacaatattaagtgatgccaattgggtaagttgtatagattatcgaagatcaactggtgattgtgttatgtttctaggcagcaatctcatatccttggtctgccaaaatcaacaagtttttgctcgtgcaagcacaaagagtgaattttgagccttggctcatgctgctgctgaagtcaaatagatcacctttctcttatctgaaatttaaattcctcttgctcagactcctattctttgggtcaataacaaaagtgccacctctttaattgctaaccatgtgtttcatgcaccctgcaaacacataaagatagatctccattattttcgagatcaaatgctggcaagaccactctaagttcgctatacgtacaatctttggatcaagttgcatatgctctcaccaaaatttgactacagacaaatttaactatatgaaaatcaaacttcatatggctacctagtcattccatttgagggaggatgtagactacttaactaattgttcagattaaatagttagcagttagtaattttttcctattaaccaatacgttcttaataattaacagattttaagtataatcgaaaaatatttagtacaagcaaaatataaagagattgccttagaagtatcaaaagtctcaaaagaatgttaagttgatagtttcatatttggcagtactattttaatttaatcaatataagtaaaaggtattgagctaatcaattggttaagctttatttggcaatttgttattcttctctcttttcttggtttgtacctcttgttttgtaccttgaccattgccattgattggcttctacaaagaaagacaatctattatctatctctttgatgtaatactttagtataattttctcttattttttctaataatgccataaaactaaataccttattaattaatattgatatgtacatatctcaaataattgacaaaacacaaaatatatgttctaaaaatataaataattattataacttgtaacatatatgaataaaagtgaaaaataaaaagtcctcaagtataacatttcagtcaataaaagtatacaaatgaatggactaatatataggatggtttagaaaaaaaaaaaaattattttgattcaagattcgatttagatatctttcaaataagtcaattaattattactgaaaaatcatcaattaattatctaaaaaaattgatatatatatactaagttattattatgtacattgcaatttgcatatatatatatatatatttagttatatttttagtttttatttttattatgtgtatttttaaaatgttataaattaaatgaaactacttattaattttttaaatttttttaaagaaatcatttaaagaaaataaataaaaagtttaagaatatatattaaaattgaccatatactaatattattaaaaataatcatattacaaataatatattaatagttatatatatttaaattaatttaacatttgtattgtaattaatttaaaacaaataatatttatatttatatatatttaaaataatcaaaaatgtaatattaatatttatgtatatttataaaattaataccgttcgattttatattctcttaaactaacgaacatctatagtcactttatttataaaaatatatatcatgaggttcatatttatatattgactatccatttaactaagaaaatgatatatataatgtaattaccaaaaatgcagactccaaactgcacacttaatcttaatttaagtactctatcccttagtccaaaagtaattaaatataaataaattgtatcctcagcaaattattttatatagatataatacattaatgtatttgtcatatatacttcaataggataagaccattcactaccgtgtactcaaggtagagattaatacaaagcctccttagaagtcataaaataaaaatattaaaattaattatagtttataaataataaattataattacttattaattaaatcatgttaaaaataataaatagtaaaaggcgtggttggatttgtcatcattattcatcaacaataaccactccactgtctctgtcgtagatgaagtcattaggtgcatcatcgcccaatccaacggtctagaatcaatcttgttgtcattttctttctccaatttaaattttagcttcaaagtagtgatcaaatatatctaaaatgtcccaagcaaaagcaaaacaagtcatttaggtgatcaataaagacccaaatacaagcctcttgtagctatcactttattgccccacggtttcatcttaacttaatatttttaccctttcaaccttcatgaaaaaaaatacccttaaacaaataggtttagttacataaaattaattagataatgaaaagaattgatcacacttcatgattcatactatatattcatttacttggttaatatcttgtgtaatgcatgttttatatctttagtttttatttgtgttatgtatatttttagttgtataattaatattttttttttgtgtggagtattattgaataaatattattttttattaaaaatatttaatttaagtgctatttataaaaagaaaatattataataatatttaaaatttatcattaattataattttagtatcaatatactattagttttataatactttttattttttagaaatatcatacactttcttttaaataataatgactaaggtaaagaaagatat

SEQ ID NO: 25013 - DNA, 2119 bp, Cannabis sativa
ttttattgaaagtatataaaaattatattaaatatataaataaaaatataaaaaattattaattatattaatgaatggcaaaaaggtaaattaaaagtaatctttattgtagtgtaaaatttagtccatattatattttagaccaaatttgatacaatgttaacgtattaatttaaaccatattatatattattataaagtttaattttataaatataattaaaatatacatatacaaatgatcttataatgtaaaaaataaacaaacacactcatcttcaatccgaaaattccgaatattaagttataatagagactaatatgagagtgactatattaatttgggacactattctttggtgagttgaaaaaaaaaatacaaaaagaaaagatatttctttgttttctatttagtattggaaaagagttgaaatatacgaagatatttgtcaaattattatattatatttccttttggaaaatatcattttattaaccaccaaattcaattaccaaattagatagtaaatcaactgagtctaaattaaaactacaatcaagataaaataagaaagctctaacaaaattatagccactttattagctaattatttaataaaaaagacagaaacattccttaatttttttaataaagccttacaaatattaatcatttgacccaaacatgaaaatcataacaactaaactatgcaaggtttggatgacagataaacaatcagtttcaagtatagcatggtgtagttgatttttcttaatctaattcaaaacttctttaaaccccaaagcttcaatatattctggtgtagtcgagccattaaaaagtttagtaccaccttctaaaaatataccttgttcatttcgaaccacaaaacctatcccaaattaattagtctcgaaaaatataacggtgtccacattaactttaatgctattttcatgtagtggttctccaaagtaaccatggccttttctaagttattataataaacttttctaagttgttattataataaacttttctaagttgttattataataaacagttggatttatttagtgaaacattttaatttattaaattgaatgttaggtagaaaattatatgtgctttaatgctaatatattttcgactattatttgtgcttgcccatacgtattaatgatacattattttttttgacaatattaatgtatattttttttaaaaaaattacagttttgacacaaatttaatagaacattgtcaatagtaattaatacaaaatttaatatgatggtattttagaaccttttataataataattcaattattaaaatggatgaatccttccaaaagagggagagatgagattgagatatggtggggcttggagcaatactgcacccttccatttctcatatccattcgtgtcatactatgcataactccccatctttaatcagacttcgtgtcattacaaaggatatcattcgggatagtagatacttctaccataccgttaaaattgtttgcaaagttagttttttttatcaataaattctttatcaaaaccaaaaaataacgaaataatgaaattattttaatttaatttatgatgcattattgtatttttgagatatggcctaaaatatgcaatcccaatcattttagctttaaaaggtataaatttcataccctaatcatggctttttttttatgaaacaagcattgtgacactttgatgaagtgatataagcaaattttggaaacacgtcatttttgcttaaaagtagcacaaaaaccatggtacaagtagatcaaggaatatataaatatatatatatatttatgagtattattattggatactagtggtgtctaatacttttagacatgtcgccttgtgattgactagtaatattctttaaaaattattacattaaattatatgagattcgatacttagttaaattaataacaatactaagtaccacaagtatctttcaacatttctctatatttcaaaaggctaattataatttttgcctcttaaattttgacatgtattaaatcatgtcctctgaacttttaaagtcgttaaaaatgctccttgaatt

SEQ ID NO: 25014 - DNA, 2259 bp, Cannabis sativa
catcattgacatgctcatttacatccgaaagaagttagctaaggaggactttatttttttcatcattatgtcttggctgatttggaatcgaagaaacaagaaagggcttaatcatcatgtttcctcacaagagtcttggataaattgggctcaaatggaagctgactatctaatgcaccatgaccctacgttggacagacgcaaactcactaacccaatgcagcatctcggctgggagccgccccctttgaacattttctgcattaatagtgatgctagtgtgcattgtacagaggctaaaatagggctgggagtggtaataaggaccaacaaaagtgaggttactgctgctgcaactcaatataattcaggggtgttctcaattgagttggctgaagctcttgcaatacaaatggggatctccttggctgtccaactctcagctatccctttcatcattcaatcagattgtcttcgggtagtcgagtatatcaaagggaagctccaagctaaatccgattggggggctctgcttgatgaaatgagagaagctcctgagtttgctcactgccaggcagtgattcacaccagcaggaacagcaacatggttgctcattctttggccaaattggctatttcttctaagtgtaataagttgtggaaagggaattacccttattgtgcatctacctatataatggcagatttgcctaaacttttgtagctgtttttgattaaatatacatattgtgcatttgcctatataatggaaaggtactttaactgatgatgacatattaaaaaagtattcttttaggccccctcctaatccagcagataatggcatacttacaactattatggccaacattgggcctacttatgatcaaatggtggacaaggcccatgttgagctttgtcaatctagacagccacataaacaccctgagcccacccactttccttggcccatttatgctgaagaaattggattggctgaagaattaatgggcccagcacctgttgataagatggaaccaattcctacccttttccatgggccagttgacgtttcagacctagtacatcactgccctcaaccacgcaaacgaaaggccaacttaaccttgatcccatatgtccaacatacagaagaaaacacaattgagttcacaactgaagtacctgatctccctaaattttctccggctcccaataccccttttaagatgggttctggtgcttcatcctcatctctgaaaaacgataagcgtaggaggaaaggttctcgatcaaagaagtccgtggcaatggatactagcaatcgtgatacacaatccatctctgaagccggtactgcttctttgatcaggttggttctccaaaaaatctcattgattcccttaatttagttgaagttcatgttgaaagctctcaaaattttcttacgggcgaggaggcggcccttattaagcccccccaagccccatgaagtgcctttcgtggaattgtcggggcctccctagagacccgactccccaagctatttcagcttgggtaagtaggtacaaggtagactatgtttttctaatggaaacgaaagtaagcaagaataatatggaagagttatcgaggaagttagggttttcaagaattatgtgtgtgagtgccaacggtttggctggtggatcttgtttgatgtggaataacaacataaatttggtggttaactattattctgagggattttttgaggctacggtttgggatttccaaaaccaattacattggaaattatttgcaatctatggaacgccttacctgaatgcaaaagagactttttggaaaagtatggaggtggaattctcttcttgtcaacttccttgggtgttgataggtgattgtattggtagtcaagaagaaaaagtaggtggcagaaaagtgtcttctgtggataccaaatggctgagaaatttcatggacagcacgggtggaatcgatttacagttcataggaaataaattcacttggcaaaataataggttctctgggggacttattagatagagacttgatagagctttatgctcaccagattggattctggaatatgcatctgctggggtgagaaatctgcctattgcggtatcggaccatgctcccattatttttgattcacacttattttcagcaaggggtttcattccttttcgattctatgaagcttggtcttgggaagagtcttgcaagaaggaaatt

SEQ ID NO: 25015 - DNA, 2909 bp, Cannabis sativa
ttaaaaacacatttagtcacaatataggaatgataatttataattagtaagaactttttcacttttaattacaaattttattgtgattaaaagtaagattttttgtagtggttacctgttattctgtttctatgtgtatgttcggtatgtgttgaatgttgagccaatcttctcctgttccttccttgcaccgaggaactaacagcggacaatatctaatggtcatagcaataagattcttggccagtccttcttctggcaagcactgtaggttcgtcaagctattcagacacaatcgttgaagagaggtaaggtggtgaaaacccttgccgtttagagttgtaagcttatcaaatctaccaataagaagatgagttaaactgtgtgggagtaaccattcttctggaaaggaatccactgctcctacataagttccaagatctaaccgatttagcaatggaagtctttgtaaattccatttcatgcgattctctatgagcatattgcatgatgagataattagaaattttgtaataaagggcaacaatcccatttttgaaaatgactccaatcttgaacaacgatgtatgcttaacttttcaagggagggatatgcaatgtcaacaagagtactacttgatggaaatatagtcaccaattcatcacaatctaaaatgtggatctcttccaaagaaggaaaattacctttaggcaatgccacatttaaattcccacaagtttgtaagaataatttcttcaaacaaggaaaaatctcacacttttggtcatatgtattggtaaatgaccaatccaatgtagttattccaacaagctctaatctttctaagagtggaaatggcttattcagaaaaatgctgcgaatttccaaacaggaaatatgaagatatcttagtgaaattagtggttgaaatgataacaacgacaagcaacaatttttgcattgcagataaacttttttcaaattagagtacgatggatgtgttatccaacctggtaagtttgtgcctttatacccgcgtacttcaagtttcttcaaattttcgtgtggttggagtgcattaagtacttctctttcctttatcgaatcatctgcttcaccattccaactcaaaataagctcactcagatgttttttgttcttcaacttggcttccaaagcatcaatcacttccttcacatattcaagtcctgaaatatgcaagcttccgcgtagattctccagcttacccagctcttggatcctagatccatcacttttgcacaagacaaaatcgctcaatgtctgaagattcaccatactacaaattctcggtggcatctcttttaatgaagttcctccaatcataagatggcgcaagtgtatcaacttagaaagggtgataggtaattgtgtgagttcagagcaattgttcaacaacaaagtttccaaattgtacaatacacaaattgaagtaggtaattctttgattgatgtgtgacttacatccaaatacctaagatgttttaaatttccaattgaattagacaactctttgatagaagattctaacaaagaaagtgctcttaagcatcctccatctctgagaacaatgtcatgtgttaatcttgttttggagaatgtgtatacagctgacaatggtaaagccaacaagctacgcaaatactccactctagagaagttttcaaattttatgctgtcttttatgtctttcatgtaagatagatggcgagtcttgctattaggcttgtaaaagtctttaaaactatcagaatcaatgcaattcttaccggatatgtacaatgctagatcatgcataagatcgtgcatgaagagagcagatcgacttcgtctagatctttgaagaaaggatcttgaaatcaaagcattgaagtagccttctccaacaacctcaattctttttccgttttgaggttgcaaaagaccttctgccatccacattaaaattagtttttccttatcaacatcacgaaattcgtaatctttgggaaatatcgaaagatatgaaaaacatggctttaaataaggaggcaaaaatctgtaacttaaccacaatgctcgaaaaacttcaatgttgtgagaattgggcaactcccacacattactttgcagtacatgtctccactcgtcaacagtggacatagatcgtaaaagtctagccatcgatttcacagctaaaggaaggcccttacacttcttaacaatttgtcttccaatttcttgcaactcacacaataccacctcattagtatctacatgatcaaaggcatgctctgcaaacaacttccaacattcgccgtcagtcatgattttaagcttgtaagtttgaacatctctcgtcttcattttcaatgcgacatcttcattacgtgtggtgacaataatcttgcttcctcgtgcaccagattgaaaagagcttttcaaaagatcccacaactcgtaattctcattccacacatcatcatgaacaaaaagaaatttcttcccagccaaagaatccttcaagtctttctgaatttgatgtagctcgttcgtttcacatctttttccaacgatcttctccaaaataagtttggctattttaagaacatcaaagtcatcagatacagttacccatactttcaaagaaaagtgttcttggacagtgttatcgttatatacgttctgaacaagagtagttttgccaattccacctatcccaactatgggaataactgagatcctatgatcaacatcttcatcatcacaagacaataacttaagaatagcttctttatcatcctctcttccataaacttgtgaatcatctaacaaaggggcatgtggtctatgtaatgttgttttttgatcaactttttttaaaccaagg

SEQ ID NO: 25016 - DNA, 4245 bp, Cannabis sativa
gcagacctctacagttcgggaactgaagtccctgatcttttcccgctctccggattttgtttttcttaccgagctcaaagtggatgctaatcctctggtacgtacactcaagtccttgcacttttactttaatatctgtgttcctcctattggtaatgcgggtggtattattctggcttggaagtcgggttttagttttgaatgtatctcttgttcgcgaaatcatatctcggggattgtttattcggaccccccctcgttcccttggctcctctcgtgtgtttatggccccccctatttgcatgctaagaaaaattctggtctgagtttttgaaattaggagatagatttggcgggccttggcttattatgggagataccaattttgttctttgtgattctgaacgagaaggctcgtctggccgggatccgtttattccaatcatttctaatctaatcgagagtaaaggacttatcaatatgcctattcaaggtgacaagttaacctgggataatcaccggtctgggaggcaccatgtgaaatctgcgctggataaaggccttgttaatggggcttggattaatttatttccgaaggctattctctgctcagttcaaactagcaattcggatcatagaccattgtgcctcctctttgggggtctggaacctaaatttaaaaaatgctttaagtttgaagaaggttggacccgtgacgttcgaagtaagctagtggtagcccatgcttggaaatctactcatcatgattgggcccctgctcgtatctttaagaaggttggggccaccagggtggccctccttaactggaatcgcgctcaattcggaaaattagacgtggtcataaaagagcttgaaaataagcttaactctcttcagagtctcccggcggggtctcgggactggatccaggaacgtgatacccgtcgagatctgaatgaaatgctagaaagaaaagcgatctactggaagcaaagagctagggtgtcttggctgaaggatggagataaatgttctaagtttttcttcctctcggccgctattaagggaagaaggaatgctattgagagcattttggataaagataatgtctggatctcaggccgggaagctattgggaaagaatttattgatttttttaagggtatctttgctggaactgataatggtgtggaatataactgtgctcacttatttcctcaaaaaatctcccaagaggactcggaggtccttcttagctgccctagtgcagatgaaatcaaaagagccctcttcgccatgaataaccataaggctccgggtcccgatggaatgtctgttcttttctataaacattattgggagtttgttggagttgatttttgtgaagcggtctcagattttttcatttctgggattatgcatagagggataaatgccaccaatgttgtccttattcctaaggttcaaaaccctacccgaaccaatcatttcaggcccatctctctgtgtaatgtggtgtacaaagtaatctctaagattctagcgaacaagataaaaccccttctcccctcgcttatctgtccaactcaagcggcctttgttccggggcggaatatccacgacaacaatgttatagtccaagaaatcattcactcgttcaataggaagaaaggcaaggagggtctctttgctataaaaattgatctagtcaaagcttatgataagctgagctggagattcattgatcatgtcttggattgctacggaatcccccaaaaattccggctttggatctctcagtgcgtctccactacttctttaaatatctgccttaatgggggtcaggttggaaagattaacccgtcttgtggtattcgacagggcgatcccctttccccttatctcttcatttgggcagctgaagtcctctctcgattatttaatgatgcccttgatcaggggtctattaagggagttcagctaagtagaggtggacccgtcctctctcacattttctttgcggatgacctaattctggttggtcgagctaatttacgtgaggtgaatggattctggagatgcttagagaatttttgctcgtggtctggtcaacaggtgaataagctcaaaacgtctattttctttagtaagaatacccctttaagactgggagaagaaatcaaggaagctttgggaattgattatcctgagggatgcattaaatacttgggcctgcccctgtttagatccagacaaaaggatgctgatttcaactttatccttgacaaccttaccgcaaagctccagggttggaaggctaaaactctttccaaagcaggccgagctactctgattaagtcagtgggcttggccatgcctatgtatgcgatgcaaacttcgaaactctctactagaatggtaaacaaaattgatggaatggttagagatttttggtggggttttgagaaaggaaatcatggtattcatcttaaggcttgggataaactttgtcttcctaaatctttgggtggtcttggattcagaaaaactaaggagatgaatcaggcatttctggcaaaatggggttggaatatcttgaatggaagccaatctttgtgttgtcgagttcttaaagccaaatacctcaaagggaaggatttccttagctgcagatacaaagattcagattcttggttttggaagagtgtggtgaaggcaacatccattctgaggaaaggagcttgtaagttggtcgctaatggggaaaacacgaagatctggggtgatccctggattccgcatagaaaagggttcctcccgcaacctctccagggtaacccttccaacttgaactgtgtagctgaccttatgctaagtaatgggaagtgggatattcaaaagctgcgaagcatatttgactgtgaaacggtctcagacattcttaaaggaggcaatccctctgggattggtaccgatagatgggtttggacgcttgagaggaaggggtgtttctccactaaatcggcgtatctggctcaagctttggaaagagctcctcactgtgaggttgctccgaaactctggaataagctttggaatagcaaaattctagagcgtcacaaggttctgtggtggagcatcctttcgaatgccctccctgttcgagcggttattgggaatagattccacatagaggatactagctgccctttatgcggaatgggggaagaatcctttgaacatcttttcctatcctgtgatttagcttttcacctttggcgatcttctccctggggcattttcccagtgtgtgatactggcatccgtgtttgggactgggtcaagtttatctgggatttaaataaaagagggattgaagctaacgatgttttcttgtatgcctcgattgtggtggatactatttggagagtgcgaaatgagaaggtccataataactgttctcctgacataataaaatgtattgacaatatttgtacttcttatgcagattaccatgcttctttgctgcctagtcccagtcttgatctaaccgaagcttggtcccctcctcctccggagtggattaagttgaattgcgatgtcaaagtgggactcaatagtatgtgcattgctgttgtggcaaggaatcatcttggcagtgtgattagagttcagacggctcgggaagacttctcggatgctctgtgcggagaagctgcggcctgctgcttagctgtgtctgttgctttagatatcagatccaaatttgctatagtggagaatgactcgaagatggttatcaacgcacttaatgggattgactctcattgggctattgaaaactatgtctctttttgtactaattcttctcctttatttattagttgtaacttttcttatgttcgcagaacttgtaactttgccgctcataatgtggctagatgggcatatgctcataaggtgtttggggctatcccgattgcctctctacctgacaatatattgtgtaacgaccgtgaggtctaacttatttgattttatgaattaaaacgctttttctcaaaaaaaaaaaaaatcgtccaaaattaaatataatatcaaaattttaatcaatacttttatttctattttggttgtttatatatatgggtccggttttaatagaaaccgaaatatatacccactgatggaaccctcatttttaacccttagatcttaatctaatggttgataattgctgactag

SEQ ID NO: 25017 - DNA, 2950 bp, Cannabis sativa
  modified_base (1708)..(1711): a, c, t, g, unknown or other
ttaaaccagataaaccaagaagtgcaaagaaaaaactctacgtcttttttggttagagatgtgtatatcatatcagcaatatcatgaaacataatttcagaagagcaagaaaaaatgtagggataaaattgcgtacctttccagactcttctaatgctctccctttttgtatatgtataaatgcattttatctgattaatttgaggcaattacattgtgtacacactttaccttaaatgttttagtttttatctttattattatattctttgatatatatctacttttataaatgatatccctattatatcccttaagttaatgaatattatgtgctagacttaagtggagggtgagggtatattgagcaacccactcacaaaagtaagtacattttaataaaatataatatgagggtattttttattaatagatacaaaaaagaagtattcattaacttattctgattaataaagtgaatgagagttttcccactctaatatggtatcagatatataaccctaaattcaaagatggttcaaactcgaggtaatctcaaattctcaccagccatcgtctccaccactcttctgctcctcttcgctactgcttctcttccgatcatcgtcttgaccgctcctcctgtcaccattgtcatgacttcggtcccttccattgggacatcaactagacataccacatacatatttgaggcatcaaaatcagaataaaagtagatttttgagcacccgggcaccaaggccccgagcacacaacgcttaggttgacaatctgtcaatctgggtgccttccaagtatcagatcagagatctgacctttgtattttattcgtcatcatcaaattaaacatggtgaaataggtcctttcggagaaaaaaataacaatttctcgatacaaaaaatagggcccaccgcccaggttggcattttgtcaaactaggccatttgaaatggagtttttcaagaattctttcgagcatcttatccaaaatagaaaacattgagattcaactatttgtaaggatcacacgaaattttgggagggccagaactaggacccagtgcccaggttgatttattttcaaccttggctatttctgatccagttcatcaaaatgtgttctgggcatctttttcgtcaacagaaatcacgaagattcaagcaaacttaaggaggaaaccataaacctaagaccctggaaacatgacccaatgcccaggttgacctggtgttgggcccagcgcctaggttgacaatcaacctaagacactgccttcaattgctcaaatgtcaaattcgatgtgaccattgaatccagaatggtaaaaaacagagagtaggagacctcgtcctcaagttcaaaagcattggaagtatcaaaaacaagatcccaagagctcgggagtaggtaccaagcacctaagttgacaaaaggcctagtgtgctgggttcgggttctgcttatctgattcagatatagatatcgttttaaccgtccatctagctttattcaatgacgtagatctatggagttagagaagtcaaattcacaactttgcatttctcatttttagctcactcggaaatgaagagtttccagtctctcagtttcgcaaaataacatctctgagaattggtgaccagcttccctagaacacaaaaactgattaagtgatgtcaaaatannnnttaggcatcttaaagtacatcccttggatgttttttcacctacccagcgtccaggttgacatcatatgtcaacatgggcgttgggatgtcaacctaggcgcaggatattaacttgggcgctaggtcatgaactgccttaagtaaaatagccataattcactcaattttgatccgattgacgcgattcaacttgcgtttcgaagataatttgattctatatcaagtaatgtctcacactccactcgtaattctaaatctatcatcgtcaaatttcaccctcaatggagttacgaaaataagtttcaagttgcctacagcaagacccaccgggctctcaagaatagccatcaccaccaagagctaattccgttagatcttcattaacgattgaaaacatcttatttgtattttttccctatttttgtgggcctccttcacctataaaaagagagctccctaagctcattttttacatattcagaaaactacctacaaggtcaaagcatccttttctagtttccctctctagaaattagaacttaaacacttaacatgtttctttaattctcgcgagaaataaaaactcgaagtagacgtagctccattaccatcgtgacatagaaagtgaactactatagattttgtgtgtctctcttattattacttaagctgctttttcattctcgccaatctagcgagcgggtgtgggttaaaagtctagtcgagatttttgagtcaacacaatcgaatcaagtaatataatgataaatagagtatcattcccacgatgattgattatcaattattaatcaattgattctttggttctattttattaataaaaattgttagagaaaaagtaaataagcaaaacaatgaaataacaataataaagacaagaattattatgattcccaactatcctttattttactttctaatgcaattacccaattttttttcttcttattcaatatacaagttgaattaagtagtttataatgtggttaagacctataaatccaatctatgtaaaaactccctacatattcgcatggtaaaatttaatcacaatgataacattaagcaaaacaacttatattatcatacaaataatttagatactttcatcattaatcaatttgcatccataacaattagagcatattcaatttcatcttctaaaattctgatttgaattcttaaataataatgatagatggttagtaattaaataat

SEQ ID NO: 25018 - DNA, 1299 bp, Cannabis sativa
ataaattatatgttacacaatttattcaccaaacacttaatatatattattaacataataatatatattaccatattttactctacatattatattattatataatataacaagcctacacattacttgatttacaaagcaatcaaatattccattctggagatgttttttatgaatctatcttttcattgcaaaataaccacaaccatgtcaacatcaacaatttcttccaaagacacatacctactactactgatactactgctacatctagttcagattctcctaacctcactactaccgatttcactccattacaatagccatctaaatccacaattacaaccaaaacaggaagaacagttaacaactaacttatctccaagactatacttatgattttatatcttctaacaacaatactacctatcctcttgctaactacctttcttatcacacattttctaaactttttacaactgccatgcttgctattgctcaatgtttagaacccacttcttatgcagaagcttccaaacataaaatctcgaacactgttatggatgttaaaattgatgctttggagaaaaactacacctagatagtggttcctctgcctccaaccaacatgtcataggtaataaatgggtgtatcgaatcaaatacaatcctgatggattagctgaaagattcaaagctcgcttagtagacaaaggctacaatcaacaacaaggtatataatttttttgatacatatgctcctgtagtaaacttcaacacactgaaattattgtttgcacttgctgccatcaaaaattggcatttacatcacatggacatcaacaatgcttttctccatggtgaattacatgaggatgtttatatgaaactaccacaaggttacactcccagaggagtgatacctaaaaatgcaatatgcaaactacaaaaaatcttgtatggcctcaaacaagtatcaagacaatggtatgctaaactaagcactaccctcattaaacaaggctttcatcaacctcaaaatgaccactctcttttcataagaaataaatctggggtctttcttgccttactcatatatgttgatgatattatagatggcactaataatactacaacattaacaacttttattgctacacttgatgctccattcaaattgaaagatctaggcagcttacgctttttcttaggccttgagattgctcgatgcaataaaggcatctctgtaacacagaggcctttcatttcacaactattacaggatgctagcaccattgg

SEQ ID NO: 25019 - DNA, 3549 bp, Cannabis sativa
agctacctataaatgatacttcaaaaaactaatataattactaaaatgagacatcaatatcaagccaagctcaaaggaaatcattgtttcacttccaaatccttatggaagctataaattatatatcttatatgatcagcgctcccactcaattgaactatcatgttcctaagatgtaagtgttcagccgaccagactttaacgaacacctttaagaacataaataatacagttgagctgaacctaaccatattaggattaagacccatagacctataagatcaaccagtgatattgacaaaaaaaaatataacagtaagtttatgatatcttatccaagatcaatatctatccaattcaatgtatgctctataaattcgatactggtagactttgccaatactagaaaggacttaacacttatccaaggtgtaagtataccttattgttgattataatatcagtctaaatctagtgtactgacaaattatgggacttaaacttttgaacatataatcgtgattatatattcaatctaatagtaattggtagttaaaaataggagtgttcaaggattggtttggttcagacttttatattttttgaacaaaaccaatatataacagttttttgaattttagaaaccaaaccagaccaataaatttctctaaccaaactcttaagaacggtttggttcgaaactacagtttaagtgaaatttataattattgatattttttaaataattgtactatttttactaagtttttaatttaattttttaaaatacatatttaacatgataagtaatagatttataaatataaataacaatataaaaatattctcaaaagtcaaacataacataaaaatctgaaattcatgtaataaaaaacttgacacacaaaaagttcaaaattatatataaaatatatatataaattaattatttattataaacggtccggtccggtttaaccgttaattatttattacgaaccacaatcgaaccattatacgcggtaaacggtctggattaaccagaccaccaaaaatggtttcctctgttacgatcttcagtaattcagattgtgacggttcaaatttaaattgcaatttttcgatttcaatgaatagccctagttaaaaattttagattgagaccatctataccaaattacaaactgaaaatgtaaccactgtataacttataccatagcattaacattaaaaattcttccacgtatatatgtagatttaaatagacgagcaacgtactttgtgtcaagagtttttttaatgattgagtaaatttttttgttattctctcaccttttggagttctcctttataaattgtcctctttattaccctgtgatctttgtcttcttctcggtctattctcgaatattaataagttttatctaatattaattctattcatacatatatctttttataaaaacaaaaaagaaagaaagaaagttttcttcaacctctgtgttgtgcagtatatataattactctagcactcacttattaccaaaggcagccccaaaaaatatggaagtaatgaatagatatgttacagcaaagaattacatagaagggagtccaaaagagtcggattttgagattaagtgctcaaaaattgttctgtcagcagagcctggctcaaacgatgtcgttctgaagaatctatacgtgtccattgatccgtaccagataaaccgcttgaagagttacagctcctctcaaaagacctcatcttatgtggtagtaaccatagctcccggcgaggtaacttaatatacttttattgctatttagaataatttatttgagtttcaaatatttaattatatatgtattttttttaaaaaaaatatatatttatatagtaaattatttagatttttttgaaagtagtagaatgtctaataatttaaaatatataaggaaaaaaatctaaatatacttgactgttttaaattattttggaatgtttggcacattaaaatagcaagcgatcacaaatgtttttcttttgtttttttatgtccatgtgaaaatttttagcgtctgttgatacttgtactatgtatctgatatggtgattatacaatatatataattaaatattcttatttcatatctatatatgcattaacgaaattggacagattattagtgcttatggggtggccaaagtggtagcttctgagaatcctttgtataaggaggatgacttggttgtgggaacgactagatgggcagactatagtgtgttaaaagcatctgaatatgtgttgaggaaactaaactctttcgatatggggtttccattatcacatcaaattggagtatttggtaattttatttcataactcaccagccacatttttcatgttaattaattatgatttttaaagagtacctaacacaattctttgttgtttaattattaattttaaatttgggtttagggtttagtggattgacagcttatgctgggctatttgaagtggggaaacctaagaagggtgagagagtgtttgtatctgcagcttcaggatcagtaggccacttggttggccaatatgccaaactctctggttgctatgttgttggttgtgctggaagtaaagaaaaagtaattaatagtaaagaaaagtaactcattacgtacataacaaaacaatcattttttttttatatatagataaatcaatctaactaaaatgttataattattgttattataggtaggattgttgaaggagaagcttgggtttgatgatgcattcaactataaagacgagcctaacttagaatcaactctcaaaaagtaagacaaatcttgtaattaatgattaggtcaataatatctgtttattactttctaatcctaccatgctataactagggattttggtgatggctattaatttattaagcgatcacgacctaaagttatttttgtattataatatatataatctgttcggctattaatttattaagggatcaggacataaaattatttttgtattgtaatatttataataataaaccgatactatagcaagagacacaataaataataagataaatgcatttgaaatttatcaaaaaaaaaaaaagtgacacaataaataatatatatatatagtgtatatataattatatattgtatagatgtattgtaatatttgtatatatatttttttagttcttatattattagttttataattgaattgtaactagtacttatctttcattaataattacttgcagattttgcttttacataaggatttaagtgtaaaacaatgactatataagaatttttcaactaaattaatttgcatgagaatttaagtacaacaaagtgaattatataaatatttatgttgtaaatatctttaattttttaatagggaaaataaattaaaaagaaatactatacaatatttatatattgaaacacattagtagatatatttattttttatttaaattgatatttatatataaactttgggg

SEQ ID NO: 25020 - DNA, 2450 bp, Cannabis sativa
aagcttcagcgtgaaaggaggacgacaatatgcagggatttgctgaaatcgagtatgagcagtctccatgccagtcatgaagtaatactcgttaacaaagtgccctattttgctcacctccgtatccacggtgccctttagccacttgtcatccagctgagagaagtagaagtaccccgacctattctgcttgggagtagacttcaaatcaaagagccagttggtgtcatgcgaagaggacttaccccatccttaaatggcatagaggatgaacagggcggataaatacttgatgcccttgggtgtgaactgggacagaaaaatgtggcagtagttcgcaatctttttgaagtacgggtgcaaaggcagcatagccccttattttgtgtgagcacccgacaaagcacaatatccctccctcatactagttgcccggtgatttggagaagggagaatgcattcgacaccactcaggtacccaactttctccaaatctcgtaactggtcctcagttacgatggacggaggacacacccacctggccctcaaggcaccttgcctcttatgagggaccgcctcggcatactcctgggttacgtaatcctcttcagacatcggctccccgacctcattgtagccttcaaagcgtagagatcgagcaactccctcctcttcagcctcggaagggctatcaagacggtcgtcatcctggtcttctacctcctggacctcgacttccccctcatagtcttcttcctcaaaagtaggcaggtcctgttagacactcggcaatgtggcatgccgggccacatgagggtcagttgcaataatcttctgcatcgtctgttttgtgcgggccatcatcctcctcatggacgggtgttggtgtgtatgtcgtgcaacagtcacgacaggagcaacaatagggatgccaaaggcaccagaacttgggcggcctacgggaatagtatcaacaacacctggccaggggatatatgtccagttatatggaaggtaacatctccaccccttcctaagctcccaaataaggccgcggacgatatatgtctagttagctggaaggtagcgtctccaccccttcctaagctcccaaataagccttctcatgcgatctgcttgaagtaaaaatgatgctgcgcctcgggttctagagtaggtgtaccttcactactcacctcccaatccttaaaactcaagttagaaagtctgtcactcaaagaggacagactggtgcaaagacgaggttggtcctcatataaaagttgaaaaagatcgtggtcgatgtagtgttctcctccccaaaactcaccaaggttcatctacaaaagacaatacacgagatgagtatttggtcgggatatcgaacaaaaacaaggaaaatataccgaccaggtctaatcgacagattaaaaagataaaaaatttcgtgcgggttaggttcgtaacccagaatttcaaaatcttgaattaagggttaatcttcactaaaccccgaatgggcacagtgagaacctaacattgcaaatttaaagtcgaaatgccacaacaattaggttatgtgatctattacagtcaaagttacaaagtttcaagcctagattttctacatttttcctaaaacaggtcaagaacagttgaattttctacaatggaaacccagaaaattgaagattcaagcataaagggagaaaaagatgagaaacttactcactgtttgaagctttaaggttgttcggatgaagctgatcgatcctttctgataattccacgaaggattcacgagaaaagagagttttttgctctgagattacttagcaagaaaaatggtaaaagtggtttatgaggattttctaccctatttataagcaaattagtggaagggtgtaatcaattagaatttcaaacgcctcgatttccccccaaaagtaaatattgagaaattaaaagaaattgagtacctagagaagggtaaccgtcaaaagcatgcgagttaatggcgcgtctcgaggtacgattcaatcaaagcattaattagccgaaaactgaagggactcctaatcaaagtcacatcggatcacgaatagacacatccaacacgtgtcacccattcaaacgcgaggtcggcttagatgaagtctacgcgtgactttagaagtcccgtgcagacttggggggcaaatgttatcccatttttcacactatgatgtgacagcatatgttggtgacacgtggaccttatttcctacatctgactgaagggatgtttcgaacaaagctcagcattcacctgcatgtacaatgtcttcctgaccgagtagggtgggcgtaaacgattcgaacagtgtatcaacacttagcaattccaagacttgtatcatgaagcagaaaagcaatccctataagtctgggatcgtatcatagagatatgg

SEQ ID NO: 25021 - DNA, 4725 bp, Cannabis sativa
  modified_base (522)..(532): a, c, t, g, unknown or other
taatcactttttattaagaaaatttaattaaaccataataataaattaaattatatataattatttcttacattaattattattaaattatatagtacctaatataaaactaaacatgcctgccttgcacgtaattttttttctagtacatacatatgtgttgatataatctattagttttatcattgctcactacaagaaatatcacttttaccagcacagttcactactgcgctggtaaaaggaacttttaccaatgcatttcgcaaactgtgtacttttaccagtgcctttcgcaaactgcgctggaaaaaaagttaaagtcttaccaacgcacatttgcagtggctaaaatttaatttttaccagagcatttacgtgctgggaaaagttattcttgccagcgcttttcattttgtactggcaaataccaacgttgatttgccaactctttttaccaatacattagaagtaaattctattttaccaacgcaatactaaacttttgccagcacaaaaatnnnnnnnnnnnagtgacatttcttgtagtggctatttagataaatgaaacaatcaaaataaaattgtaatatgtgaaattctatattttaaaattaccacattattatttaattaattttttaattaaatgcggaataataaaattggtactaaaataatttttctatagctatagatgataactagtgtacggggccacgtctagagataagattcattagatagatctcaaaaatacaaagtaattgacttatgcataaatagactccctcttattgtatgccgcaagcttgatgtattctaccttctaatcgaatcttgttgaaacttcaagtgctcgaactcccttcgatctccttaaagagtgcttatttcctctaaaagcaagacttgaaaagtaatgtcacaaaagcttgtagaaccttctcctgaagttaccattgttgttcttcttcttttacagacttgaatacaaactcgagacaatgaaatacatataaacagagtaagaggtgaacaatctcttctctagaaaacaaagacattattctcttaagtaatgaatacaattcaaagtgtatgaaaaatatacatgacctagatgctataagatgtatttataatcaatatacacctatttggcagctcatacatagtttgaatactcactagacaattccctaaaatagatcttcactcagcttaggaattttcggtttctatatacctctacagaatcgtgaacagtaagtgtgattttccttttatagaaaataaaagtcttgcttcatttttcttcacaagatatctgatcaagcatattacgaaactcacacaggatcagatatacacagttggatagataatgaaatgatgagtcatccaatttaccctttatgtcttattttctataaatagagaagctagacatatttccttccatatttaattttatcaatacaaaaatatagaaaccaaataacaactcacccgaaattaataaataaataataaactatttttgtcaaattaaagatgccaaaaatagaattaacaatctattcctttggcactttgattgacaaaatattttataagatcaaaacctacatcaagtgttagaaacaaaaacaataaagaatagaaaataccccctacatgaaatcatactaacacataaaataaataactttttaaatggaaaagttcacaaaccacaaacaaaacaagtccccctaaaataaggatccagagttgtaaccaacaatccaaaagataaatactattctccatttttgtctatcaaggagttcaacaaaacatagagaataagcaaaaggataaaaaaaatgagccacttaagcatcatcattggattgaaagaatttcatgatgctgtccattctcctgagaagtaagacttgactaaacgcaaattgaattcatccatttttgtaggagaaaaattggaggcagatgcagcagcaagttcattagtagcaccaggcaaagtagaccaagcctttttcttaatagattttccctgaggagatttctctaggactttgaaagtggtaccaacagaaggaaattcaatagattcattctcaagactcaacatcttttggttagataaaattttataaatcaagtgaggaaaaataagattaaccctaggtttcttgacctttcgaagagagacaatttgctccctaatcatataagccaaattaatttttgcactagtagaaactttatacaaaaagaaagcaagttcatttgaaacatttactagattggagcaaggaaataagttgggtagggcaaacctcataagagcagcatgatggtagataagttgagacatgtccattgtgtcggagagttccatatcattgacaccagtgagaaacctgaagaccttttgatgatcaaatttaacatcagttagttcaattccaataggcagatagagagcttcagccacatccatcatagtaaaagaataccagtgttctttgacaaagactttgccaaacataaaagagtcctcatcgagactctcaacatttatattagcataaaactccttgaaaattcaatccacataaccatcaaacccgatcagtgtatccacccattgtctttttttcaacaaattatacaccgcaaaaggcttatgagcaataacattgaaatttttctccgtagtgaaactcttattttcataaaatttcatatctctaacatgatcattgtaacaataataatgagaatgaggcttgaagttttcaagagtaatactaaagggccttttccttttcaaacgaagaatagggcttggagaaaccatgggtctttttcctttgtctttcttttgaactatagcaagaacaacaactgaatctgtactggcaggatcatcttctggcacttcacttttaaacccagaatcatcaacaaatgagggatcttcgggaacaaattcctcactagaatgagacgcagcctctgattcttgttcttcttcttcatgctcttcttttggttcagaatctgattaagagatggagggtgaatgatctttgagcctttgagccctagaaaatgaggtaaccattttcttctctttggagacttctttggacttcaccacctctagtttcttatgagtaaaaacctttgacctagttttggagcttaccataggcaaatgaacaatggctctctcaacattgggaactccattggaagacacaacttcaatgaggtgatgaatgggattcatcatgatcaccaagccaaagggttaaagatgcaattggagaacttatgatcagaggggagctaagattgtaggtcaacttacgggtttgggattttaatttcctaacaacttgatggagcagaggacgacccaggaggttcgaccactggttcagggagcataggttgggattatggaaagacaggaagcatgaacaagcttcttggatggttgagcattctttgtttttccattaatccttgaaatcctagaaaaaagacccaaaaagaagaataaaggaaactctaccttcttaccttgagcaccatgtgtaccttaaaaagaaaaacacaagggtttttctaatttttggtcaaagggttaccaaaaatagaaaaagaaataaaaactcaaccccaaaaatttgaaaaaaaaaatacaatgcatttacccaaaaaaaaattccttatacgaaatgccatgaaaaagaaaaccaacaaaaataatttaattaaaagcacatgattcataaaaactcacacgaaggataaaagcacatccccaccaaataaaaaaaaataaagaaaacttactatcctaagacaaatcgataatgataaaaaggaaatgaaaaatatgtaatgaatacatgtttccataaaataaatgaaaatttgctcaaaaataataaaacccacaaaaaaaagcccccttatttcttgaattttatcaattaatgcccttttgaaaaaatagaataaaagaaaagaaaaaatgagaagaaaaacaacttgcaaacacatagaacgtcaaataacactttttagagcaaaaataaaatgactaagaaaataaagaaacaaaacaaaaaatattgtttttttttagaaagctaattacagttggtcgaatttttttatacataataaatataagagaaataaaaatagaccttgatattattgccaacaaaaagaataccatacttgcttcatctttgttcttgatgaaaaaatcaaactcataagaatgtatagaaattattttagcaagctaaggaactagtgtaataagatcatacaagctacacaagaaaataatttaacttagtcacaaaaaatatgttaagcaattcaaaaagtatgtaacatttctataagaccattttctaatttcaacatgttcttttaaattgtgtcaagcatatgtgtgtgaaagtgaaagcagcgaacattgcccaaatttttaaaaagactttttctgagtaaatgtaatcaattgagacaatgtcacactacctcaatggtagcccttttcagtggtgatgtatcctgtacataacttctaattacatagtgccaacttactcaaagacagatttcacacaatgagataggtagctcaatttttccaatgtagcttgaacacacagtttt

SEQ ID NO: 25022 - DNA, 1436 bp, Cannabis sativa
tccttttcttacgccataccgtattttcagttttctccaacatattgaatgatactcaaattcatatcttagctgattcagatgaactagaagtagtccagcaagttcaggtaattctcattgtctaaggatttttccccctcttctggtccacttttcagacccacaacaagaaaaaaaaaatcattgagatttttctctaaaatgataattttaatttaagtttagactatgtaaacccaggccaattgtgcttaatgtttactttggtgcaattcagctttatacatcagttggttttcaatcattatatttagtaatacttagttatggtttggtgtttaactttttaattttttgcattgaaattagatgtaattctgcttttgatatgcaggagtactacatggattttgttgcacttgatccttaccatttcactctgaacattccagcaaatcacacttatatgcttccagctgttgtagaccctggaaatttgcagcatttctgtgaccgagttgttgatggtatcgcagcagtttttctggctttgaaacgaaaacccattattcgatatcaaagaacatctgatgtagccaaaaggattgctcatgaaacattcgtaagtatacttagaaaatgagaaagattagataacagagaactagtttatgtgttaactgtacactgatttggacatttattttagtgttggggatacaaccggcaggattttaatacataaaaatattttatccaaaatttgttcaacttctattgttattgtatgtgatggttcttgcttaatgtggactttacagcctgcagattctttcaatgaaaattttgggtcatcacgaaactgatgtcatgttttgggatgtaacagaagttgatgtaccagcaggaaagtggtcttttcgatttcagaaggacagaaatttctcctttgttattggtgcttgatagaagagatgaccctgtgacaccgttgttgaatcaatggacgtatcaggtatgatattggggcttttttttttttgctaatatatgagagttgcctttttaatttttattttctctttaaaagaatgtgatgactaaatcaatgagttgatccgtaattcaacaaattagtgtaattcaacaaattagtatcttagtcaagctcatgtattacatttgttttgtaggctatggttcatgagttgattggtattcaagataataaagtggacttaagagcagtcgacaaacttcctaaggatcaacaggttgagttgcatatggccttttaacactcatgtgatttgaacttccgttatttatagtctactttttcttacaggaggttgtgctatcatcagaacaagattcatttttcaaatctaacatgtatgaaaattttggagatattgggatgaacattaagc

SEQ ID NO: 25023 - DNA, 4455 bp, Cannabis sativa
  modified_base (1647)..(1649): a, c, t, g, unknown or other
atttttgtaatttaacaacttttagtttctatttttgtttatttccctttttggggtcataaatgtaaacttgttccatttttagtttattatagaaaaaatccctattatcttatcagagatgcatattttcctataagatacactccttaatttatatgtttcttttaataggggcggttgcgttagagtttgacccaaattcgttaatgtagatttttagaggttgtttttttttaatttattttataaaaagagaaactaaagaacataataatacccgcctaattcaaaattgatatttagaggtgcaattttttaataaaaccataagtatagaaattaactaataccctatagagtcggttgtgggttgagaaattttcatagttacttattaatcctataccgttgattattagaaaataaccgatgccataggtgcacacctttactgacacgtgtgcacctatttcgtcggttactaggaataactgatggcataggattataaaaaaaaccctcagtcttcgtcttccacttcgccttcttattcttcagcacgaaatcaccatagcgaaacccacccacgacgaaatgctcgccaaccacctctaaaaaaccctttatctccctcctttctacaccattttaccctattttcttttaaaattttctattttcaatatctaaatctgtacactaaaaaagtttggtttttttcctatttcactatgactgaacctattaaaaaaaggtggtggtataactccggccactaattttagtggagaattcatttaatcttaacgtcccttaaggtataaatataatttttattcattttattaatgtacattgctttatttttcgttttttgtaatttttttgagattcttttattttattaacattatgttgttgtgtgtgcatgatggttggatttttgttacaattggtcgctaaattgtgcttataaggtaaatatttattaacttgatatataatatataaatgtatatattttgtattttattgaatatgtgtttatatatatgtattgtgtattatttatgtaaattgtgtaattgtattctatacattctaagtaaaataattagtatttttatcccctgaacttttggcactacctaattttgccccctaaaatatacaacttgttaaaaattgttcctaaaatataacaattatataattatgtcctttctgttaggttcttttatctttaccattaaaaattagtatttttacccctaaactttgaccaatacaaaatttggtcctcttttattaaaaaaataattttaaaaattataatattctattgttaagcaattataatattctattaattctgaaaaataataataaaaattattaaaaaaacttgaaaaaatataaaattaattaaaaaatattaattttacttttaaaaaattattcctaagaaatattgtaaaactttattttatttataagcacgtattttaaaattaatcaaaaattattgagaatataataaatactttaaataaactaagattttttgaagaaaaaatcaaacttattaatatttataaactcatatcttaacaaataaagaaaataattaaaaattcaataaannnataaaattattttgaaaaaaattataaaattaaactaaaaaaattattatgtttcattaaataaatctacattttttttttgaaaaaagcaaatatattcaagtttattcccgtaaatataggtgacgtttggtaacacttttgtttttaattttgtaatcacaaaaataaaagtaaaatttttatttttgaaaaaaaatgtgttctataacaacttttgtttttcaattttaaaaacaaaaaataaaaatgtgtcctgtaaattttatttttaaattttatttttttttttatttttttttatttttatttgttaattttatttaattcgggtcagaggtcgggtcccaggtcaggaccaggggcaggtccaagtctgggaccgggtttgggttcgatttctaaggtctaagttggggtcggagtcaaaatattgattaaaaaactgtttaaaaaaatatttggaagtgattttttttttattttaaaatttagattcttaattagaaaatgaaaagtgaaaatagtttaattaaacatgattttgaaaaatatttatacttttataattttaaaaacaaaaaactaattaaaaatgtgttaccaaacgcacccttatttttataaaaaattgaattgtaatattttttttaatatttaaatgattttttaaaaaataataaataattttttaaatcgcttaattatttttaaaattttaattttcttaatcattcaaaataattttttcttaagatctacattaattttttaagatttactaaaagaaatattgaatctttcttatttttattctgaggggatacaatttgatagttgtcaaagttcagggggtaaagttgctaatttacaaagacatatcagcatttaaatagaataatgggacaaaacctaatataaggactaattttctgtatatgtaaaagttcaagagagattcttaacaagttgtatattttaggggctaaaattaatattgtcgaaaatttatggagtaaaattactaattattcttctaagtaatatatatgcatgtatatatatatgtattaagaatgagaatgcgaatgagatatgggagatttaattagttaagaattaaagtttttaaaattgtgttagtgtgagatataatttattatatatatatatatgtgtgtatatatgtaattttttcaaatattaatgtaaataatttagtaactagtaacttgttactttttttttttataactagtaagtaattaaataattaaaattctaattttgttgtattttattatattgtaggttgtgagctaatttttaaggttcggaataatttggtgttgatgatcagattttaacttgctatagatatatacatttactaactttttgttattgtaattaattatcaatggtggagtttgaatattttaaatattcattcgtagtgaagtaggttctgtgatatattatactgcggtcggatggatgtatataatatgcatgttagtgagtttgaatatcttaaatattcaaccatagtgaagtaggttcggcaaatacatgtactgcggtcggatgggtagataaattttgtatcgttaatgttattttatttgttttgtttgttatttcagatatttttaaaaattttgggaacgttcaattacagtcgttatgttgccaaaattttggtagaattaggataaattttactaaaaatgtataaatattgaagaaaaagtacataacacaaataactagttaattaagagctacttgtaagaaattaagtgacataacacaaataattatatacacatttataaaaatttccaattataaatgacaaaccaaacaaataaatagattcactttaggaaaagtcatgccattcccggatctatcccaatcaactaaacactaccctagttagttaattacaacttatacaacttaataacatgaactaaactaaaacaagattatagtaatatataaattaatatgaatcaattgtgagaaacctagttagttagattatgtaagtagtaactagttataattagttactaaatactgatttttttttttcgttaggatttttgttatggataaatcatggaagcatgaggagagaaacacactgtaatttcaagtagggttcgatgcatttttagagtttgccttaaagaattcttgaaattccaaacgtattcattgtccgtgtgtagattgttttaatagatctaaaggaaatattacgatgattaaggattatgtgaatttacgagatttcaatagaagttatagtacttggtattggcatggtgaacatttagctgatgatccatatccattacggatgcaagggtagatgctattgagggtcatatttttgatgatcatccattggacttgcttgacaaagcacaagaggaattttttaatgattctgaaaaatttgataattttttaagtggtgcagataaacccttgctcgatggttgtataaaactaagattaccaacaatggtaaagttttacaacattaattaaagcagaaaatggagtgagcgataaatattttactcaatttttagttgcttttcaaagatatctttccgtttgataattgcttctcagaatctacatataaagtgagaaagactttaaattacatatgattgaagtatgaaaaaattcatgcatatccgaacgattgcactttatattgtaagtaatacacagacatggattattgtccgacttgtggtttatcccgccataaagtaaa

SEQ ID NO: 25024 - DNA, 1510 bp, Cannabis sativa
ttagtagcctgatagcagaataggcgcatgttttaaatttccaaaataagcgataatttgtaagttatttttgatcgcgatctgaccagactagctcttagttacgcaatgttgttctagtagtaaggacgctaggcgaaacaccaggagtcaaggtaactcggttggatccaatggtgatcagggaatttagattcccctaaatgttcgttgccgaggtagaggccctaaaggtagggtacgcggtcgtggtgatgttaacccgccgcaggctgcccaagctgcccaagaatgggaaaataggtttacagaaatgcaagctagtattaatgagcaagatgaagaattaatgagcaagatgaagaaaataagtttgcttggcccaaattatcttctttggacccactactaggctttagatactaacctggagtctacgtgtccctttccagatatacgaaaaacaaaggttaatatctaacttattttcttgttaattctaataatattctgaagttatcgccgataaacacactaatccattaaggataaaaaaaataaaaacttaattgggaaatgtacaaggggaccattacccgctatcacaaagggcccaaaccactataacaaatctctatgtttaattcattctatttgtgtaacacgtggcaagcatcagatcgatacgacacatatgtcaattgatcattttttgaggtcaacagtttgatgctctcattgagagcgtggatattgtatctgatcaaacgccatggttaacacgagaagaattactgttgcaccatctgcttctttaggtctccctcaagacccacagactgtaggtctagatacttaggttctagtcataactgcaatctcaataaactctatagatgtggtgaatcctgtcaccataaccggcgccatgagtctggcctcctctagacagagttatagtgacatgccaggtcctacagcccttgacctactaggtcgtgcaacccttgacctatctggtcctgcagcccttggcctgctaggtcctgcagcccttggcctgccattgtactgtcagatcttgcaccccttgtcctgccaggtcctgcagcccttgtcctgccaggtcttgcaggccttgaccttccagatcctgcacaccttgggttgccaaacctcctaaggtgtgtaagatctgacaggtcctgcagcccttgacatgccaggtcctgcaacccttaacctacccagtcctgcagcccatgtcttactagatcctgcagcctttgtcctgccatgtcctgcaggccttgacctgccacatccagcacaccttgggcagctagaccttccctataggtctatgaacagccaagattgcctggtaggactctatagtggtcagacttatataggcatcccggtcgatcaaagtggcacgcccatgcctctaagaatccttagggggcactccaagaacaacaaccgggttttgcccctagtactatgc

SEQ ID NO: 25025 - DNA, 2406 bp, Cannabis sativa
  modified_base (401)..(409): a, c, t, g, unknown or other
  modified_base (1507)..(1508): a, c, t, g, unknown or other
atagaattagagagtgtaattgagacctctcaaatgttacttttaattatgcgattacaatgtaattacgtattcaaacaaatacataaaagtgtgtaattaccttcaattacatctaattctaattccttttacctgtttaaatgcattatattgtttataagtaatggtaatatggtaaataaaaatataaaattttgtaaaagtcaataaataataataataattagtgacactagtaaataaaaagtaacatttatgttaggccaaatttagcacaatgttatatcttttgctaaatttgacacaacttttagcatgtgtcaaatttgacacattttttagagcacaattggagtagtatatatagcaacaggcccgaccctgggcataggcgggcnnnnnnnnngcctagggcccaccagcccaggggcccaaattttttttcctcttttaaaagtatacatttttttactgattttaaaaaataccacattttttctaacataagggcccaaatttttttttccctatggcccactttgtttcagggccggccatgtatagcaatacactacttttttagcattccattggataggcatggcaatatgatccgatttttctggtcagattggagctttgatctgacggggcagttccgatcctaacaaacggatctcttattgaatctcggatcgaatcagatccgatttggtagaaattatctggattgaatcatacctaacccgccttagggaatttttaaaagcaattaataaagttaattaataatgtctaacaacttaacattaattactaaaaattaatttcatgtaattgacatactacattattatttattgatgatagattttaaaaatattaacattataattgaaaaattttatatttccttatacagttttttaattttttctaaaacaaaatctattaggataaattataaaaaaaattataaactcagattctattattattgaatgattaaaaacataaagattttgattttttttttttttttttcattcttataaattagacttcatctttgataaaatgtaaacatatattatatataaaaatataattgataattaaaattagtaaatcatatttctaaattgtttattttattgggttagatatatagtcatacatgagttttgatacaaagatttaaatttgtaaaaaaaaaaagctttgaagattcagatcttacccgattcgaaaaagtaattaccctgcggagtgaagtactgagttggatcaacaactagttcggatcgagtcggattatagtgggatcaaatgcgacccgatccatttacacttttaccatgcttttattatctttctaatcaatttacactacaaaaaatatctactttagccacaacataatttttatgactaaatgtgttttttaataacaaaaaattacttgtaacttaaatatagtttttagatataagttgtcactaanntagttttagtcacaataaatattgcgattaaaagcacatttagtcacaataaattgtatttttttaactaatactttagccacgaatctttgacaatataaaaataattataattattcacaacttttttacttgtagttaaaaattttattgtgactaaaaataagattttgtgtagtgatattttaacaaatgcacatttactttcagcaagcatataccatataagtattatgaagaatgaagatgtaaaaattatatgatatttaagacaaaaaatgattttataatatatgtgtatgaatttttaatattaccttccaatgcctaatgaaaaatcatgttacaaaactaaacattaattaatactttcatttaaaatatatataaaaaatttatatttttattatgtaaaaaggtttatattttaagactatagctctataatattataaaaaaaaaacagtaaataaaaaataattaatatatttatgatgatgtaaattttatataatagtaaattttgtgtttatatagataagcataagtttgtaagacttatttttgcatctgtaggaaccttttacatgaattaaaatatatgtacataaagtgttgaacttagaaagagaaaaaacgaaagcttcatgtataaataagattttctggaatacccaaagataaggattaatatgcatttttaaaattttacttcccgtttattagttagatgagaaaattaaattaaatactactttctagctaattaatgttgaaattctacattcatttttaggtaagtataggtgctttaaacaaatataatatcttgtacttgtaggaatgaaagttcgccccattcaaaaaaaaaaatatatatctacttttgaaaaataaa

SEQ ID NO: 25026 - DNA, 1755 bp, Cannabis sativa
ttttaatttgacacgattttcaagaaaactcttcgattagcgaagattgcactgtaattgaaaaagcactgtagcgtgccttggcattagggcgttacattgagtgagtatatatgtcaaattaaaaaaaattataaatatagaaaatgatgccggctctttttttttattattatttttcatcctcttttctatcgtctctttttcactttccctttgttcttctattctctttttcatcgtctcttcttcattgatttcacaagcatcattttcttttttgctcattaatattgtctgctattgattagagcttcagttcaaatctaagacgtctataaaatcaaaatttgataatttttttacctatcctctctaatttggtataattacttggatttttatgaatatttaaaaaattaaaatttgattgttttttaaataatctaccctctctaatttggtataaatatcaagatttctatgaatattgaataaaatcaaatgtgattgctttttttttttttttttaaatttcttctttaagttcataaattcatcagtttagaattgctttttatttttaattgtgacaattgaacttctggattgggtcgattgctcatttcatttccatgaatatatacattgttggaatagtcgttttactttcccataaaatatgatattttgaaatgattgatgttgttagctaaagtttaaaattatgatatttgatcgatgttggattgagtcatatgggagagatcattcaagtcgttaatgtcttatggggactgttaggatataatggccataacatgtctaaaatgtcatatgggaaaggtcgtatggggttgcaaaaggtattacattatagaaggctttaccaaattatatgtataaaaaatttcaatgagcaaaaacgttcgtacagttatgatgggaaaaggttgcatcgtctcttcacttttcctctgtcaatgagaaaaatatcaacatatgatttggtgaagccctctataatataatacctttggctaccccgtgcgtcctttcctataacgcgcgagcaaaaagatctgtcctataagcccataacaacctgaacaatttctccaataaaaccctaacaacacatgcaacccaacaaaaattgtacacaactacattacttgaaaagaaattcctacgagtggaacacctttccacaaaaaaaaaaaagaagcggctcactatgtcgatcgaccttatagtttcctgtacaaataaaaatgtaaaattaccatacaaccttctccataatagcttaactgttggaacttattttatcaagatctagatttactaacatgtatgttgattataattctataatctgacatcctaaatatgaatttcctaaaataatgaaatatacacatataaagttataaaaaaccttacattggtggcagcggaatataatgtctccttccgtttagatctctaacccttgatcatttctgttacagagtatgatcaagatctaaacctatatattcttttattgttgaaattcttcacaatctgtcacaagggcctgagtattgacttttgtgtgggtaattcctcaactcactataggtcatgaaaatttcaaaggaagaagaagagtgttttgaattctaagagactctctctttattttctaagttgtctgacaaagtcaagactaagtttttcatttgctttgaaaataagagcatcttattc

SEQ ID NO: 25027 - DNA, 1941 bp, Cannabis sativa
caaacttggattgacaaatagctcagcaatttttccagtgaagtatagaagtatcccctgaggaaccccaccagaatttagaaagaatagactcaatatccttacaaagtttggttggaagtctaaaacaggacatggcataagtaggaatggcttggagaatagctttcataggagtttccttaccagctctagaaaaccacttatgatgccaagagtgaatgatagcagaaattcggtctttgcgaaagacaaaagcaggatatttggacctagacagacattgaggtaaacccaaatattttgtaataaaaggtcggtcctctaactgaaacgtttaaaaaaagagatagaaagacctctaagaagaccccgattttggtaattgctaaggattgctgagaggccttcagaacaaagaatgaacaagtaaggagacaggggatccccttgacgtaaacccctagtaggcttgatggaatcactaacagcaccattcacagaaaaagaaatggtagcagtgaaaatgcatttaaaaaggagagaaacaaaatggacagggaaattaaaatgaaacataacatttcgaagaaaatcccattcaaccctgtcaaaagccttagccatatcaagcttaagagcagcccatcccctcttcccaactttcctatttgtgatagtatggactaactcattagcaagtatgatattatcatatacaacccgaccagaaacaaaagtgctctgaaaaggagaaatgacactatctaaaactcttttcagcctatttgccaaaacttttgaaatgactttataaaaagtagtacaaaggctaatgggcctaaagtctttaagcatgttagcacgagccttcttagggattaaaacaatcaaagtggaattaatctctgaaaaatcaaccccattattgagacaatcatggacatcagcagtaaaatcactacccagaacagactagttttttttgatagaatcaggcattaagaccatctaaacctacaactttgtcaccagaaaggtggaaaacagcccgcttaacctcctcagcaacaaaaggttgagaaagactctcaatatcatgatcagcaagaccagaccctaaacagtcaaaaatagaggcagtagcttcaacatcactaccctgggaggtgaaaagggttgagaaataactagtaattaaacccacaatgccctcatgagaattgacaacctcaccagtattagacttgagataactaatataattggccctgcatctagaggttgcatgcttatgaaaaaatttggtgtttttatctctagcattaagccatttaatcctagccctctgtttccaataaatctcctctttatagagcacaacatccaacaaagactgcaaatgagataaacgagccctatcttcatcatctaaaatcatcttatcttgaagcatgtcaatttcatgagtaagatgttgtattctggtcttaaaaaggagattattatccctatgccaacattaaagagagcaaatacaactgctctgcttccaaagaaaatccccaaaacaacgcacaagagagctattatttccttgagttgagcaagaaaccaaagaggtgttccaggcagttttaacaacagtgtagaaagagagatcttctagccaattattttcaaaacggaatcgcttaaccccaggtataacacgatttggttgagtgtgcgccaagcttaacttgagcacacgatgattagacccataaaaacctaaatgctgaagagtatgggtaggataaagatcacaccaagaatcagacacaacaccccaatctaatctttcacaaatagttttgttagaccaagtgtatctattgcctaggaaagagacagggaacatactaaaattatttagaaaatttgcaaacagagtcatag

SEQ ID NO: 25028 - DNA, 3969 bp, Cannabis sativa
cagagaataagtgaaaaaaaaaaagtgttcaatcctaataaatgaaaacaacaacaaaagaagcaaaattacaaatccggtaaacaaaaaccatacaccgaaaggaaataaagtctccctccagtccaaccataatctcaacacaaaaatattaccaaacacaccttaatatttttaaaattagcatttaattatatgttcgtctcatcactgtttatccacataaaaatccttcaaaatttggttaaactaaagccatgagaaacgtttcattaaaaatatatttcttaatagtcaaatattattaacgatccataaaaatgggtgtctgtcttcggatttaatttaataatattatataaggtagaataatcagaatactaacatatatcactattacaaaatatgatttacatgaaatgttagaggacactttaaattgttaaacaactgatgactcttatacatagatatgtcactctggctgctttatggactaacaaccatttaagtctttttgaactgtgtaatcccatacctacattgtctcatcaaaattatcacacttgatattttccgggcgatgtgagattgcacagcttaattacctggtatttttccttacagatcatgaaactactaactaacacacaggaccagcccaagtattgggcagcttgggccattgcacaaggctcccattttttcaggcccaatttttttatttttttatttttttttttaaagaaaacgcctattttttcttttttccccctattatatatacataaataaaaaatttataattaaaaatttattaacgaatcttaaaaaaatgctagtaatagaattgtatttaatgtacacggttttttttttaaaaaaaaaaaaatagccaaattttaaaattttgcaaaaggctcccaaaatgcttggaccggccctgctaacgtaataagtggtattatattgggtgccttaattaaggtcactaatagcaatggttatatttattattatatttatatttatgttatataacaaaaagtatatttttttttttaaaaaaaacattacaattcaaatttaaatcaactacacatactcttctcatctttcatcttgtataaaatgtgcttatataacatagagtaattttttaacattgcaatttaaattttaaaaaaatattcttctattattattaaaaaaaaaagaataataaagaagtgcatgtatttctaaataaatgaaatatattatattattaaatatataatggttgaactaaaattataattaacaataaattttaaatattattatattttttatacataaataatacttaaattaaaatttttttaataaaaaatgatattatttattgtataacataaaaaaactaattatataagtaaaaatatacataacaaaaatagaaattaaaaatataactaagttacatacattgcacgtaatattacactacaaaaaatagttacatttaatgataattttttagtcacaacatatttttttttgtgattaaatgtgacttttagtcacagcaaaaagttacttgtcactaaagcatagtttatagatacaacttgtcactaatttaattttaatcacaataagtagtgtgactaaaaacatatttagtcacaacaaataatgatttttgtgactaatatatttagccacaaaccttaagtcacaatataataatattaatttataattagtcacaacttttttagttttaatcacaaattttattgttattaaaagtaaagatttttgagtattaacttaatagcatttatatatatgatacatggactattaattactccaattgttaatttttgtatataactttatacacttaatactatattacacaccttaaatttttttaaaaggtacataattttaaacaatcactatttacatattaacaatattaaatttaatttttacagcaaattaatttatcaaattaatcatgtgttcaattaaataatgtactttaattaacattaatttaatcaaatattctcatacacaaccaaataaaataataaattttcaaataatcatatatattctcaacattaatattccaattaattaaattattttaaactctccgtaccacacctccaaacaaataatataaaagagttttcacttttcacatgaattgctcagccatttacgtgagatttcttgaactacttttgacttttttttttttttttttgtatggttgtataaatatatatttatacctaagtatatgtgtgattctatatatatatatatatatatatagatatattatgaccatatagcttgggttagcttgaaggaggagtaaacataaaatgataagttggcaccgcccaagcgtagggaggccatgtatgtatattattaatatttaaccttgtattttctagggttctattcgagtcaatatatggcacctatttttggctttttaataatgacattttactataaattatttcacaaaatacgtaaatataacaataaaaaattacaaaaatacagtttcacgaaattttaaatattttatttacagaaaatacggcattttatgttgtactcttgttgattttttgttatatgtatattatgttttattggtattttgttttcgtgttgtttctttgaaataccgtaaaaatatatataaaaaaattttaaacgtaaaaatataattttttttacaaaaattagtgtcttaattatgtaattatcccaaaaatttatcatgtataacaatgtatgtataggtgtgcacaaatattgacatatatatatgactcgtacataatataatttttcttttacaaaatttgtgatatcattaaatttatgttatatatcaataaaaattagtccatgtattttttttaaaggaaagatttcaatttgggacctcttttctgtgaagatatgagtaaaattattagactatatctatgatctccataataaaatgtattagttacaaaaattataatttaacttgatactaaatgattaccgaggtgaaatgtattttttttggagggattcgaacaagagacttttttttttttgtgagaagagtgtgaaattactagaatatgcctatatgattactctgtattgaaatgtattacttacaaaaattataatttagcgtgattaaatatgtttttaagtcttaattaatacttgttatggttaaaattaataatttgtacacatattttatgattaaaatatttagtcatcacaatcaatctatattaagatataggaagattttttaatggatattaccggttactaactaaatttaactataaatattaattttaaaatattaaatcattggattttgaaccataataaaagaggaatttaaacttctatgcataattagttaattaattaaagaaaaagtaaaaaaaaaatctctttctattatatattaaaatatataaatcttatgaagactgatgaacgtgtttgggatgttgagattctcgaagatctatttgaaccttgtgataggatgactattttttctactcctctcaactcatccattcatcaggattcttggtactggaggttctaaaagtcaggactctacattgtgaaaagtgcctataggtacttggacgatctaaagaatggcttttctgcagataattctgctagtttttagaagaaaatgtgggctctaaacatacctccgaaggtgagaaattttatttggcggcctgcttctaatgtgttgcctacgtgtgcttagttggttacaaacatgtcccgattagtagcatctgtcagctgtgcaacagcagcgatgaaactatttttcatgctcttgttggctgctcttttgctcgctcatgttggcaccgatcttgtgttgat

SEQ ID NO: 25029 - DNA, 3971 bp, Cannabis sativa
tatatattggatgttaaattttactatccgattcgatccaattaatttcaatcatccaatcgatccaacatctaatagatgttagattggattagttctatccattattagatgtattcttgtatatttattggttcattttgagttcatccaatattttaggtctagtatttattggatcggatcagatccatgcaccttccaagtatcagatcgacaatctaaattttgcatcattttcgtcttcatcaaaaacggggaaatatgtactttcgaggaagaaataacaattcttgggtgctggaaacaaggctcagtgcccagattgatattttatcaacttgggcaatttcaatagtattttttgtgaactctttcgagcatcttctatcctcaaaaaagattgagattcaactatttatgaggaccaaacagaacttctgaagggccataattgggactcagcgcccaggttgacacctggcactcggcccaacgcccaggttaacatttcacactgggcccaacgcccaagttgacatattgtcaacctgggctgtttctaatcaaattcatgaaaaattgttccgagattttttttccatcaccaggatttaagcaaactcagggagaaaaccacaaacccaatcccctaaaaatagggcccaacacccaggttgacgtggtgttgggcctagtgtccaggttgacagtcaacttggtgtgctacttttgattgctcaatgccaaatttgattcgaccaatgaatacaaaatatggtcaaaaaggagacctcgtcctcaagttcaagaaccttgaaagtattaaaacgagattccaggagcttgggaatgagtacccaatgcccaggttgaaaaatatcctggtgtgttgggttctgcttatctaattctgattttgtttcgaccgtccactgagtttctcagaataactaagatccatgaagttagagaagtcaaaattaataccttgcatttctcatatccaacatgggaaactcactcgaaaatgaagagtttcgagtctctaatttccgcagaacagcaacatcttccagaactggtgaccagcttcacctaaacacggaaacagactaaatgatgtcaaaatatcaattagacatcttaaagtaaatttcctagatgtttttacacttacccaacatccaggttgatgtcatatactgccttcagtaaaacagtcataactcacttaatattgatctgatttacgcgattaaacttgcattctaaagctaattcaattctctatcaagtcatgtctcgtactccaattgcaattctgaagctatcagcaccaaatttcacccctaaaggagttacaaaaataaggactaggttttacccgcaacgagtcacataaggctccaaaaaatggccatcaccaccagaagctaattttcactgttagatcattatctatggttaaaaatatatatatatatatattttttttttctatttttgtgggcctcctttacctataaaaaaagttcccttagctcatttttactttcagaaaactacccacaaggcctgagcttctccctctagtttctctctctctagatattagagcttccgacacttagtctttttctgtaataccatctcgtgagaaataaaaactcaaagtagacgtagctccattactgtcgcgacacggggagtaaacttctataaatttgttgtgtctctcttataattacttaactactttctcattcttaccaatctagcaagcgggtgtggcttagaagtctagtttatatttttgagtcaacatagttgtatgaagaccaaaatgggaaatgaaaaaaacgccagctagttacacacttagtgttcaagaatgaatttatctgtaagtacatgaagaagtaaatctatgacacaattattaagatgtgtgtatttcaaataattatgttcaagaaaactacatatttgtgatttggaaaacatacaaacaaatattggaactattttgtgcaagttagaaactattttcccaccaactttctttgacataatagttcacgttgttatgcatctccctaaataagccatactaggtggattgatgaattgctcaccggagcacaaaaaaagaacatatacgtaatggaattattaatcttgtaatactttatgttctagtcaacaataaataattaattgtaacacaaatatgttaatttcaagcaagatcaacaagaaattaacaaagtcggggtaagatgaaacttcaaggtggatagggataaaagcctattgtaacacatgttgtcaattggggtaaatttttatttatttatgattgataagtattttttttggaaaaaaataataatcacacttacttttacttaaatataggctaatctcgagacaggggaacttctaactgctgtggacactcttcgaaagtttcaccataaagacaacacttggcgcaatgaatacgtgtaacaagcttatgtaagcttacattgatatttattaatttttgaacatttctttcaattttctttgtattaaaattaactattttatttattttatttttgagagaaaaaatagttgagttggctgcatattaactcacacccactaaggatcaccctactcagaatgatatagatcccacccagtccccaggtgacttgcctgttatgatgcaagtactggatgagcaatctcgaaacctaagaggctttggccatctcacgatatttaaggcagttaggaccaaaagagcaacttccacgtcttctgctactggctcgcatattgttactatggaatagtaagatgtcttacaaagataggtgtaggaggtacagcaggaaactcagtattcgatacttgaagtgattccattatcagtttgaatatctctatcgaattatgcttggtttcaacttgcctgctatggattcaacgtgctattagagtttttcttttttttttctttctttttttttttttttgtaaacaacatagtttgtctatattgttgattcttattatacccaattttcaaaaaaatcaagaaatgtcaaccttgcgactttgaccaagacttataaatgtcaaataagttaagacattcttcttgagggctccatgtcacctctaggggactcgaaaacattaatcaatcatttggtaccgggactcacacacccaagtgtgcccagactagggtttatgggtctgcacaaattttttcaccctagagacctcaattcgataaggaaaccaacatggacttaactcatttaggcttaaaaaggtttagacttgaacataaatttaaaattgcacaagaatcccatgcaatagagcctatgcaaccactgccacatgaagatggcagtgctctctaatttttagagaacactgccacaaggaaatggtagtgctcgccactcattaagaaccaaagggaacttgtcaaatgtgttccctcaacaccaaggagtgcaacacaagtgaaaaaaaactatttctcaacaaaagacaagcctagtcgatcactgccatctttgtggcacaaattgtggtagtggtcgaccacaaggaatagggatgggattttttgtcaaaaatgttttttcatccataacatgttaaaaccaagtgtgaaaagccaccaagtggtgtggaaaccacttggtcgaccattgccacattttttggcacaagtgatggcagtggtcagccaccacatagaaaggggagtttctttggcaaaattatacttttaccattcatatatcaaatatgagtgagaaaatttaaccaagggtccatagccccccttatgcgaccactgccacttttttggcaaaaattgttgtagtgctctcttaaccaattggccaagaacgaatgtgactaaagtatttttatagcatccatat

SEQ ID NO: 25030 - DNA, 1880 bp, Cannabis sativa
  modified_base (1774)..(1776): a, c, t, g, unknown or other
gcaactaagactactcagatttttactcattttttttctaggtggttagctaatttttgtacaactgatctccctaacttagtgtagttcctgatcttttgttaataagattttctttaaaaaaaaaaaacaaaaaaaatatctatatataaaaatatcctttaatataatgcatgtaatacatttttttcatttaagaaaatagagactatctgtgatgtaataccaacgccaccacttaccattcttaaaaggttgtcatctaaagttttaaacacttgccctaacatttaagtagctatatgtaatgtgatgttacatatattctgacaaattcatttatatatttatataaatgatcctaaaaatctttttgggaagaaaaaacaaatatgaacacacttttccaaataaaagaatcaaactcttatacacatcactttttgtacttttctaacaattgaaagagacaataatagtcttatcactttgttttcatcgctctttaaatctttataagtacttcattttttcttataacaattaataatactagtcttatactatggcttctcttttacatagtactaatgagagtagtattgatgagttatctgaagctcaatctcatttgtacaaacatatgttatgttacacaaattgcatggctttaaaatgtgcaattgagttaggtataccaaacataatcaacaacaacaaaaatggccaacccatcactctttcccaattggtccatgcccttcaaattccttcttccaaaactagctcccttcgccgtctaatgcgagtattagtacatttcggtttcttcacatcgaagaaagaagaagaagaagaagaagaagatgcatatggtctcacaacttcaactaaattacttgtgagtaataataataataataatgatgatgtctcaagcttatccccttatgttgttggagtgcttgagccagctatggtaactccattccattttcttggaagttggttcaagaaagatgatgcaacaacaccatttcagttagctaataatggaatgaaattttatgagtattgggagaagaacacccaattcggtgataggatgaatgaagcaatgggtagtgattcaggaatgttgaagttggtttttaatgcaaagaataaagatttattcaagcatgtttttgagggaataacttcattagttgatgttggtggatgtactggagatgtatgcaatattctgatggaagtatttcctcacttgaaatgctcagtgtttgatctaccacatgttgttgcagccaataatttacataataataatattcaaaacttgaagtttattgaaggtgacatgtttcaacaaattcctcaagctgatgccattctaatcaaggtttgttttgttttgtttcccatacatatggaattattaattagtatattgttattgagaaataattaatttgataaattagagttattcatttatatacatataaagtgtaataatttctttagaaaccaaaaatacaaatggttcaaactgaatttaaatagaatttaaattataactattttgaaaccaaaaatacaaatggttcaaactgaattttttggatgtatctccatttatatacatataaagtgtaataatttcttttaattatttttttaaagagaaaaattacattataattattgtaaaaaaatcttacttttaatcacaacaaaatttataactaaaagtaaaaaaattgtaactaannntaaattatcatttttatattgtgattaaaagtagtagttacaaaaatcgactatatgtgtttttagtcacaatacttgttgtaattaaaattaaattagtgaca

SEQ ID NO: 25031 - DNA, 3662 bp, Cannabis sativa
aaggtgaacactagctactttaggttagaatgaacaaaaaaacaattttctaataatgctgctagtgaagagtttagcttcacaatttggttgcattttttattagcattgatttttcttaacatattggagtgcaaaacaatgagcaggcagtggtgagaatcgaaaactcccaaatgtacaggaacataatgagtcctggatggaccttaggctggacatgggctaagaaagaagtgatatggtctatggtgggagctcaagccacagaccaaggagactgctccaaatttaaaggagacattccacattgctgcaagaagaaccccacaataattgaccttctccctggtgtcccaaacaaacaaagattttcagattgttgcaaaggcggtctccttaagtcttggggacaagacccttcagctgcagtctcatcctttcagctcagtgttggccattcgggtacttcaaacaagacaataaagctacctgagaaatttgtgttgcttggtcctggacaaggctatacatgtagtcctgctacaattgtttcaccctcggttttcttctcatctgatggacatcgaagaactcaagcaatgagtaagtttaactctcctccaaagtttgaacagaattccataaatccttgacttttttctttccatgaaatcttatttaagaacatcgagactataaagaatgttttactttttttcaatcaaatgttagctatttctgaattatgagattggtcgttttaagactcctataccaattacaagagaaatcatgtatagttcttctttcgtaaggcttttgctggccggtgttggttcaaaacaattcccatagctaattaattaatactaaaataatatatgaatcctgaagtttctgcctaagatggctaagtacaggacaggagaaacatttttcggtttattttctggtatatgattgtgtttgccatttttcagtgacatggaccataacatgctcttattcatcatttctggtatctaagaatccaccctgctgtgtttccatgtcatccttttacaacccttccatcacgccttgtccatcttgtgcctgtggatgcaaggatcataacaactgtgttgcgtaagtggcaacagcccgtctgatcctcacatttaacattgcctccaacacttaatacatgatggtctaactcttagaattaagattgttgtgcagaaatgatctaaagatttcatcaagtgatgaggtgacatcaagaagaagggaaatggttcaatgcacagaccacatgtgccccattcgggttcattggcatgtgaagaccaattataaagagtactggaaagtcaagattgccataaccaatttcagctacttgaagagttaccctcactggactcttgtcgttcagcatccaaatcttcacaacctcaccaaagcctacagctttgtttataagccactcagtcagtacaggctctcaagtaagtctagcaaaaattaagtaataattttgctagatacaaagaaggtctcagactcattccttcatataaatagaacagttcaaccactatattttcgtcacataattaattcttttttaaagcaaattatgaattttataatgctccttttaattatctggacttttaagtgatgtgggatgattacaagtacgtataactaaatgtgatttttgtcttaaatatgcagatgatactggcatgttttatggcatgaaatattataatgatctactgatggaagccggccctaatggacatgttgagacagagctgattctgaaaaaggacaagaaagctttcacattggaacaaggttgggcatttcctatgaaagtttacttcaatggtggtgaatgtatgatgccccctcctgattcatatccacatctacccaattccgcttattcaaatacaatttcaacactaacttcggcaacactactgctgttcctggcattgctgtagcctaattatggtcattccatagcacatgaaagaggattttcatgaacataaatgccatcttcatagaaatttgtacagtggattctcactatgtgtccaaaaagatagaaatgacagttaaaaatagcaatacatatacaacaaattatgaactgagtaagctatgttttgctttttatatcataatctaatactttcttttttaaactgagctcttagtactttgaacaccaaagcttgttcgctggtattagatctgagccttgaaatgatattggaaagatatttttctgtttaaaatatacagtaatatgtttataaattgtactttccaaaatttattaatcatgaacctaatgagtatttatatggaatacattctagtctttactaggggtttctggtaaaagcaatatttgtcaacttcgctagagaatcatttccatttataaagaagaaatgcattattattgtttggtgattaaatttaataagatgttttgatatttattatttataaagattacaaaaattataagaggcaattaggtaagcctcatttaaataataataataaaaacatgttctatgtggcttaatgtggatcaagtttcccaaacaatattttcaaaaacaaaaataaatccaagtgaaggcaggatgttacatactacatagtgcaatgcaggcctaagttactagactacaaggggaagaagaaaaataaaaactaacaaatatatacatgacaaaagaggactttgataatgaatcaatttaaatattcatctttgtataatgagagttttattggttacaagtggtgcaatccaccatgaggttaatggtggggcttgtttttccactttgtcgggccactaactcaccttaattcccacattagtatgatattgtccgctttgcacttaaaccctcaagattttatttttggacaccttcccaaaagacctcatactaatggaacagattttcaatacaaagctctaaaaagaaccctgattttttttgaaaaatttgtcatggaattctatctaaaaaattttgaaaagtctttaggcttttttatttttagttttctatcttatatcgtacattatatttttttagaattacttgtaacgcattactagttatagtatatatactgtaaagaagactatttgactgtagttatttatttctttgttttttcaatcaaaaccgaagactttcgacacatgtcctaatactgatcttcatcttataccaccgtaatcatctcatcgctcctaaatttttggctctgatactactttttaggccccgttcttccaccttgtcaggccgctacctcaccttgactcccacattagtatgatattgtttggtttgggcttaagtcctcacggttttgtttttgggcaccttctcaaaacgcttcatactaatggagtaggtagaacacttatatccaagataatttttgtctattcttccaatgtagaacttgagttgacacccaaataattaataattaacgattttttataataattacaaaattaaaatatgtaaaacatcactgctaccaaaattaatagctatagaaatctcataaaactaagcatcactgctgtctttttttttttttttttt

SEQ ID NO: 25032 - DNA, 1834 bp, Cannabis sativa
ccattgccttggttttgctctatccattgtaattttataaatacatttggatttgaatctcaggactggactggctctgagttaatcacttagcccaagagcttaaaaaaattctttcaaaaagtatacaattttttttgataactttcaaaaataccatatattttaaacacaaaaaaccatattcatagtgcatatgatgaatccctatctttaatttcttgtgtttccattattgaagcctacaaaaacgcattcattagtttaaaaaatatcatattatttatatatgcatattctaataatctaagtgctccgccatccacaagaaaatatgtaacacaaaaaagttttgagtgaaacttcctctaaagcttaaaaagcaaaatacccaacttgcctaactctctatttgtttacaagtaaaaaaaaggcctaagctaaacaatacccaatgagataaacacttttaacaaattataaataatatttaggatttaaagttgagatcctaaaacctttttgtttactttaaacaaaggtgagatctaaatgagtgagtggagaaataaattatttaaaaatagaataataaaaaatataaaatgaataaacaagaaagtagaaaggttgttgtgtttataattaatagagtgaaaaatgaaaaactcttttgcacgtgagtgtcattcttgggtttccaatttgcaggtttcttcatgaatgcttataattactctttaatttcttaccatagaattattaaaatgtattatcaatgcttaatattgtttataggcagttctttatgattattagtaatattttttaaaaattatttttttaagttacagatctaattagtagtgctttctaccattttttaaaaaagattaatacacagaaaaactctgtaaaaattaaaaaatatttaaaataaaggatgtttctgatatattaatctttaatatattagtttgttgagaaaaattaggattgcaataatgagaaaaatagtttgagaatcgaccaaatattattttttgtttaaatgtttatgatttaaattcggtcaacaacaacttggacaaaaaaaaattctatcaaaatatattatgttctaatttctttaaagaaattcatatataggataatgtataaatacgaaattaataattgtccatttttttttgcacgcctgaagaataaaaagaacatttattaattgatagaagagaagttgactaattgttatttattaatttagttacatctttagaggcaaaaagaagttgactctctttataacagtacaactgttcaagtgatatagctagttgactctagctcatatatcctcctctgtttttttttttttttaaaaaaaaaaataattgacatgaaaaatatttcagattaattaagtttatttatttatttttttttaatgttattttgtgagtaatggctggagaacttaatattaaactctctaattttttattttaacaaaaggaataaggttttgtctactttaaatggaacaaatcatagacatataggggcatatgccaaaaaaaaaaaaattattgtatatttaacttttttttttttgaatttttttataaactaagtgctatacatatagtatataagtatatgtattatttagttcatgttaataaagttgaactctaataatagtatttaatgtggtttaaatttaacataggttaaaaattgtattaaatttagttcaaaatataataataattaaattttacactacaataaatattacattattatttatatttttgccgctcattaatat

SEQ ID NO: 25033 - DNA, 1095 bp, Cannabis sativa
ggttcatctacaaaaaaaggaagataaagaggtaagaactagatagaagtacacatttttttgaaaaggaaaaacaagtttaatatgccgacttggccaatgttaaagaaaaaaggaagaaagttcattccaattgttgtctagatttttgtaagcttgatgcgtggactctaaccaaggaagcctagatgataatcagctagttacatccttcgaccctaactcctgcaaggggctgcctaagctcccacaaagggcttccgcgaaggatacttccatgtaaggcgaggacatgaggagcatctgcgatccgtgatatctcccagtcccgagagctaaagctaaattccctacgaaggctaggggcttcatcgagtacacctatgcgggtcatgaaagaactcaaaatgagttgtattcccattcagtgttgcgggagggctccatccgtacctgttaggttacagacatgacagctgtgctttttcaagcacgatgcccagttttgttccccacgcctggtcacagtatagagcacaccaatttgtacctacccaagtgatccaacagtcattgagataaagggcaattcaaaaaagggaagaccctctagggcaaaacatgtatgagatgtttggacagtacgtgctgacacctctaaacaccatgtgatgaatcgaccacctaccaaatcaacggtcaaatttcttctaataggatttgcccaacaagcacgagagaggggatatcacatataaatacccctaaatttcacaagataaagggcaactctttggagtttaagaaaccatattttacttataaaaactctactaaaattcctattgagcttcttattcttcaagaggaatgagagaaatacagagttccagtccataatgtaactacttgtaatattcatcacctgccaatatggttaataaaatggactcgtggactaaggatagttaatgcctgaaccacgtaaaaaatctaatatttgttgtttattagtttacttctttcttaagctctaaatatttggtttctgaaaatctcaaaaaatatttaggtgcttttattgagatctgagga

SEQ ID NO: 25034 - DNA, 1795 bp, Cannabis sativa
  modified_base (37)..(49): a, c, t, g, unknown or other
acaagaaaaaaaatttaattatttttttatcaatttnnnnnnnnnnnnnttaaattttattccattccattcccattcccattcctgttcctatattttcgttcctctcaaccaaacgcctcctaaaatactatacttatttggtgacacacactgatattacttttaaacttagtgaattttacatgaatgaaaagaacattccttccctacctctttggtagctcaaacaatctcgaaaatcacatatcagttataggaattttatactttttacttgcttacttcttagagtatggtcttgaagagctttcgctctcggctaaaatccaaacagtcttatttaactacatatctctggtttaagcatccagaaagtcatgctgttacatcgagagaatttttttttttttttgagttttactattaaggatattgtcgttttttataaatgttgtcgttgacaaggaatattgtcgtttctttgaaaatatgtcgtaaaaagattggaccaaagcccatttatagcttgagagcctggttataataagtgggcccatgtaggcccattaaccagttcaaactctgatagttccgaagctggggcgggactttgaagttccttgttcttcagtttctctcttctgcaactctaaaaagattacatctttcacctaaaagatcatgaattgacgaaaccctagacagaaaattgggacaatggaaaggccgaggcttgtggtaaaatgctccgagaacgaagaggtggtggagtacttactgaacaagtggaaggaaatggcggatcaacgctccaatgggatatccgaaaacattgagaagactctctccaaggcttattccaatctctgtagtgccaaaacccccatttacaccattaaagatttatcccaaatcaagtaactttttttacttttgaaatttaaattaagccctttatgttcttctgggcaattccccatttttcaattttttggaacattgaattgttgttattgatgtgtagtgttgggtgttgaaagatatgtagaaaaggataacaattgggaagaaatttatgataaagctttgaaattttctttttctggtttggggcaattccattttgatattcttgactgtctgtaataaaaatcggattgataagcattgatactgattgagagtaatatattatatatagtttatatcaatctcagcaaaattacatgattgatgtaaacttatcttgccaggaatgggtaaaggatagttgctaagaactagtgagacagtaagctttctcacattattcaatctatcaaccatttttttcaaacaattaactaaagatcattagttgtccaatactaagtctctaaaggttctggtattagattgtgcctctttctaagcataaaacaacatttcttggtaaagttgattcatttgatgtaaaacaagtaaaacattttaggtatagaatttcgtttgaaaaatagaaattcttgtgtttttatagacagctttactttctgtacttagtatttcataaaaacaattaaacattcataattgagtttgtgctctataatcgagttcagatatggtttttgtcattgttatttatctgttttcttgtatgttttgggaataattttgatttaggggtgtggggaagtggattctgaagcttatgcaaggttttttcaagactgatcaaagcagttgtgagccagacaatgtgactgaaaagggtaccctctctttctttcttttagtatagatacatgga

SEQ ID NO: 25035 - DNA, 1859 bp, Cannabis sativa
ttacatgattaacccataatataattataaatccttattacttaccattagacttatagggatattacaaaaaagttcgaactcgcttcaggtcaggtggtaaattttgccaaatattctatttttttcagcactaacactaaaatggatgctagaaatagaatatgtcaatagttgggagttaatgaatctgatgcttctagcctttatttgcgattaccttgtttgattggtcaaaacaaaaaggccatcttgggcttcttgaaggataaattgcagaagagaagttagcattgggaagggcatttcttgtccaaagttggtaaggaaatcttgctattaatagtagcacaagctctcccaagctttgctatgtcagttttcttgctgccaatggagacttttttcgtggtcttgagggcattatgaggcaaattttggtggaaatcttccaagcaaaagcaaggcgttagttgggctagttggatgaagctttggaaacacaaaaatgtttgtggtttgggctttagagacttaagagactataatttagcaattcctggtaaacaagcttggagattgttactgaatgagtcatcaatagtctcaaaagtttataaagctagatatttccctcatggctcttttttctcagcttctcatatggaaataaccctagtttcatatgaaaaagtctgtttgaagctaaggcacttattaaggcaagggctataattcatattggtaatgacttaaaaacggacatcgctactgacccttggcttcatgatctgcataacccgtttgtaaactcttctcaccctgggttaagggacaacaaagtggctagtctcacgtgcattgatgagcttaaatgggatgctgagatcttaaaagatttgtttggcgaaaaggatcgatcttttattatggggatccctcttagtcaaccaaaccgtgaagattgttggagttggatgttagaaacctttggcatataccctgttaagagtgcatgtcgtttccttcaacagtcaagtggagatattcaagcgagtggggagttctagaaaatgttttggaaagccaaagttccatctaaagttcttcattttgggtggagggcaatcacaaggtgtcttcccactaaagtgcagctgcaaacgaaacacatcgatgtcgatctactatgtcctttctgtcatactgaggtcgaaacaatcctccatgttttagtaagctgcacttttcaacagcttgctggaaccggtccatcatcagcatcaaatccaatatctttgctgattttagagaatggtttgaagaaacaattgcaggaaatgtcgacaatagttttatttaaaaaaaataataaataagattgttgatttttaggttttctctttttattttttttttaaaaaaaagaagaatatgaattttataactattttaaaaaaatttaaatgaattttgaaataatttttataattattaaacaattatatttaagtgtattaatataaatgtgctacatgtataagagtataaatatcagtcgttcatgttggtatttaactaagatatttaccaacagttaaataatttagaaaattttaaatacaagcgaaatgaaagttgagagaatttcatcgccaaaaatactattataaaaaaaaaaaaaaaaaaaatagctgcataagtaccaaaaattttatattttaagtgacataaacacaatatttatttttagtgacataaaactttcggtacttatgccgctatttacccttaaaaaaaaggaaaacttacaaaaatactgaaatttgggttaacttttacaaaactactgtcacacg

SEQ ID NO: 25036 - DNA, 5032 bp, Cannabis sativa
actgttccttttttgactttgctgttcttctgggattttcagacattcagccaactgtgtacatttgactatagttctaagtctgtgctagtttaccaagcgccctggtatattcaagacaaaccaagattttcctatcgcgggcttttgcttggtaagatactgtactgtctttctactttatttattttgtccattaattttattctcgtaggattccatcttgaagattgttactcactgtccatgttattaccgtttctgcagatacatcaagacactatttaccagtcgatgtaattaagcagataattgattccatgtcatatgctaaacttgtaagtattgattcttcttttacaagtcccatcttattttattttaggacttctagctctcgtgattggacattcttattagtactcttgtttatatttttcttgtttcatttaagacaaaaatggtttaattgctgattaggataaaattcttgagacttgctcaatattgctttactgctttttccttttttctaataaaatttaatatgatactaatgttgagaatcacatttattagaatgttcttcattggcacgtcatagatgagcagtcatttcccatagaaataccttcatatccaaatttatggagaggttcatatacaaagtgggagcgctatacagtagaggatgcaattgaaatcgtaaagtatgggttctttacttttctaatttctatagcttactaaagtccatgcaaaacttcctcttgttataagcatataaattacatagattttggctggtaataactcatagttttctgtattgccgttttattaattattgtgtgatgtttgatctcttcaaagtttgagatcacctcccttgaaagcaaagataatttaattaattcttttattttaaaggataaaagaacatttgtaatgtggtgctatggctgaagatcacactttaagtgctttaatttttttaagccttactgcttatttgcttctcctcaatgcagttcacaaatttcaatggatatgaactaattatgttttttttttctcaatgtcaatgtgaagctatgccaaactacgaggtgcgtcataactttatatactgcacttcattgttatatttttatgctgtaactttttattgtaagacacttgtgcattttatgaatatggaatctgtcacttgatgacaaaagtaatgcatatgttaccttaatttgcaagattacaaatttaaactctactgaattattacctttgaaatctggggataggcacgtttcttgcacttgatttgaatttattatcattttgggacctgtttcctgattacatctatgcattatgggcaggcattaatattatggccgaagtagatgttcctggccatgcagaatcatggtaaaacctttctttctaaatttcaatttcatccaaagttatattgtgaaatgtgaaaacacttttcttgctgagagatcatagcatgagaataggggtttccattttaattcttgacttgtactacctggccattttgactgagctaaaattttggacatttgcaattacagaatgtagtttctgggcattgcctagtggtcatatactcataaattgagtcattttgtgaaatgtaatactaatccacatatggcaggggcaaaggatatcctgatctttggcctagttcttcctgcagagagccccttgatgtttcaaaaaattatacctttgatgtaatttctggcatgctgacaggttaagctccctaataatttttttagatgatataatttaagaatgtttttctttctttttactttgccgtgtgttttgaaacagtgtgagtagttaaattctgctataggtgctataattatttattgaaaataatatattattttcttaaacacatacgttttttctttttttaaaagagacaacctgtattaatgaaataaatcctacaagaatgtggaaaaccacaagtatcaccataacatacaagttatgaaaaaaaacattattacaaaaaaaaaaaaaaaaaccattctttgaataaatgagagaatgggatttcttaaacccctttacgttatttacataatgaagccaaaaggcaactcgaaatctaatattatcccaaagactattctcatcagtagcctgtccttcaaaaattctcaaattcctttccagctacactctccatagacatacagcagccaatactgtagtgagccatgtttctcatgggctttttttatgtagctccaattacacagtgtagcctcctttttccttttcaagagattcttaattaaagagagtaggactagtattattaattataaattaaaggaaaatctgaactattcagtcatcttgatccatcattattgatgctacattcctatgtttaaggaaataataatcgtgcatcttcttacaatggtcattttcttacttttcactcattgctcattattttttattgttattagctattactagattcactttgtaaagttgcggaagaaaattttccctttttttttttctctctacctatatttactattttatacagatatgagagagatttttccctttgagctattccacttgggtggtgacgaagttaatacaggttagtaaaagtactttcttgttgtcagccaagattctattccactactaccaaagtagtaataaaagagacatgtctatacaaaggaaattgtagtaactcggctccaaaatactttttccatgttgatagtaatgatcttctaatgcttgtatacttgctgatggtactaagaagaaagtctaaagatgttttctcattggcttttatgcatattaactgaacttatttctgagaaactattccatacttggcagattgctggaacactacaccacatgtgaaggaatggtaatccaaatgtttatgctgaactgttgattgttttttaattgttatatgttgcattagtgaagaccacttgtaaaagtctaagttataaacaaatgagtcaaattactttttgaatgtttctgtggccttctttttatagcgtctctgatttatctataattctaatgcaggcttcaggataagaacttaactacgaaagaggcatatcaatacttcgtactcagagcacaacaaatagctctgtcaaaaaattggactcctgtcaactggtatgttgtatgaggtttcatcatatcctttcatgcattttacagtttgtttcttcatgtatttgtttgcatattagtatggtagagaaaatttcttggagaaaaatttctggttggattacatctatatttgacattttgccattcggttgctccaatggtaaaactcaaatttggtattaaatcaacactaaaaaagtataaatttagcactaaatttttatcttatttcaactacaaaaccaaaaattacatcaaaaaaacaaaaaataaacaaaaagtggatttaccgtgatctatagtgctgtagacatccacataaataagttggaatttagtgttcggttggagcatttttgtggtgaaacaaacctatttttgggtttatagtgttgggttggagttggattctgacacaaaactgacgtgacaggcagctccacaaaggaacctactttatagtcctctacgtggagcccttcatgtgtcattgtgttgattactgctacatttttttaaataaaaaacaatgtaatagccccttcccagaagctcaaaagtgatgttgtaacttatctgaagttttatgtagtagtgtcaactcaatgtcaaaaaaaattatatggtgacttagtgcaattaattacacatctcagtgactcaaattatagacttaatggatgacgacctgtgatggcaccatatgttgacagaagtaatttttacagcaaacaaaatggcactacttggtgactttcaccataaatccatcacgcccgaccaaaaaatattgctaatagcttatatatgactaaatttgactaataagtaagcactatttctgttgtgaaatatctatctatcagctggggttcttatttattgtttcactaatctgtaatggtatctattcttacaattttgaatgttgatggattttattttctttataatagggaagaaacattcaatacatttgcagaaaaccttcatccaaggactgttgtgcataactggtgaattttctatccttctgtgtacttctcttgtggtatcaaactaaatatataatgttgttaggcataatttatgttttctatgataggttgggtccaggggtttgtccaaaggctgttgccaaaggtttcagatgcattttcagcaatcaaggagtttggtatctggaccacttagatgtcccatggcatgaattttacactgctgaaccactagaagggatagatgattcttctcagcaaaagcttgtgcttggtggagaagtttgcatgtgggctgagacagctgatacatcaaatgtacagcaaacaatttggcctcgagctgcagctgctgcaggtatgcatttgacaatattaattcgtccttatactttctcttgaaatataaaattttctgaagtttctttgaaacattgtgatttcactgttgcagtgtcttgtgtgctgctatgcacttgccttttcattgctaatttaggcagttgatttccagtgaaattagactaataaactaacccaaagagtattggaccaattttataatcaagatgcaacattgttagaaagccaatcaagtacatactacttgtatacgtatacatggttctgctatatgcttttaattgatgcatttttttgcacttttattctttaattagaatattacactagatatgcaagtattttggctttatcttagcatgctttaagcaaatgttgaacttttcttctttgctttcttcctcgtagagcggttatggagcagtaag

SEQ ID NO: 25037 - DNA, 1026 bp, Cannabis sativa
tgaaaagtagataactcatatagggtcatgactcatgtgtaacaccaaactgggatttgagtttattatttaagatttttatatataagacaacaactaaagccaaattgttaataaataaataaataaaaagaaccaatctaataaaccatgaacgaaataacaaagtacctaactaaagattaacccttttttaattcactgagaggtgaaatgggattctttttatttacttatcaaccaaatctttgtatgattgtggtaacagagtgagtgaaggtaaaataataaataaataaatagagaatattttgggacccaaagattttgattttgagtgcacatgaagggatatatagagtggtgaacttagacaaaaatcagtggttaagtctccattttgcacatggtcggatcacagagatatggctcccactcctctctctctctcatgtgccttgacttgatctgatgatcctggcgtagagataatgtatatcaacttaatgggaatgaaaaaaaaaaaaagaacaatgggaattttattttatttttttcaaaaaagaaaaatgaaacttaatgtgaaatgtttttttttttttcttgcgtgttgcctttctcttttaacgtttaggaatttataagtttacggctaccattcaacctcacatatgatgagtgacattactatcgagataaaaatgtaattctttctgctatggatatgtatatcgagataaaaatgtactctaattttcttcttattattattatttatggatacatttttcgtataattagtttgatatgccttaccttttactcaacaataattaacagcatgaaaatatttatgtgttactattaataaataaacatataaatgtataatcaacaagctggaatagctcagctggttagagcgtgtggctgttaaccacaaggtcggaggttcgaaccctccttctagcggttttttcttttttttcttatttttataaattttaacttctttgctgctttgtt

SEQ ID NO: 25038 - DNA, 5896 bp, Cannabis sativa
tgaatgaaggctccttggttctggtcaatcaggctgggcaatacttcagcaagtcttgaacacatcattttcgagatacatttgtaaactgtagtacaacacgcaatcggtctatattcaactacactcgagggggaatctgttttggggatcaaggatatactggtctcattgaattcctcaagcattatccctgtgttaaagaaactctgaatagcagaacagaattcttcacccaagataggtcacattctcttgtaaaattccgagctaaaaccatccggacctggggattttatgctgggaatgctgaactttgctttcttgatctatttcctcgtgaaaggacgagttaaaaggagctgctgatctaaagaaagcttgtttccaaattcaaggcaatgaatataatggtaataaggtctagcactacccatgaaacttttaaaatgatccataaaatgcttgaccatttctgagtaatcatcaacaatctcatcattctgattcttgaagaagtctatccagttctcctctcttctttttttgatgcacacataaaagtaagcattattctcatctcctttttgcaaccaagttaccttgctcctttgtttaaggaagctatgaagcattttatccctgttacaaaactcctcagctgctgccttttcgacctccaataagctgatgtttcctggatcagattgagcttcatgccttgaacttaagtaattatctttggcctgctgatagtgaactccacatctcccactatcttattaaaatttctgagaacatgtttcagccgaagacacttaagatgaatagccaaaagacctgaagcttttatgagtttgacccaactttccatcaccacttgaacaaaattttcatgctcagtccagtgattatagaacctgaaaggctttatcccaatgtcctgagtgattgcagcggaaacaacataagaacaatggtcagataaagtctcccaactcatattgacaaacgaattaggaaacaaatccaaccattcttcattcttgaagacatgatcaattctagaataaattctatcacttcccccttaattgttggaccaagtgaaatgagacccagttttccttagagcgtcagctaggcccagtgctaaccaattggtagcatccccaatttcagatctaggaatttggttccccccactcctgtcaccaaaatccataactgcaataaaatctcccattataatccaaggtttggacataatgggaagattagccaaaccattccataaactttccctagcctcccccatattagaaccatacacaaaagttgccaaaaattcagttttatgacaagccatcttgacttgtaaatgaataaactgagtagcctcttctaaaaccttaacctgaacaaaatccttcttccaaataaccaaaattctccccttaatgattgggctagaataaaaattccacccaacaaatttattaaacatagtgtcactaattttagagcctctcatattagtttcaatgatagcccctaaaccaattttccttattctacaaaaatctaccaccgcctctttcttcttatcactattgaagcctcttatgttccaactcatgatattgcaactatccattagcaatttcatcaggattaatttcctttttttcaccaccattttgaccctgcagaactataaaggaattgctttctttctcatctgcaacctcaatcttttgctcaactatcctcttactttgaacttttcgcttgggagttttccattcacccttagatcctccattatcagtgaccttctcggcttgcaaaggttgagtagaatctttcccctgcttctgttctgtaacaacaaccatttcagcatcattaatcttgcttgcaccccattctttctgaacttgtttcgacaccaccttattgccttcattgctctcctttttcctcctacaattagccattaaatgaccataactacgacaatttttacactgaactggtagccattcatactctacaggcagctcaatcaactgcccatgttcattcaaaaattctatccttcttggatgctcatcagagatatccatctctaccaacaccctagcaaacttcaccattgatctctccttggtgactttatccgtcattataggtttccccaatgtactcactaatgcactaagacatttggtaccccaatattgcagtccaagatcatatagacggatccaaagaggaaccgatttcaccaaacttagagctgttatatcagacgaccaagggcgaattctaataggttttttatcgaattgcaatacaccttcctccagcaccagatttcgggtcactgtatcattgaatttcactatagtaaagcctccattcatcctcacaatctgttgtatactaagcttaccccatttctgtttaaggaatccctcaaacacggaaaacggagggttagcccctaacaccatacaaacaacagcagtgttccatatagcagcttggtctttcacctcttccaaatcaacttgagctattttcttcccattttcagaataggttcagtataggaaagcttaggttcagaaatcgaaaacttacattctgtaaactgtttccatttttgttgcgaattcgtgtacgaatcatccttctcgacttcatctgcccaggagccctgcccttcgttctgcttctccgtcttcgagccaggtttcagatccgattgaatgatgtcctccatttgcaacgccatctccaccaagttagactcagtcggttcatcctcttgctcaatcagattgtcttggattgaaggaggatctgttaggttcagtgtgattgcaggcttccgtaccactctcttctttttcgccatggaagagaagagctgatactcacgcctcttctaatttttaattagggtatactgttttttttttctcactttttcactctctcaaaaaaatttattttattattatttaaaaaatacaaaaaattattttttttctttttctctgttttacattttcttactatattcacactcaaactatttcataatactatttttcattaatcaatcacatttcataaaaaaaaaaattaattaatttcttttaacttttcataaaatatgattcttttactcgcatttttttcatatattttttaatactctttatattacacaaaaattaagcatgcttcatatatctttctctcttatacatgattaataaaaataatttgtatatgtgagtccatgctctctcctttatgtagttgaaaacctatcattttggtcggctgaaacattgagggagactaagatactttttgaattcagagcgaataggcatttacaaatagtctgaaataagggtacgatctctaagagtagtgttgggggaaggtagagagaggatttttacaaattaacacattggcctgtggccagctcatactgatgaagaatctctttgatcacattacaaggctggatgttggcttgacagaaaagaatgctatcatcaacaaagaagaaatgcaagattgcaggagtatttttagatatattaagctcggacaagagacttaagtgctcatgatgacgaataagagaagagaagccttcacatcataagaggaatatatagggagagaggggatccccttggtgaattcccgtagaaggacagactgaacctaagacacgaccatttaagttgaattggtaagtgacggtggaaaagcatctggatattagatggatgaacggattaggaaagacaaaacttttccacaatacactagatgaatttttgctcaactctatcaaaggcttttgccatgtcaagctttaaggccatccagcctttcctacctttagtcgtaagctttatggcatgagccactttctgggcaacaataacgtttttcaaaattagacagtttgggagaaaagcactttggttggggctcatggtattattaagtgttgatttaagcctaatttaaagagttttagatatgatcttataaactatgttgcaaagactaatagggctgaagtctttgatagtctttgagggtttaacctgagggtgataagtattttgtttagattgcctatctctttaccatgattgagaaagctaagaacagctttaaagacatcctgctttagaatgttaaagccatcaatgtcaggagctttttcaagaggtaactagaaaaaagctttttgaatttcatcttctataaaaacttccaggagaggggctttataaagggaggagagctccttatcaatgccaataagagttctggagatatccttagaagaagggtttgaggaagagaaaagactcttgaagtaattctctatttccttgataatttcctcgtcagaggaaagaaccttcccctcatcatcagtgagctccttgatctggttaaaggtctccctttgggaggcaaatttatgaaagaattttgtcttttgatctccatgctttaaccaattcaccttagatcgttatttctaataaagctcttcttgatggagcgatttgtcaagatgttgttgaagtgatttagctcgatccctcgtacgttcatctcaatgtgaattgcaactgaccaactcgagctcttttgaagtcacttcaatctgccttttgaatttgaaattagatttatggttccatttttgaagattgataggacagtgctcttgaagtcgcattaagttgcttatgggatcgaaatcgctagacgaagacctccaataatcaacaatgcgcttgtcccagttaagctcctgaagccaaacatttttgaagagaaaatgcttgggtttagagaataatgaaaggttggggttgggtgtgagatggactttaagagccctatgattagagccaacaaagcccccatgggtgagagtggcatttggaaaaaggccagtccaattattattagttgtacaccaatctagcatctcttggatgttaccatggttagagtgattattattcaaagtgtaagtgggaccgtctaactctaagggaccgaggttaaatatgtcaattaaattacgaaaattatttgagggacttttgtccaggttgccctgatgtttatcattgatactaagataagcattaaagtcaccaatgatcatctatgagcttcaaacattattttgaccaacgtaatggaaaagtttccatatgtttggccctatccaaaatgttggggacaccataaatataggtcaaatgaaaagagggaacatgaagagaggaagaacaaatataactgtcaaaatgatttatagatttgtgcaatgaactttctgattcatcaaaaaacaaatgatttatagattgattcaataaagttatagttacattagaagttcaaagaaacaaaaggccaccccatacctattttacctacttccaaactattagaaaagctaagcctatttttaacaatgtcaataaaactcaaggattacaagacttagctaaatgggagaggtttcacaattctcatggttgtgagcaggcctgctcaagggcagcacctgcctctgtgatggtagatattgttgctagagttggagtggacttgacatgcttgactatggagcgggagactccatcgaccacgagagactgcttcttgaaactatttttgtaatatccaacacaagtatattatttttggtaaattattgtgtgttttgatattttattgttgcattaaataaaatatgaatattattggtatttgctaagtacaattatatagttaattagattaagtattaatt

SEQ ID NO: 25039 - DNA, 1356 bp, Cannabis sativa
acagttgattttgatccaggccgcaatgcacatggtttctctgccaattctgttttttatatatatcatgtaagctttatcttttatatctaaataatttaacagtgggtattagaatagatttttatctctggcttaattcatttgagtttatatatatatatatatatcgattggtatcatgaccaatctaaattttctcatatatatatacattcgtatttattattttatatacatatatataatcatattcataatcgtatatataggtatatatttttccatatttcggtctattttgctcgaatctttaatttttcattttttcattatttattttgatttatttatgcattaatacattcatataatattatagatcgattttgtatatgaaaacgatttgaaagccttaaaaactttgaacttttttttttgaaaaagtgtttcggacccaaaagttttttgtaacattaaagtcttatcttcacatgttttcgatacataaaatctatatgaatgccttaatttttacatttaaattcatttgaaattgattaagtttattttggtcgtcagaattatcattttcgatcggatttgggtcgagtccactgtgacctacgtggaagggaacaggtcaaagtgaccagctaaaggttgaagaagacccaaacaacatgtcattttctccaattttatacaacctctcttaatgaaaaacaacgtgtcatttttgcctatagcagcagatttttatggcagtagatttttttgaaaaaaaaagaggaaaattccaaaaaaaaaatgataaaattttattatttgaaataataattaatttttttatttgtgttaatttagtcaataaattgtatttattcaatttttttcattttttatttaatacatagatttggaatatgttatttggtataaattaaaattggaattcttttttatttggtaatttattacatgatttatttaggcatacgagataattgtgctaatttttatactgtgcaattaagtatgtattatcaaatttaagtaatttattatctaaattaataatttttgaaaaatttgccattaattatatattatgaaatttgcatttattttatattcatataataattgtactatttatatttattttgtaaatttattattagtgtaattaattaatatttgtatgatttaaatattatatataaatttcataaatagtgctagatatatttaaaaagaattcaaacattaagatatgttgaatattatatttagaacattaaatttcattaattttcataaaatattataagacattcctaaaatgaataaaat

SEQ ID NO: 25040 - DNA, 2265 bp, Cannabis sativa
ttagtacttacaactttctttagactgattactgtaaaaatatgtgaagggcaccaaatgtgtactttgaagatggtgttgctatcaatcttgaagctgaattaactagaagtcgaagaattaaatgtagttgctgtggaattaaaggtgctgccctcggttgttatgaaaagagttgtcgcaagagtttccatgtgacctgtgccatgttgatgccccaatgccgatgggatatagtacgtgctaatttcaacttttattggtttttacttgtttttgtattttaaaagaatatattctaagcttggtttgtatttcaggaaaactttgttatcctgtgtccacttcatcctgaatctaagttccacagtgagagtttggaatcacaggcaaaaaagaagacttgcaactcgaaaaagtaaatagacccttttctgaaagttccaattatttaacattaaccagacaaagaaatactgaactaacttttttttcatgatcatggttaggctatcatctgttaaacataataaagttaagcatgatcttggtacctctcctagatcatctgttcaacctagtaaagttgctattaagcaagatcttgctaccactccaagctggaattcctgtggaatctctaaaaaaatagttctctgttgttcagctctgacaaattcagagagggtaaggaagattaatgtatttattaagtctttccatcttaacatattttaactgtaaaatctaaataatatcctttgtgggtcggtactgcaggaaacagtttctgaatttgagagaatttctggaattacaatttcaaagaagtgggaatcaaatgtcactcatgttattgcatcaacggatgaaagtggagcatgcaaaagaaccctcaaagttttgatgggtattttggatgggaagtggatactaagtatgaaatgtaagtagtactaaatcatttatcaaacatttctaatgcgtgtttgatttggactctaactttaaagaggattaaaacctggttatgtatatatctatcatgtgataaaagtgctgctcataacctattattttgtttcaattgtctatgcctgaatagggatcaaggcatgcatggaagcaatgaaacttgttgatgaagagtgttttgaagttactgtggacagtcatggaatccaggatggccctcggcttggaagactcagggttcagaacaaggttggttccccataaccttcacaaaatcatttatttatcttagctcatcactttttgtacttcttttaaagcgcctagcttaacaacttaattaaatatttgaaccattttttgatattgaatgcatttttctgttatttttacctttacagttagtactaaaactctagtgataatctcaagtgagcacttcgcattattgtatcatgacattcaaatttataaactttcttgttgcagcaaccgaagctgtttgaaggatttaagttttatttcatgggagatttcgaatcttcatacaaaggctatctacaagatctcatagctgctgctggaggaactattctgcatagaaaacctgtttcatctccccataaagagatgctgttcagctctttcaaaagccaaacgtatgttatttacagcctcgagcttcttaatcattctgatcccaccaagagggacgagaccattagccataggcggtacaatgcagaggttctagcaagttcatctgatgccaaagtagtaagcaattcatgggttttgaactccattgctgcttccaagttacaaagtttctaaaaataaaatgcttgttttattatttacaaaaagtcatgtacatattttaggccaccttttcaataaacattagaaactttttttctcatagtggtgtagtaatataaggtatttttctttttaaggtgattttgtctctttggcatgtgttaatgattttaaatcaaactaaatattaggaagaacatagaaaaggtgaacagtactattaagagttgctcaaacttttcattatcatctcttgctttcaaagaaaaggatactaaataagaagtaaattggaattatacaacagtgtggggcaggggtaagaagtggggtcatgtcaaaacctggaaaaaatcaaatcacacaaacacccaacgtgctaaaagttaatgtttctcctttttgacacatcataattgattctctttggccttttctcaaaattccaaagatagtggtacaatgttg

SEQ ID NO: 25041 - DNA, 2593 bp, Cannabis sativa
  modified_base (2563)..(2567): a, c, t, g, unknown or other
gacagatcactcaagaattggccaacgtggccacatttaccaaaacttataatataaaaataattaatctaaataaaatctttaaaacattaacaaaaacttaaactaatcagttccctcatttttagggctacatcacagaagaacaaagagagaggagcacgaaggagatgaagagccctaatttttagggctatatcaacgaagaacagtggcaagaggagcacgaaggagacgaagaagaagagaaagacgtaggagacgaagaagataagaagataaacacaaagaagaggtaagaaaatggcttacatgattgtgcaatgttgtcgtcatcccccaaagagagctatgattttcacctcttggactaatgcaaacctaaatagaagattcgtgagatgtcctctgtataattcttcttgtgttaaccatgacgtttgatcagattaattaacaacttgctctcaatgaaagtaccacaccgttgacctcaaatttggccaaccgataacggagttgtatttaatattgatgcttgacacgtgtcacacaataagaataataaattacataagacacaaaattttatagaggttcagccccctgagttagttggtaatgacacctactcacccctttttgggtatattaatataccagagataatacaacttagatcacaatagtagtgggatctgaaatggctctcttaagatcacaaagtgagaaccaaagttggccaatctcaagtgacaatgcttgggcgtgtgcgagagagaggagaagagagaagtgagttttgaacttagaactttagagctaggactaagagcttaagacttagggttttagggttaggctaatgctctttatatagtagttacatgtaggttagcaacagttgacctcagaattgtccaatcgacagcgatctgtaggttgaggtctagccgatcatgtgcctaccaggatcttactggtcatttttattatacccgaattttggctatactttggaagctaacacgtatcctacaggaggaatatgaatcaactatgatgttataataatgttatatcattaaagacaaattaaataacttgttacaattcaataaaagtttgatagaaaatattcaaactcgttgattgtgtagtcttcagtgagacaaggataataactattaaattgatattgacgagacatatgtctgcctcgggatacactcagagaaatagacaataaaaggatattcatccactcaagcagaataaaagtaataacacacaagagcctcgcgttacacatatcgagaagatcaccccgcaatactgatttcaatgaagggatgcaacgaggtgaaatacctcccaacacttagcattttttcctatcaagatggacaaaaaggataactcatgccagacgagacacaaccttctaagtgagcataaccttctaatggataaaagtaaagaatggttgggtagttaatagatattatcccatgtgtgattaaatgaaatgtgggaattatccacgtttcatgaatagttatatttgaatcaatcccaaaaagagtaactgcctacctatattcctataaataggggcagaatccatgggaaaagggacggcaaaattgagagaaaaaagattacttattcaaaaattgttaatgtaatctgtactcaaaaaatatccctaatgataaggactcgtggagtatgtaaattttaactacaaaaccacgtaaaaatatctggtgtttattaattatatatttatttctctggtatatttattgcaaaaaggctatttgttttggttaacgaaaatttgtgttaacagtttggtgctttcattgagagccttggtgataaaaactcagaaaaaatccatccttataaacattatctacccatattcaatggatggtgatgattaacgtaataataatcaacctgaggaaacaacccatcatcctggcaaagaacccatgggatctcaaagacccaacacttctgaaatgccacgttcaagaagaaacgatagtaataatgaacaaaactcagaaaggaggaatgagggtgccaatgactctgccagatacgtgcctaggagcgaggatgcttgtgatcaaattaagtatgtaccattggtagagttagaaaatacacaacttctaaaacaattagttgaatctaatcaacgaaacgctgaattagagagagaggctgcatcacccaaggcggtacagggaacaattcctcagaaccaacctgatcctacggtaagaagactataaggaagacctcaaggctccaaaaccagaaggcagtaaacaaactaggggaatcgccaaaacacccaggaagaacaacctggggatacaagggagtcccaatggataatcaaaccaatcctaataatacaaggaatcaagaacatcaatgagatgttccccaaacttcccatggatttgctaacagagggaatgaacgaattaatgtgtcagaagcatctcataggaatgaagtgttggattttatgccctannnnnaactccatttcaatgtaatctatttt

SEQ ID NO: 25042 - DNA, 3995 bp, Cannabis sativa
tttttttttttttttgcttttgttggatttgaatttgtttgggttttagtttgattttgtttgaattgaatttgacttgggttttattttgattttgttgggttaagaactaaaaaataggtttcgatattggtggtggtggtttcggtagttgtggatggtggtgggcttggtggtgttgatagattgaagcagaagaaggttgaaaaattgaaaataagttttgataatggtgtgctagtttcggtgggtggtgggtttggtggttgtgttatgattgtggtggtgggaacaagaaggtttcttggtagaagaagaaagacgaagaaggaaaaaaagaaaaaaaaaaaaaattctaattttgaaaatttttaaattattttttaatcattaacattaggttgattaataaaattttgtcacgtgtacacgtgtgtacacagtgatagtccactttggtacttaacaaaccaaagtagagtagagagcaaaacaattatgtagattggacagtttagcctttattatttcagtctagggttgatcgtgctgaacttcaaagttcacaaaatttggctgtaaattactcttatttatttcatttaaaaaaatgtcatattttttttatatgtaaatattattttggacttataatttacaaaaattactaattaaacgttgtattttgttaaatgtcaatttagacccaatatttttcaaaagaatataaaatataagaaaattctataatccaccatcttaaaaggaatgcaccgatacatctttattcattttagtatctgaaataattttttactcaaaatttttatcatggtcatataaattataattatttaagatatcctgcaaaattttaagaaattcgataaagtttaacacgccgaaaatagcgttcaaacagtgtgttgcactcgtgactattttattttatacgcatgtaagatagattgtttaaacattattttctatattgtaaattcttctgaatttctcaaaatttcgtaggatatcttaaatagctacaatgtacatgaatatgaaaaaaaaatagactaaaaaattcttctggatgccgaaataagtagagggtgcatcagtacattccttttaagggggtgcattgtagaatcaccttaaaatatatcatgaattcaatttttaacaatttatttttttaggttattaataagttttaatttgatgaaaatgatatgcaaggcttattttgtacaattttgaaaaatataagatttgaatttttatttaaaaaaataaaaatttcaatctgtaatttttgtaaaacacgaagttctaaagtagtatttaactatttttttaaataatggtttcttccgtcatgtatttcgtgtcataggtataagtccactccaacgtgcaatgtagagtgttggatcaagcttccaagccacttgctgctactcatttcttcccaaattactactgatacaaaaattaagaatttcatatcaatattaactcaaatttattctttgtttatggcagaggaagaggtcgtgattgatattcgctcaatgatgagggatcatgaagtgttctccacattttgtgagctgaatctttaaacacgatgctatcagtgatctcacgagacacaaattgaagaatccatgccataaccatattgttgcattgatcccaagcagaacgaaatggatcaggtaagtggaagacaaggatatagtgttgtcaataaaaggagttttgttcttggcaatgatactaatcaaagccgcgtgcctccatgactagaatttttttgtccagtcaagagaaaggaagcaatgagatggtttgggtgatctcttattcccagatgatacagattgcaatcatcatgagaaggtcgatcatatatgccacaagaaagggcttggtttccaagaaaggaaaagttaccattgaacaccaaagcttaagagtgaactagctagcggaaagacaaaggaacctacttgagctgaggtcggagctgaaaagaaagaggacagcgacagtaaacttatgggcggagctgaactaaaggaggccgagaccatcaaaaaatgaacaacagatggaatagatggtggaagaaagttggagtgaactggagacaccattgaagtcacaggcggaaagaaagagacggtcagagatgaagaatgaccgataagaatggagctgtggaaatcattcaaagcgagcccgagcgtcactaatttgggaagatcatttgagatggggccaatcatcacaaatctggaaagatcaattgttatcctaatttttgcaccatgacgtggcatctgactaagtgacacgtgtctcacattctataacatgggcggatgattatactcctagcaggatatgcaaattgagatgaagcataaagtcatacatgaatggtaggatttctgaacaaggtcactagtggacatccaaccagcctgatcacgtaagtaactcgcatgcaccgactaggggatatgagttggcaatttcagagaaggacattgttatttccaagcttgcatgtcacgaaaacaatccctacatttgtggaattaattcttatctttagagaattaaggaaattagcttagattttccaatctcttttttgtaattatggaaacatgttaatttcctattttatttgttatagattgagggaaaccattcttcatgtaattagtccctgtaaaaagttatttaatctcactattcaagaggacgaattgattcagagagaaaagactcaagagtgaaacctcgaactaatagtgaaatactcaaagattattgtaagagctttcgagaaagatcagggtattcttgctcactcctcttacaagttaatataacaaaaaggggataatttattaccaaatatagagggtcaaacctctataaatctggtaatttttttactttatactctttattttttgttatttaattattcttatcactttaattaaactcattgtcattggctaaaaatgtggtcaatattttggtgttttcattgagagcaaagacacccaagttttttgtcttgagtcttgttatgctattattagcctattatatgtgtcatttttagagctaattttctttttcattgttactttttggaatagaattacgcttgttttctttagtttcaagttttgacaattggaatgtataaattggtcaaattttagaaaacagtgatctataaaacaaaaaaaaaaattgcatgaaaataaagctgaaacttcaaacctgaattcaactatgttctgatcagattttggagaaagttaaaacacaaaagttctagatctctctttcagctttctaatacatcttgaattatccaattctgagcaatattgaaagaatgatggccaaaaaattattagtaagcttcctgccaaaaagttagagtctaatacctcaacactagatgctagtgtcgagggtcgtgcccttgaattctaaaagttgattttttttttatcttttttttatcatttttcggctataaaaatgagtggactttcatatttttcatcaaataattagggagtacgaaaactagagaaaagaagtgaactagaaggcttttcaacagagtttttcaacaatttcttctcttctgttttctttttatgctcttatttaatgtgtgtagattgtttacaatgaacatgaatagctaaatagttattagggtgttgatggagattgtttgacatctatttatagttttaatatgatttaattctttatccaattttctatgtgctctatatcatttgttcttaattcttttaattgtctgaccatcaattaaatgtttatgatttcgataagagatctgagaagtgagtatcgattatgctataatgaaataagaacaaattttgatataggacgagagtacctatatgatttggata

SEQ ID NO: 25043 - DNA, 2901 bp, Cannabis sativa
  modified_base (69)..(76): a, c, t, g, unknown or other
atattatatggtagttattttgtgagatatattttaaaggacaaaattatcattatatatttaatattnnnnnnnnaaataaaaataattaaaatccattaccgataatggcattccttacaaaattggtgggggaagttctccctttcttttctcccttatttaatcaagttctccatttcctaattttaataatgcatgtaagtaaataaatgtaagagaatgattatcttaccattgattcccattacatattagtaaacatgccatgtgtatcaaatatacactatgaacaaaatagtgcaaattaaattggataaacacgcttattactaaacccctcaatatagttttagttgtataattaattaaactgaaggaatacatgcaatttgtttttaataaaatgtgaatttgataaatacatataatgttgtccaaatgaatatatatatatgtggaacactttttaatgggtattacccatgaatggttactaaaaaaaattaactataaatattaattttaaaaatatcaaaccatcgaattttgatttaataacgaataatgaaatcataaatttgaatttctatgcttaatttaacaacttaattaaaaaaaaatatcaaaaaatatctctttttacactatatcaaaaatatgttcgtacaaaaatatttaactcaaactcaacttttccttttcttattatttttttaatttttttttttaccgatggaacaatctcagcctatatgacataaaatgagagatttttgtaattagatagaaaaattaagcataaaaattcaaatttttctaattttatccattcatgagtaatacccattaagagtgcttatatatatatatatatatataaaaattatctcatttaattaattttatatatgtgtggtatagttcctccaaataaatagatctccaagagttgtcctaattatggaaagttagatgtcatccagaggatgttcctggatatctattggttccaccgaaaaggagtctccagagaaagccggtcttcctctagaaagggagtttcaaatggctagttgttctctcatggaagggagtttggaatagtcaactccatctataatcttcctatccgagaagtcccttcagcatgcgcttcagtccttggtcccaaaaacgtttgtctcatctagaagcactttgactttgtgttgacgtggagatattgttacgataagtttgttaagtttgttaagtcataactaacttaaaaacttagtatttgtacccaccaactttaagatctatatcatgagcctatatataccacctccacttatctattcgagaaaaaacagaaaggagagaacgagtttagatgagttagaagaggtgatttcaaagagagagtttgagaggtagagagagactgagtttgggttttgtatgaagaattttttgtagttgaaaaagatttttggttaagagtgtgagagatataaacactttgacagaatacaacaaagaattcatgttgattgtattgtatcttctttttcttaatcaataaagaagttttcggttgtgttctaaaacaggattagagtcatagatcacattgatctattacacttgaatcagtatatatcttggtgttaattttattgttttattactttaatcgtctttggttttaaatactatgttcatctttgtttgaatctcaggttattgtttgtgacttattaatcttactattgttaattgtttgcatgattaagttttaattgatttggttctgcatattaattgtaatttttctacaaatcaaagcttaataatcgatcaaaaatgtgtagaagcaagattttttcgctacaattcttaaagaaatatgttttattattttttatacattttaaattttttcagtcaatttttatttttattctattttcattttcatatcacttttttttactcccaactaaacacaactttatattcttttttggattagttataagaacaaaaagtcaaaacacaattaattaaaattttgtattcacaacaaagttaacggcacaagaatttctagcaggctattccaaaatgcctatgaattcgatgatacttatatatattatagtactaaatctcacaatatatatgtatacatatatatatatatatatatattcaaacaatacaaccatctattctaactaataaaaacaccatttacaacataatcaaaccaaaaaaacacaaagatggtgagtggtcaactttgccatgagctagaaatcaaggcaccagccagccaagtttgggagctctatgggactcttcgtgtagcaaagctcatcgaggaacaactcaaatctgttatcgaaaaaattgatgtagttgaaggcgatggcggtattggaacaactctccacatagattttgtccctggtatgtattcatcatcacatcttttaattgtttaatttttatcaaactaatgtttaccataaaacattcctcaggcgcggccaggttcaagagttacaaggagaagtttaccaagatagacaacgagcagcgagtgaaggaagtcgaagtggttgaaggaggataccttgagttgggcttcacactttatcgaatttgcctcgagatcatcgagaaatatgaagattgttccatcattaagtccaccattaaatatgaaatcaaggatgactatgctgaaaatgtttccattgtgtctcttgatgccctagcagccattgcccttattgtgcaaaatcatcttactaagacttaaaagaaaaggaaatcattagacatgatatttccaacaataatttttacatgtttattctggtactgtgcacattatcattgataaat

SEQ ID NO: 25044 - DNA, 3970 bp, Cannabis sativa
  modified_base (2170)..(2178): a, c, t, g, unknown or other
ttcttccttgaaagtacctatatcgttgttattcatgaagacaaagcagatggaaatgtagaatcgtcgatctgatacttggaaggcacctaggttgacaaattgtcaacttgggcgttgggtgctcaggcaccgggtgctaaaaaatgaacttgctctacatctaattctaatacctcaaatatgtttgtggtatgtctagctgattccctaatgaaaatttttacccattggcactaatacggtccaaaaaactaaaaccctagttgggaatgtcaactagagaaatgggtgaaaccctaggtgcccaagttggcttcgaaggtcttgattcgtgtaatttcacctcccagggcttggatttcattgctccatgacttcatggtacgtaatactgaaagacaatgagttgaattcaagttattgaagttagaactttcatcttggagctcccgaagtcaacctggcgcaaggctagggtcccctctcaaatcaactgctatgacttcggtctagtgaactccataacgtcatcctccttgtcacatgtcaaacattgatgtccacatcaccagagaaagtttctgggtgaacataaagttcttactacttctaccaatggtgtaatcaaagttacggcaaacatttccaccaataccaaaatcaacaagagaaagaaatggtaccaatgcaaaaggaaaaggaaaataattctaatccaatgaataattgtagtagaaactctagtgtcaaaagtttttttagcaaagaatcaaggtatttctaaataaatcttttgttgtggtaacatgtattttagaaaataattaatccatttgggttattgattctaaatctactaaccatatatatgttcatttttccagattaagaggcttaaaacttggtatctatatttgagcgagtttaggctaagttgggattgttaggtggtgttggtccaagctagaagacaaagcttttatttaaattcttgaataaattgtttatgttttaaaatattattttattccagtttaattgttgaacttctatttcaatttctagttttaaaatacaaaaatcatattacaattttgagaattaatttaattttaattttctcttaaagaatttcattataagttatttttatagaattaaactttatattctgtgacctatccttttttgcctataaacgtttacttaatatttcttattatcacaatcatcatgtgctgtctaaataaaatatctatggtatgcacttcactaactcactaataaaactgttatctgtgttttcacgtatgaaacatttggcatgatcaaaagacaaggtgtactagcaaagtggattaattgaaataagctcataagatatctcagagggaacatctcggtcatcctggaaatatgtactagacacttgatagaatgaaccattcacgaacaagtaatatcccctggactcgaaagatagttgaggtaggcgattcctagatggggatcccttaagtgatgaacccggggtccaaaagcagtctcgcaaggattgaccacgttagcatcatataaacgttgctttatagacggttatgcctttttttgacaccagattagatcttgtcccccatgtcaggcgatggtagtgcgcatacgcacctctggacataccttttgcccaatagccttaatagagagtatattgcaaaggagagatcttttcgtgacacgtgttttggtttgtacaaaatctcccagtgcagctatatgccacacgatggtcagatcttcctttagcaatatcgaccttgggagcgtgtggagtgcaaaaccctaggtgggtatataccctttaccccatgtgtgtctataaatactcctatcttctttgagtagggagtgaacaatttttttatttaccaatactctgctaaaattcctagagagctttctcgtaagaagaaaaacaagaggagtacagagatcattattgtaaacaattgcaatacctaaacacttgcctaaagagggtagtactattggctcgtggactaacgattattaatgcctaaaccacgtaaaaaatctgcttgtctattatttaatatcttttatttacttaagctccacatatttggttttcgaaaatctcggtaaatannnnnnnnntttcattgagagctgaggaaagttcagtaaccctcgtcgtgcttcaaccatggtgtacgggtaagaaaactgttgtagatacgattatggaggaagttgactcccatgctgccgaacctcaagaaggaaatgatggagagggcgtaaaccctgctgagaaccaagaaggtgatactgagaatgtcgacgatgatcttggtgatagccaaaaccctgggagtgaagaggaagaagaaggttacgacggggagtacgtagaagatggtaactacatggatagttatcactacgaccatgaccctaatgtgatgcaagtaacaaaagagttagaagctactcaagaggaattagtagagcaaagataactcactgcaaagatgaagaagatgatggaacaacttcagagctagtttgacgacttggctgaatcagatgaggaacccttagtggaagttgtggacgaggggcgaacccaggaataaactgaagctcaaatctcaaatttcaaacccttgtaaggataaagataaaggcaaaatcgatgagctcccaccaaattctgctccaaaacctcctcaataagtcttgaccatggctggtcagccctcaagacgcagaaggccattggtgctttggagcctagatgcccttctgaccctcgaggagaaattgtgctaaagggaccaaccacaagaatacccaagccaagaaggcaaagtaatccccctaaaaattctaccgattgatatgggaggactcccatgggtcacttcaatgaaaattggtccaccgcaaatttgtgacagcaattggatgctaagtacaagaggtacaaaagtaagaaggcaaggtcacgtgggtgtgacctcaaaaataatttgagtgataagatgagggggcatgatctccctgaaagcgataccaagaggttggaagaacaaattattgtgttgaccaagttgattaagaaacaaagtggagcactgtcagattctaaagatgaagatccgaagccctacataagaaggattgtggaaactccattcttagaaaactttaagatgccccacattgagttgtatgaggggaggaatgatctgcgaacacatttggctaaatacaataagatgatgcaagtaactcgcgtcagcgatgatgccaaatgtttatgcttctctctaaccctcactaagtctgttgaagattgttggaagcgactggcctcgagattgattgatagttcaaaggatctacaatcggcctttcgtaaataattcattactacatgggaaaaggatatggaagtaggttcactcaccaacgtcatgcagcaacataatgaaagcctgaaggattttatccaaaggatgatggaggcagccgcaaagaaaatgttagtgatgaccctctaatttgggttggttgtaggctccctactgtggggagaaatacagaggaagagagttgaaactcttagtgagtttatggcaaaagcacagggtataattaaccttgatgacatttatattcaggccttgagtgtgcctttgacactaactccgacaacggtaactcctagttttgcatcccagactccaactttagctttgtcccttgccaaaacccaattttccccgactgtctacgaatctacagcatccagcctcacccctacatatacccacttctctaggtatggggcggcacagacattatgtaacgtggctcctaggtgagctaaaactatcgtctcacattctagtgctgggcattcacggagcaagaggggggg

SEQ ID NO: 25045 - DNA, 2982 bp, Cannabis sativa
  modified_base (38)..(66): a, c, t, g, unknown or other
tttccataaacctcgctgattagcaacgagctgcacannnnnnnnnnnnnnnnnnnnnnnnnnnnntgttagttagggtgttacacatctatggtaggaacattggttttgtccctatgatagagaagtttttatagccatagataatagatctaatggtgataaatagataagtgtataacaataattaagattacactacattggattatttataaatttattatttaataatattttaaaaatcaataataatttaataaatcaaatttaaaaatatattctgactccttctttccttctgtctatgtaatcgagtctctcataacttctctttctttcttacagccctcgcttaggaattaggatattattctcacttctcaaaacctccatacatagatcaccgtccaaatctccgatcaaaacttccttatggttactttgaccgcatcgacgagtccacctcctccagctaccaaggatgtgtgaagggtggaaagatcactaatagttttagttcccctttttcgtagcaatttatggttcattaattctcctctagctccctatgttgcaaaactttaatatggtgaagtttgctaagatgatgataaataaatttgtgtgatgagttcctgccaaaaaaaaaaaaaaaaaattatgaaggacacccagtatttttataagggaagaacccaaaatggaatactgattattgaatttttattgcgttttcatttagattcgaaattgatatttaagttattcaaaaaaaaaattgatatttaagttcttaaaaaaaaaaaaataaacttaaatattaagttcaaaattttctgaatttgatgtatatttttgggttgaataaagaaatatagttgttggttttattaaagctcataaaatgtttccataaataaaaaattaaatgaaatgaagtgaagtgaaataaaaataaaaataaaaattagaaggagagactattgattttatttttcaatcactcaattatgataattttacctagaagaaggaaggtgataatgaacaataaatgtgatctttaacatataaaaaaaattaaaaataaattattaaaagatattcttacatctgtccaaaagtaaaaaaatttgttttgactcgtgacaagcttttcagttttttattatatttatgtcagatttatatatatatatataatataaaataaataaagaataatataatacataaaagtactacatcatatatagttaatataaatatgtataagtcatatgtatttatgaatagaaaagtgtttatatggttagggacaaaaccagcatctccaccataaaaattttctatatatatatataaagttgataacaatgtagtaaaacttaaatagaaacacttaaaaagcattacaatccttacatataataataactatgaatattagataatctcatcataatattaagactattatttacccagtatcacccatataactttattttttttgaaagaacccatataactttattaatttttaaaattgagaatgaatggtgagtgttgaaaagggcaacaaagaaagagtatccttgcatataataataaccatagatattagataatcacatcataatattaagactattacttacccaatattagccatattgctttattgaattttaaaattgaaaatgaagggtgagtgttgagaaaggtaataatgaaagagatagatactattttgttaggtttttatatgtaatacaatagatacgttttggtttggtacgatgtacacaatgttttttgtttttttttaattaatgttttatttaaaaaaaaaataaaaaaaatgagaaaattaggggagaaatatatagatagatgtatttagaataattttttaattaatattaatataaaagaatgagagaattaaagagagaatagatgaaggtatttagagtaattttagagtgtcatgtcaccgtcttatacctctcatttatatataaatagtacttttgggtatagattgatgctatcacagcggtacaattataatgtggagtttacaatgcgattataatgctggtagtggttgatattatggtcaatcgtaccaaattaaagaacgttcttgattcatctgaagccttgtaggtaggtgtatgggtgcctagttgtaagtcagaatatatgtttatatattttatgcttttcttactcagtctgttgactcacatatatatattttcatgtgtaggtaaaagataaaactgaactgaaaatgagcctgaagctttatggagattggacatatcaagacgaattgacatggagaattctgttctatgggacaacatggccttaattatattggtcgctaggagacgttttaagttattacattttggtcatattgtaaaatgaatcaggatctcaaagtttgtaaacttttgtaaactatattcagtaaagtttgtatttatttataaagttcttattaaacatgttttttgtaatccctttgattagcaaaggttggcacaataatttggaactcactgtagcgtgcctaaactagtagggcgtacaagattgttaaataacacttaattggaattaggtatttaagtgtttaccgagatttttagaaatcgattataattgtactaaagctaaagaaataaatcaaaagaacgagacaagagatttttacatggtatgtggttcaatgactaacgacctctagtccacgagtcaatattattatggctggaaaagcctttgagtattacacaactgttttgtcaagcatataaaccctagaattttccttagctctcaagtattaagattctcaaccttagcatgaatggtttttcttatatttatagacttagtgtaacgccctaaaataattaggcacgctacccgaaaatgcttatgaaaccctaatcccct

SEQ ID NO: 25046 - DNA, 4546 bp, Cannabis sativa
ggaaggctaatgctaggaagaggaaaaaaactataacggggctgctggacagaaatgtgcgttgggtattcgggaatagaaaggtgggacaagtggcttgtgagtatttccaatgcttgtttgccgctcatccagctaccctggcggaattggaggagttccaaagcattgttcctaataagatctcccgcgaaactaatgagtatcttaaagaacctttcacaaaggaagatgtctttcaagcaatgcgagctatccaccctcaaaggaagatggaatgtcgggcctattctataggaattactggctgatagtaggtgatgaggtctctaaggtttctttgggtattcttaatgaggggaagaaggtagactacattaacgatactctcatttgtcttattccaaagattcagaagcccaccaagatgtcagaattttgacatattagtttatgtaatgtgatttacaagattgtggctaagtgtcttgcaggtcgcatgaaaaatagccttcaccaagctatatcacaagaacaaagtgcatttgtgggaggcaggttaattcaagacaatgctataatcggtatcgaaagcctacattgtatgaagatgagaagatttggtaatggaaggaaaatggccttgaagttagacatgttaaaggcctacgatcgggttgaatggagcttcctagttactatgatgagagggctgggttatgaagaggattggattgagaagatcatgaggtgtgtgactaatgtgttcttctcaggttttgataaatggggaaaggatagggaatttccaaccaacctggattctctgtcaaggtgattcattgtcccttatcttttccttttttttttttgataattcagtgagttgtattgcataaaaccaatcatttgtacatcctaagagcacctcaagaagaggccttaaatttcaaatctatttacaaacatgaatccccatactgctatgccgattacctttaatacaaagattttatcaaatgtttgtcatggctgcttattttcttcggttgatacattgtgagtctcatcttcaatttcctttctatctcttcatttatcctccctacaactggctgctcccctttccaaatcacagcatttcttgatgcccaaagatggtaaatcagcgaagcaacaacagcagatagaatttgttttttacctctactgaattttgatttcccgatcctttggatgatatggggtaagctttcactgcttacactccatccaaccaatccttgagcctgttaagacatgtccttgcgtattcacactcaaaaaataggtgcccgattttttcttgctcatctcggcacaagcagcaacacccatccatctgcaatccaattctaggcagcctatcttttccttatttgttcagaaggtttatcttgtcttatccaagcgactgagagggctgcggacattagaggagttcggtttggtaggaatgatgttaaagtgtcttatctcttcgttgcggatgacagatttgtgttcctagaagggagggatgaagaatgtgatactatgaaacaaatttatcatcgctacacacgacttttggggcaacaaattaatcttgagaaattggaagtgagtacgaaaagccgaatttccaagcaaatgggtcaatgccaattatttggggctgcctagttttgttggaaggaggaagaaagaggtgtttgaggtgatcaaagacaaagtttggaacaagcttaagagctggaaagcgacaatgttctcccaagcgggaaaataaattcttattaaggtggtgatccaagctatccctagttactccatgagttgctttcgcatcccaaaaaagcttatcaaaagcctccactccttggctgccaagttttggtggggagatacaaaggataatacaaaactccattggagtacttgggacaagctttgtaagccaaaagaagaagggggcttgggattccgaagcttaaaagatttcaaccaagcacttttggccaaataagggtggcgccttattcataagcctcactctttgctggcccggatcttgaagaatagctattatcccacctcctctttcctcaatgccaaatgccccctgggagcttcttgtatatggaaaggaattgtgtggggtcagaaaataattaaagaaggggctcgttcaagagttggtaatggaagatacattcgaatttgggaggataagtggatcccctgccccaatggaaccatcctctaccatcatccggattcggaccctcacaccactgttaataatcttcttaatgaagatggtgagtggaataaggatattctacacctttatttccaacaagaggatatcccttggatcatggggacccctattgatacacaaatggaaggtaccttgatttggcctttctctacaaatggacaatacttggtgaaaagtgggtatagagtgggtcgggaaataaatcttagccctactcgttgcttagacatggacaacattaatgctgggtggaagatgtggtggcaactaaaattacctcctcgtatcaagctgtttggatggaaattttgtcgaaattggctcccaacaaagataaacttgcggcataaaggtatgatgattgattctacttgtagtatttgtggcaggtacactgaatctctttcccatgctctttggacttgtgataaggttaaagtagtgtggaagttaatgccttgttacaagcttattagagatagtagaggaaactccatgtttgacttactggtggagttttggcagaagctatccaagcaggagtttgaggatgtgattaaagtcttatgggctatttgggaaaataggaataggcattggaatcaattgccatatatgagtggacctcgactgctggatcggatttttaacagctatctgaatcctgttaactgcagagacaaagagagcaaccacatttctgctcctacccaccacggatgctggttggcccccctgagggagtttattgtgttcattgtgatgctgctctttctcctggcaaggagagcgtgggtctgcggtttatttggagggattggtcgggaaagatcatctcagcaggtatgcatttcctccctattatttgttcggtggttattactgaagcaggggctgttcttacaactttgaagtcctgcccgttggctgaaaagagtccctttgagattagatctaattgcaaggtgttggtggacgaatttttggcaaaaatcaatcatcttagtgctaccaactcagttacaaaccaggtcaaaagatatctggtattctactcttgtacaaagctcatttttataaaaagaacaaataatgaaattgctcatagcttagctaggagaagcctagaaaacaagttaatccattctttttacaattcttttcctgagtagttggctattatttgtaaagctgatctctctcattctttgtagtttgttggggctttgttaataaagatgttttttcaaaaaaaaaaaaaatatgactgatctgaaatgaataaatgattgattaattaatgaaatattttaccatataattatgcatcaaatttacgtataatttttaagagaccttattggagaaaaagtaaatttatatactcatatattataataatatgataaaaaaaaagtgaggcgttgttggagaaaagaatcattacccaatttaacatgattttgaggatacaaaattatccttattccttctatgaaaataaataaataaataactatcctcattcctcgtgtgggcggagaatactcgctccattaagacaagtccattaaaattttcatccttaaatgaagttgaagagtattattttttttatttattttacaaattcacaaaaagaataaaaaatttaaaataataaagttgtacataattttaaatattttggcgatttatataattttatttataaatggtttttttatattatactcttgttaatttgttgattttttgtaatatgtatattattttttgttgttgttttgatactattttccttttacttttatgtagtttttttattcttttcgtattgtttttaaagaaaactataaaaatgtaaaaattaaaaacaaaaaactttaacgtaaaaatataatttttttataaaatatagcgctttatgtaattattttatttatatatatatatatatgttaacaggaaaatttctaatataatttattgtattctttgaagatggatgtgtaagtttgtaaaaaagttagagaaaaattttagaaaaaaaaatagatactattataaaataatataggcaaaattagtagaacgattaaaaaaaataataaatataaattttaaaagaaggtgtaaaaattcactttaaaagatatatatgttataaaataatatataaagtagatgagaagaaagaagaagaaaatgaagagagaaagagaaagtggatgagaattt

SEQ ID NO: 25047 - DNA, 2564 bp, Cannabis sativa
  modified_base (2524)..(2526): a, c, t, g, unknown or other
tatgaaataaaattagaaagattagtggtgttgaagatttatttcgaattgtggagtaacactcaaaatctctgagataagagggaggtttagtgacacgagtagatcgccttgggggattgggagtaggattaggtgctagagacctcaaactggttgtgttgtctgtcatatttgattcaatatgtgtgttggagtcacttgtttccttttcctgtatgttcctgtggcagattagaagtattgttttgttttgtgggataatcacagataagggtgttgtgtataacagcactgggaagaataatgttggaaaacggatctatgtcagagttgtccacattaagtttatgaaaaggaaaaatgttctcatgaaagacaacatttcgagaaataaaaaattgattagtgttaatgtcaaacaatttatatcctttaattccttgggggtatcccatgaaaacacatgttcttgcacaaggtgaaaatttggttctgtgcgcgtgcgcagtgagtgttgaagcaaaagcaaggcaacctatagttcggaaatgttcataactcaattgcttattgaaaagacactcaaagggtgttttaattttaaacaagggagtaggaattcgattgattaaaaaaacatcagccgtgatacattcactccagaacttgattgggaattttgcctgaaaatgtaatgctcgagccacattgagcaaatgctgatgctttctttcagcaacagcattttgcttaggtgtctctacacaagtaaaatcgtgcatgatcccatgttgagcaaacaattctttgaaaaccaattcaggtgcattatcagatctgaaagttttagaaacacagtttaattgtgtttgaacatatgatagaaattgtgggattatgcttttagcatcagatttgtgctgcatcaaataaatccatgtaaaccgtgagtggtcatcaacaagagtgagaaagtacttgtgattagtgtgtgaggctatgtgataaggtccccatatgcacaatgtatgagatcaaaaatacgatttttcagattattattattctgaaaagagtcttttttgcttagcaattggacaaatataacatggtttatttttatgtaaagcagaagtgttacaatgcaaagtttccttgagaagatctaatcgcttatgagacaaatgcccaagtcgagaatgccaagtttcagctgaaatggacagaacttggaaaggatctggtgcctcatcaaggatatagagatcattgatattgctaccttttccaatcatcctccggttggctttgtcctggataaaaaagctatcagattcaaaaaagtatagtgacagcagtattctttgtcatatagctagtagaaatgatgttatatttaaaattgggggcataaagaacatcagtaagtatgatgttgttgttgagaacaatagtgccactttgattaacataaaaacaattattgttaggcaaaatgagttttgtagctggtattttgcatatacactgaaaaagttttatattggaccagatatgtcttgtagctccagaatccataatccaagaattatgtaaaatagattgtgtgttatgggatagtaagatacctgtgttaccataagaggtagatggttcggagatattgatactagtttactgtgcagcaagcaaattaagcaattgttgatactgagttgtggaaagttgaggaaggagagcctggttttcttgctggctgttactactgtcatttgtggtttgaatttgatttgcactggcctctttggatttattcttgttaaaacctggtggatacccgtgaattttatagcacctttcgatagtgtgtccaaagatgttgcagtgagtacaaaagggtctattccttttgggaggctgattcttggaggtgggattagcagtcttttgaccagtatttttgtttccttgaaaagcgaaggccatagcagaattctggttgatggtgctcgactgattgcctctttgatgttcttcttgtgtgacaagatgaaaggcacggctgatttctggtaatagttccatgagaaggatgctaccatgaacttgagaaaaagaatcagaaagtgccattaaaaaggacataatatgttccatatgatagtgatcttgaagtcttttgactcctccacaagtgcactcattgcaggtgcaagatggcctaaaattggtcaattcctcccatttagttttaagcctagtaaagtacatgccaatagtttgattatcttgtttcaggttcatgagatctttccttagagtgtatatatgggggccatttctttggtggaatcggactctaaggtcattccaaatggcagcagcagactcatcatagagaatgctagaagagatttccttagatacagaatttaaaatccatgaaataaccatgttattgtttcttatccatgaattgtaaaaaatttgatcagaaggtaagggtttagaaattgaaccnnncaagaagccgatcttgttcttgacagagatggcgagtt

SEQ ID NO: 25048 - DNA, 5649 bp, Cannabis sativa
  modified_base (5509)..(5512): a, c, t, g, unknown or other
tgcgcccaattccatttgactttaatgattgcacctacaagagagaaaaaaaaagagagaaaaaaaaacctacaatgcaactgtcaaaaccatttaatcttttcttttctcaatttgtaacaaccgaatagaagtaaaagtttaattttaaagtacttaactaaaattcttgtgggatcaatctcactctttgtgagtctattacttcataacaatacaaatacttgcatgttgaaaataccacaacaagtttgtggcaccgttgttggggattgttagttaatatttataaaaaataaattttgttataatttattttttcttttcaatttttgtacttattctgtttgttttaaaattttctctattcactggtttaactagtttatgctacgttaagggccaactgctagatttcctgctgatcctgaaatagagaagacttgtagacaaaacagaagaaggaaaagattggaaagagcattggaagtggttgagcaagaagtagggatggcctataacaacaataatggaggcgtcgtagatgggcaggctaatggtcttaatccactagaccgtagcttgagagattatgttctacccaatctgagaggggtcagatcctgtacatggccacttgccattaaagaaaacaatttcaagatcaagttggccatactgcaaatggttcaatccatagtctagtttgggagattgccatcagaagatccaaacatgcatcctgctaacttcgaggagctgtgttagacattttagatgaacgaagttagtgatgaagccattagattgaggctgttcttgttctccttaagggatagagccaagagttggttggtatctttgccactcaatctatcaacacttgagaggaattggcctcaaaatttctctcgaagctctttctcttgctaaggtagccaaactgagatttgaaatcaacaatttcatgcaacatgacaatgattctctatatgaagtctaggagagatacaaggacataattagaaagtttcctcatcatggaatagagaagtggatgtaagttcacaacttctataatgggttaacctgcactaactagatccttattgatgctgcatctggtggggaagagtgcaaatgaggcatatgatctactagatgagatggtcatgaacaattaacagtggccatctaaaagaagccaagaaaagaaggtaaccggtatgcatgaagtagatggcctcaccaagcttatagcccaagtagaaccattaacaaagatgatggaagctcaagtcaagcaggcttaggtgatctgtgaactgtgtgagggccctcactcttatgatatatgccatgttaacgtgaatagtttaccaatggagcaagctcaaattagatatttaaaaagatgatacctacccctaccttgatggacgtcgtcaatatcatgattcacaactgtctagtaagaatctttaaggctttttcaactagagatataggccactattccaagggagtcctcaataacttgctcaacaaccaaattctagtggaggttcaaatattcaagcagatttattactctaattcatgctggagactagagcttccattaagaccttggagaatcaagttggacggttaactgctcaaatggccaaccatactcaatgtaacttgcctagtaatatagagattaactcgaaagagcagtgtcaagcaattttcttgaggagtggaaaataacatgagagcccaagggctgagcaataagtggttgaagagaagtcagatgacgacgaccagcaccagaataagaagaaaagaagactactaaaggtctgcaagcaagagaagatacaccgcctataagcattgagcatcatataaaaattccctatccttcaaggctcaagaataagctggacaagcagtttttgaaattccttaaaatattcaagaaactacacatcaatattgcattcgcggaggccttggaacagataccaacttacctaaagttcatgaatgatattttaacaaggaaaaggaggttggaagaacttgagatagtggcacttaatgaggagtgcagggcaatcctacaaaagaaactacaaaccaagattaaagatcaaggtagtttcaatattccatacttgatagggggttcggtggaaacaaaagctctgtttgatatgggagcaagtattaacttaatgccctcatttatttttaaaagaataagaccgggagaagctgagcctacaatactgacattgcaaatggtaagccattccttgactcatcagtggggtataattgaagatgttttggtgaaggttggtaagtttatcttctctgctgatttcttaatacttgacatggaggaagatgaaaacattgccatcatttttggaataccattcatagctacagggagagatctaatcgatgtataaaagagggggaattaaagttgtaggttcaagatgaagagatgagttttaaagtatttgctgcaattaacattcctactgtaaggttgaattagtgagaggttgtcatgaagtaactctcgagaagaagaaagagaagcgcaaagaacaatttcaaattttttgacgtcgtatgaaaagattgatgtgtagaaattgtgaaggtgactctaatcttatggatagcttcaaaattagcaatattataggatatttttcatcattttgtataagggcccctatggatgcaagaggtggactttatcccagttcacttttgtaagaggaaatttgtgtccagctatatgacgttaatgacatcgctcttgagaggcaccccagttaaattctcttgggaggcacccttgttaaattctcttctttagtctttagtgtcacattggggacaatgtgtccaataagtttgggggtgaacttaaaatttttagatttttagtcttttaaaatttttaggttttgatgttagttttagtttttgttatttttctatggttatatgttaatttactaaatgtgagtcaacttgaatgtaggtgcataccatggtttgaaaatttcatttatttttcaaaaaattcatgtgcttggtgagattgcattcttgactaattttaattttatgctttaaaagaatatggaatcataataggaaaatctctagtaattgaattggtttatgtatgttaattgtaaaatgtaaaaagttatctagaaaattctagaacttgcttacttgctatttgagatgaaataataaattatgcatgactagaaaagtaatttaggtattctttggatcgattgtgcctttcatgccatccttgtaatatttatcttggttaccctttttgagatttaacttgattctttaattctacaaattttcagcctgaacaagataaacccattattattcaaatttgatcctaattataccataagtggatctttagtttgagggaattttaatagaagtttttatatatgtgtgtggaaataagagtgaaattgagggaatgtgaaaaaatttattggcaacaacttgaaaaagaaaaatctcacagtgtcaatttcaaagaaaaaaaagaaaaaaataaataaaaataaagttgttgcaatattgttgaaacaaatttctctcattgtagtagaaagaaaaaggggatatcgggattatttgtgaaaaaattattagctgacatgattggagaagcttatggtatagacaagctgaaatgaccattccatctatctatacctaagcctaacattataagcctagaaagaccttttgattcttggttgtagattgatttatattagtggagaatagtaagtattgcaagcttatataatatattgggttagtggattcattgttgtatgtggcatgcataaattattttaattgttagttaagtgctatttatggtttcatagtagattgatggttgtatttggcatgcatatattgtttcaattgttagttaattgctattatggtttcatgaattgaaataaaaaatagaagtgtgtcaaggatgtgattgaactaaaattctggattattttatataggtaaaattttcgttcataaccatcactaccacaaacttaccttttagtgacatcatttagtgacatgcacaaaaattgtgggtcactaaaaggttaggggtaagttttagtgacatacataaaaagactcaaaatttattattagcatcctacaacctgggtcactaaagatatgaagtttcactatagagtaaatcattcaatttctataatttatttttttaaaaaatattcttatagtgacgcgccaagggcgactgggtatatatttaccgacactcctagcgcgtcactatgtcataaatagtttttttttttttttttaaaaataacaaataaagctctgtgtatgtgtaataattaaatatattttgtttttttttttaaaaaaaggcagctacatctcttcattaattatacaaaaagcttcgtatatttcttttagaagaaaaagctgcttatattttgtttcttaaatataaaatgatccattagttatacaaaatttaattgattattataagattttataatagataataaaatataataaatgaatatgaaaagaaaggaaataaaaccctaatcaaaatcaattttcctctatctcttctctttcgcctccctctcattctctttgaagttcctacgcaaccttggcctccaccagcagtctgaccatccagctttacatcatacgattaggctctaccaccgatcgcagggggtcttaaaacctcctaatctatcttctccgccacccgctcaacccttctctgttctgtcttgtctccgaccatctgctccacaagccaagcaaccctacgacgagcttctccgacattaaaatcattaggtcaacataatctatctctcaaatttacttttttttctttctttcctaaaggttctggtctctctaaatgagatgctcgttttttattttattttgcaaaaacgtttggttttttatcctaaagggtttgatcactctatatgagatgctcattttttaatttattttgctgaagagtctgatttttttgtgtactaaatgttttgtataaaattgtagaactaaattgatatatgtttgttatccaaatttctgcactttgacgtggcatcactcgatggtgacacgtggaacgactctgggtatctgctcgcaagatacaggccaaatagggtacctcgtatgcttgctcaagacgaagtagtaagcaacccgtgcataatgacaaacacttagcgaattcagctttcgcatcgtgagtcatcaagggaaaccctataactttgggatcattacagagatatggcaagctatcccaatcccatgatcagtgtattttgtatttactatgcaatctttctgcttatatcaattgtaacgagaaggnnnntacttcctctccaagctcatagctttacaaatagtgatgcatattcactgggcaaagggtcgaaaacattttggttaagagattttgtctaagaatttatatttagagatattgttgtaagagctataaaaaaagga

SEQ ID NO: 25049 - DNA, 4158 bp, Cannabis sativa
tttttaccgggtattacattataacaacatccttgtattagaaaatgatttgtatatagttttatacatttagagataattagtgtaactttttcttgttatcaaagttgaattttaaaagttgtaataacagaatctagaacttttatatgaaatattatgaaaaaaccatcgaaaacacattgaatttccatcgagaaaccatcatagaacacatttattaatttttgtaaaggactgcacaaaccatggacaatgcatcaagaacatatcgataaatcattgttaaattttaaaaattacaatgacaacatctagagccttcacatgaactattaccaaaaatccatctataacacattaattttccatcgagaaaccatcaaaaaatgcattgaagttaaatttttaaaaacatcaaaaaaacattgagaatatatcagaagtttcacaatagcagtttcaattagcattaaatataacaaaacccattttagggacccaagtaatattgaactatgcctcaaatacgggctttacatgtagctctattgtggccagagccgctacagttgtcacaagtttgagattgtgttactactttatcaccaattttaaatcatacttcaatgggtcaacctccaactcttcatataaactgttgcacattttttataaggttgtgtcaattttaaccatcaacgtcatacttccttcacttttatacacctaattaaattcctcaacactccaaacaccatcatacaatacaaccagaaacacaggcgatcttgcaattcaatacaaactaaaaataaatgaatcagaataacaaaataacaaaaaaaaaatacaataatgggaaatattgtcgacaagcaatcaagaaccaattgagaacttgtcggaaagcaattgataactgttgaaaaataaaaaacaatgattcatcaaaaaacagttgataaccagtcgagaaattaccgataacatgggacaaggaagtttgaaaatacaactatacacaccattcaaaaactatcgataaacaatcgagaacacgtagataacatgtcaataattgttgcaaatacaaaattattaaccatttcgataaataatcgagaacctaccgaaaaattgtcgagaaaggtcttccttgaccttgggtcatttgcatcgagaacccgtcgagaacgtatcgaaaaagcttcgagaaaaatacgaacaaatcaaatgcttaagaaaattagatcttatgatttcagcgaaaaatatgtcaaaagtaaacaaatacaaacatcaaccacatagatctactgaaaatagactatacttttacaatcatttaacaaaatgttttaaaaataaacttacctattaacgagctccgactttcaattaaaatgtggtgtggtggacgtttaggcttctatggaggacaggacatggaggataagagacggaggatgggcttccatggcgaacgtttgggcttcaatagaggactggacgacgttgagggcgatgactcctttgggcggatgagatggatctagagagagaaatagagggaggaggagggccgcaactcttttggacaggttgatgagagaggtgtagagagagaaataagtttttaggttttttaagtttttgaaataaaataattagaaatgattttttgagtataatgtggaattattagaataaaatggtgtaaatttattaggggatatattttttataataagaattttttgtagggataataaattaaatttccctataaatatcaatgtctttccgaatcgatccccacacaaggaggaagcttcgttgttagatgaatccatgaatagtagacttcaaatttaaactagttatttcgaccgcaatttatttatttatttttgtaagggtccacaaaaattttgttcaagtatagtttaaatatgagaaatgttaaaggcagggacagacccaattgagttattgtgggggctatagcccccactaataaaaatattgtcttttaaaatattaaatttaattatttttaatttgataattataaactaaaatagtaaaaaagtccccacaaaattaaataaatttagtaagagtaattataatttatgtataaatattttttaataataaataagcccccacaaagtaaaatttttgggtccgtcactcgttaaagggtaccagtagtgcttaccactctcttgtgtgtaaatatcgctattggtccaattaaatatcgggttcatatagtttaatataataatttttatggagtattgctagtcaatcgcaaagcgacatgtctagaggtgttagacactactgatgcccaataataatgttttatatatatactatattaatacatatttgtagatatattataaatttttattttaattagttgtataaatagttttttttatattatttaataaataatattttttattaaaaaatatttaatttaatgctatttatataagaaaaaaatctaattatattcaaaatatattgctaagtgtaattttaatttgactgtaatactttttatttttttagaaatatcatacatatttttttaagcaaaataatttaaaaagatattttttagtaagtgcaatgcaataggtaacataaacactttttgtattttattgtttaaaaagaaaacagtaatagaaagatattttttttagacatgtggatcaaataaaaaatgataataaagacattttcaatataagatacaatggtcacagatatttgtttattgcaatcacccatgcaatccaaaccagtaatcaaataaaactcctcagcactaaactcagtacaacggtcagaaacttttgcccaaacttccttcggattgccttgctgaacctccctcaacaaaagactgtgaacaacttggggatgaaatttgtactcgagaacatccaagaaatgatcgaattgagtgtcacggaatattttcatcatatttttaggaattttgttcttgatgttgttaataacactataagtgctagtagtgacacacttagacctgtaataatcagaagggtgtaatttgtattctcaatcctatatagatatatagaaacacaaacatagaaacatgaatttcgtaacatagggagtttcaaaactgtattaaaactataattaaactaaaaaaaaaagacatttacacgtaacaactaaaccatatcaaaaaagacagtatacacgttactttacaacaatgtatatatatcatcatgaatatcacttaaaacaaataatgaatcataaactaaaaataagaaatcaaaaaaataacaaaaaataaaaaataaaaaatcacactccaataagccttcaacatgcataaatttattcaaatctataaaaatcaaaatcaacaccaagtaccataaacaattaataaaggaaaaatgattccgaagttgagaaatgaaaattaaccctaaaaccaactaatgtgaaatacaaacaaatctcaaatgaccaaagcaacataccagacctaaaacaaactaacaaataatatttttcaaagcacatgaactatacctaaaagtgataaaaccttaaataggacatctaaaaaaaaacgtaatacaaacctcaatcaaatgaggagcttgattctttccctttttatcaacaacaatatgagtcccctcaatttcatctcctttcacgcttttagatttcatcttagccggagcctttctctgtttcggtatgacctcaacaaaatcatcatcagagaaatgttcatctaacttcctttccctttccttttttggaaacagatttcaaacctgtttctaaaactttagggtgtttaactgcaagtttttgcacagagggagatggagaagaagaggaacaagtgataaccatttatatagaaaattgtagaagaaagaaaaggacatacaaaagtgggttgaggcttcaatagtagttaaagatcgtggggaatcaattttttggagagactttttttttttttgaatgaaatatcaacttcattgaaatgaattagcattctgaatacataaggttctgaagttcagaggaaataggaaaatcagaaatgctaccacc

SEQ ID NO: 25050 - DNA, 2227 bp, Cannabis sativa
cgggtatgttaaggtagataactgtagggtttttagttaaaaaaggttgaatcttggcattgttttttagttttttgattatgagtcttgaagcacacaaataaccaaggttttatggattctttttgtagaatatgttttattaagtctagtaggaactttggcttgcctaatcaaggtgtttttaccctagccaactaattatatgctgcctgtatggtctttatgttgtctgaatgttcacttacctttcccttttgcacagacgaacatgcgtgactattagggaggtgagcaccaaatagatgcacatcaactcgaacttctctttggagattaattggaacttcgggcaagtggttttttatatggtctttctccgaccaactcttcgagcagtttttctaacttggaagtcagcagtggttctcctgtaccagaaatccaaaacaaccatcactctgaacggatgggaggagaaaattagggccagttcatttgggaattcaactagggttagaggaaattccttccaacatcttggacatacattgtccagccaggtgtcccagataccctgccagaggcacgtatgtcatcctttgtgaagaaaccgtttgaggctgaggttgttattaccattgcacggcagaatggtcaggatccaaaactatccaagacaaatcaaacctaccgtgaaaccccttcaactgacccccattatgctgaactaatggcaatgggacaggatgcataggccaactaggttgaaaggcctattgagcaggttgtaaggcctaccgagtaggctgagaggcctgctaaccctaagatgaggtggcttgggtgtctcccccatcaacgttcactgttttgaggttgatgaaactcctggctgaaaattttgtcgcgagtctcaacactgagttgccaagtgaggagtacttggctcatgcccctccaagggacaagatggtgtggtctggtcgctactttgaacaaggggctatcttgccgctccactcgtactttcgaaacatagcaaactattacgagatctgcccaacatagtagactccaaaaggggatcaagtacctatttgccctcttcattctatatgcacagatgggctggccctagcctttgccatttgacattagttggtattttgacctaaaatccaaccctagtcagggccaggcaagatacttctacttcaaccagctgggctacatctggttggggatcacgaatgaccctgccatgtccaagattagtggttatgcctgagattacttcatggtttatggggcagagggtttgcaccacgacttccacaggctctcctcctttgatcggccaatacccaccttacaatttagggatagggccaaccatatcttctcattgcttgcctcaatatgaaatatatggaagttggcgataagagaaaaactttatcaattatggtctctattctttcgtgggtaaaaatttttgttcctttaataagatttttgagaagaagaaaggaatcaagaggaaagcacccgaggctacaactccctctgataaacatctcgagaaaaagaaagaaaccaagagagagagagatagagagagagacagttttcagaagagggttgagtggagtgagtctttaggagtggcccctactctcattagacatcaacagtctaccaagactgcccacccagcaatggctgagggcaagggtaagggcatttctagtgaggagagtgaagagtacacttcagatgatgagggtattccgtacagtcatccccaaggtgatgcttctgggcaggctgaggataaacatatttactttatactgaacttatgacattcaaaattagtttgcatgtatggcttcagaactggaacaatttttcaagaggaaactcattggttcttctcaagaagagtcccccgtcaaaggttgctcagaaggaggggtcaagttttacgcgataaggtcttcctctgcctccttcatatgctcctttagcctggtgggaaatttggtaggacgtcgtcctcctggcaggaggttgagtaaggaaggagagccaaaaatctagtcggggtaaagaaagccaaaaaggttgtccataactatttggacatgtgtttggttcacgttgacaagtagctacaagacacagataacacaaagcaagctaagcctgggaaggttttaaa

SEQ ID NO: 25051 - DNA, 1429 bp, Cannabis sativa
  modified_base (96)..(101): a, c, t, g, unknown or other
cttcagttgaaggactgttcctctaaagtgcgtattattttgaactaatttattaattaatagatcttatgatttttattcaaaataataataatnnnnnnaataataataataataataatcgctagtttcaaacaaaaatttatcatctcaatgtaaatttgttttctttatcacttctttttttagcacaacttaaatgtattaaatgtattcaaactaattaatataacatatccattaactataattaataacaattttttaaaatgaaaatttaagttccactaatcaagaatatcgctcaaaataacagataacaaatcaatgaaataatcaccctcatgaaattgacgatcatcataacatcgacattgtttagcaagactatgagcaactcaattagcagatcattcacttctacaagaaagacaattcctgttagtttttaaatcaaatttttttgaggaccgacactattaaaattgagtgaccatttaaaaccaacgtctatagttttaaaattaacgttagtttagaatagtcaaagacattactgtcggttcttaacaatcactacacatatgattttcgtcagttcatccccctcgcaaaagggaagagctgtcgatttagaagggtcgattaagggtatacgacccttgtagaccgtatgcgacctttctaaattggggcctatagttttaaaatttataagacccccaaatttttcaaatctcatctacattttctccctttcttgccctaatttctctctagagattcgacaaaaagacccctattgtgttttcatgccttaattaaaactcaatttcaaagtaatcttaatttattaatgaataaagaacaaaattcattttatatacttatttagcactttgcttgtttcacatgttattatacatgatcatatgtttgatgtacaaattctattaaaatccctatcacattgttacttatgattatagttttatctacactgtgaaaaataatgatgattatgtgattaacaaatttagtctcgtgatttatcaatgcactggatttacactgatatgataatcaacgatatggtttacttacacttatctaggtggagtatcttttccaatgcatcagtaaagtaagcttgtattgaatgtattagctatacatcacactggaccgatatttatagtggaaaagatatcgtaaacttaccgtaatatttttttttaagtcaatatcactatgttgatcttagatcgatgatcgcaatcctgagatggttaggttctgacttaacggtattgtacgtgttccttaacttgttcgttataagcttatttgaagaattagcccatacttatatcttggcaattcggtagtgcaattgaatgggagcgctaatcatagatataaaatttat

SEQ ID NO: 25052 - DNA, 2832 bp, Cannabis sativa
  modified_base (32)..(39): a, c, t, g, unknown or other
gaccgtatattctgtaaataaaataaaaaaannnnnnnnaatatttaaaatttcgtaaaatcgtatttttgtaattttttttatttttgtgtatttgtaagataatcccttaaaaaatatataatttttaattcactattgattttagttatatctttttattttatttttattttcttacaaaagtgttaaaaacaaagacatcctttcaaattttgtcctaggtctttcatcaccttgagaaaacctgtctaaaagtgacgccttgtgattgattagcgatactttataaaaattattatattaaagtatataacacctaatatttaattataccaatagtaatatacacttaaagggtttaggcaccatcagtgcattttagcatttctctaaaagattatatatgaacataaatatttattttgtttcttttattgttaagaactcaaaactaaatttttctttactcccatgatacctttttcaacagattgatttgaatcaatggtgatttaatttccttttatatcatttgcagttatggatattgatgcagttggtacattcacaatgtgtcatgaggcactaaagtatttaaagaaaggaggattaggtaggagccaatgtggtggtggaataatattaaacattagtgctactttacactacacagcagcttggtatcaaattcatgtttcagcagccaaggttggttggatcatatatttacattatttgatattatgatcatgttgaatttcttaaacatttcttctactctaaattggtatatataggcagctattgatgcccttacaagaaatttggcattggagtgggggactgattatgatatgaaggtgaatgtgatagcacctggccctattggtaatactcctggaattgataaattagcaccaaaggaaatggaaaccaatacaaatgactaccttgccgtcactaaagttggggagagttgggatgtggctatggctgctctttatcttgtttcagatgcaggttgttcatctatctcattttcttatgcaaaaccacattaattagcttaatattagcaccactattagggtcgaccctgagatttattgggtcttaggtagcaaaaagttactaggtcatttttaaaatttactaaaataaacatgtgtattttaaaatgatttttttggggttcccaaactgagtgtttctaagcgcaagtcttgttcgccttaacttaaactcaaccctgtcactgaggttgattgagatgtctgtttgggatccatctatttagatcacgggcaaaaagaaagagtcttacgagattattttccctagctcaatttttatgaattaaatttttacacatcaatttttgaatatattttttcctctaaaattaatatttttatttttatcctattaaattcgttgttttttatttttatctcacataattttatttttatttttacaaaatttatatttttcatttttatacttacataatactcttttatcaattttgtttgtccccactaagaaatgtggcttcaaagtccataaatttcactctggttgtttttttttggtaaaacattctcttgttggttgttgatgtattggattggacttaatattgttaagatcttcacttatcacatattcacatggtgtcaaattatgaaattaagtgttgaatataagtttttttgggtatgttaagtaaacctcatccatgtttttgtgatagaaactttcattttatcatattttttttcttgttttgaactgtgtaggtagacacataaatggagctaacatggtggttgatggaggacaatggatgaaccgccttccgcatttaccgaaagagggagtaaaacagctttcaagagcagtggagaagaggactagagctgcatctttactcccaagaagcaaaatctaagccattcatcatagagaaagagaatatatcataatatagatgtacctcaaatactatgcaaaagtaattctaaataagcacataactactaaagtgtttaaagaaaagattttgatgcttaaataaatttggattgtattcctctccttcttatatgttatgattttttaagcataggatacaaatttggtatgaaaaaataattcaattaatgacatttgaagtcaactgtggcctatgctatataatttggtttgtaggctcaaatatagaaattatggctccaacattaaataaagtaaacttttttccatatagatatatagttgttggctttttaaaacttgttagagaatttatttttatttttttagaagaagaaagacaagttagagaaagtagtaatggagtcaccatttagagctgatgttgttaaagataaggtggctctaataacaggaggagcttcaggaattggggttgaaatatcaactcagtttgttgggaaaaaacatggagcttccattgccatcatgggacgaagaaaacatgtcattgactctgctatctctgctcttcgatcacttggaatttcagtactttttctgtccttacaaaatacaagtattttttctttgttaatgagttgtgtttggttggtgattatatgtatgtttatctttttaatggaaatcttgttaaagagactatgttccattgagttgttctatcaatttttgggtgttaggctgttggtttttagggggatgttcgtaagtgtgacagtcagtagtcctgtgatccgtaaggggaaataccgggtaagctgtgcaatcccacatcgcctgggaaaggtcaggtgggatgattctgag

SEQ ID NO: 25053 - DNA, 3587 bp, Cannabis sativa
  modified_base (522)..(536): a, c, t, g, unknown or other
aaaatatagtgtatttatgcgggcatggaacatgtaatttgaattgtaattgttgatttttttttttatctcgtggtagcatcttcttgtttttttatagaatttttattattaagttagccatacattatacatgtttttagcgattcacataatatcatcaaatgatacaagtcttggagaagaatttacaacatatagaacacccttgttgatgatcttataatcagacaacatctaaggttcctcgcgatgtgatatctcacactgagtaaatctttttattttaaaagagagttttatttacacctcataaaattttaaataccttattattaaaaaaatatataaacttaaataatttttaaaaattactcttaattttttttttttaaaaaaaagtcctcacattattttatgttaatttcaatacttattttgatttcattttcataattttttttttaactcatgtatatatattttttttttctaagaaaaattcatataattttttatttnnnnnnnnnnnnnnnaatatttaaaatataatttaatttaatttgataggtatattttttaagaatatgaatgggaagaaaaaagtttaaaaaaatagtacaattaaagatataaattttatataaaataaaaattattaaaataaagtgtctttataaatttttgaggtgtaaataaaatttttattgaattttttgaaaatattataaattacccttataattttattttatttttaaattcaaaacttttattaatagttgttgttcaagattacataaagaaagtcacgagtaatattctcactcctaataacatgattaacaacataatatgaaactctagcaagataatgagtaacacaattagtagaccgcttaaagaaaaaataacagaaacaattgataaccccagcaacaaatccttacaatcattaataacactcccaaaataagaaagcattaagagtggacttatgagcaattgcacaactgtaagactatcgatttcaatgatcatacaaggccaagacttcgttttcatccaactcaaagcctctttcaccctcaaagctttgaccatttttgatgcaactaaccccacacccaaaatagctcttgtattgtcacgagaaatgcacggaaagctgtgatgaccgacctctgaaaaataatgttgcatcgacattaatttttaccacccctttcgctagtttagaccaagtatgaccccatctccagcaaataagaatgcagcaacagggatgatagaccagtcttgagcttgcatccaatattccaaagaagagaagacaagtgaaagaacactagagacagtcgacacttttttattccacaccagttcgtttcgaactttacaaaaaaaaaaacccaacatgccatagaaattaattttctattcttctcttaacacggtcgccaactactatccaaccatctacaaaacgaattatccagagaagtagacacatctacaccagtctgttccaacaagctctagcaaaagaacactctactagacagtgatttatcgactccctctcatattagcactgaggaaggagagaatctataggaacatgtagggccaactctggacataggcgggctaggcgtgtgcttagggcctacctagcatagaggcccaaaaaagatctctcttttaaaattacacatttttttgttgattttaaaaaataccatattttactctaaataagagtcaaaaaatattttttttctatgacctactaaatttcaagaccaaccttgagattatgtttaagacgcagttgagttttgataggaagacaatctaatgcagcacaccagagcaagtctttaactttcgaaggaacttggagcttccaaattgctttgtctcctgtatcgtctaatagttggtgtgctataactagttctcttgtctggatggttgtagttattctttgtacaagcctttttcttttctcatttcgttataataatagtgtttatcactcttcttccttgcgactttgcctataaggctatttattgtaatcaatttggtttaatcgttctataattatctcattgtgtcacttgtttgacttagcttttaaatggttgcatatattttctcttaaaaaggataattagaatttttatcctaaatttaacatgtattaaattatattttagaattctttatgtcgttaattttttttttaattattaagatttttaaattcaaggattctagtttaattctaatcaattttactaagtaacgattgtctatgtatatactaaatcatgagaataatctaccaaatcatgttcaaattttgatataaatgtactaaattatacttttaaattttttatctatgttatatttcttttactaaaattataaaaaaattcttaaatttaataattttaataggtcataaatttttttaagattctatacaagttaaagttcatgaaaaaaaaaaaaaaaaaaattggagccactttcattcttttcatgagtttggttcccttctctcccaagttaagcttcacttcactccttcttctatacaatattgtttagtaaagctcccaccactgtgcgatcatggcctccgtcttctccttccttcttctcttcttccacttctcttcatttcaaggtaattttcatgcgaatcactcaaatgataacagagtttcatttattgaatatttttacttatcaattttcaacaaatttcagtgttcgccgccgaaaaagtcgtaatcgaagaaggttacacagtaaagacggtgatcgacggccacaagctcgggatcagtccttactctgtcatccttcgtcctggatcgtccgatttggttgtcctcgattctactggtagttctttctacaccgtaccgtttccgatctctaatggtatgttattaacccatttcaccaccactaatgtctttaaaagcttgtatattttaggaaatgggtttttagggtttactggtttaagtttcaaggttctgttattttgttcaccagataatgttgtcaaacggttttctggaaccggtgaagctgggtatgaagatggtgaaccgggcatggcccaatttagtaagcctcggagttttgcgatagatttgaaagggaatgtttatgttgctgataagagcaacaatgtgattagaaagatcactgattcaggttcagaaaaatttcatgtatttcagtttttatcattatttgttgaatgaatggttttgatgggtttgatttctgtataattttgtgcaggtgtgactacaattgctggtctgaataagaaagtgggccataaggatggaccagtatcaaatgcaactttctcaagtgattttgagcttgtttttgtgccagagatttgtgctttactgatttctgatcatgggaatcaactagtgcggcagattgatctcaaggccgaggattgccggagggattccgggtctggttccggttctggtgaggctttttttattgttaaaagtggctattggctggtgttt

SEQ ID NO: 25054 - DNA, 1969 bp, Cannabis sativa
tggtgtctggccgaccatgttcctaccgaggcctggtcagccatactcctaccagggtttggcaagtcatgttcctgttaaggtctagcaggtcatgttcctacccgctttggcaagttttggccagccttcataggtggtagctagactttgtaggtggtggccagcctttgcagatgatttccagcctttgtagaccttttcattacagaggtcaggtttccttagtcaaacgggcccttccttggtctaaaactctaatcggccatacaagctcatcctgaccaacctatgtactcccctttggcgggcaagacatggtagtgcagctccttgtcggctcacctaactcttctcgcttattgcttgacaattttgccataccttgtaaggagactttgtcttgctattaacaaggttgtattccatgtgtcctcagtcttggcttacgtggacatgccacgtcaggtgaacaaaatttgggataataaataacaacaacaaaaatatattgttattaacaactaatatacaattttgtcccacaatacctaattaatgtattgtgtgctactctcttgtctgtaattcttactgatcactaatatattgttaattatggcagcaaatgacattcaaaccaatacttcagaagtcatgccaccccttagtaatggaatagaaggacaacaattttgatgttgttagatagcttttggaagtattttgattttcaacagctgaattttggatagttgttgatatttaacagcttctatttatatagcatagtgttaaagtgttcagttgttgattttcctaatatggtattgaaattagaactgaatttgggcaaaacattttgtttttttgctattagcattaacaatgaaatttagattaggatatggatggctttttgaatttgtagtgaatggctttttgaacttaaaatgttatttgtaatgaattaagaaattgtttaaatattggaattatatattatttaatatatactgctacagattgtgctcacatgaaaatgtttttagtaacaattcaaagaattcttctttatttcttctttactttagttgtagcatagtgtttattatgtgtgaagtgaaaataggaataaactcaacttcatcactggcaccaatggaaaaaccaggaagctctttattcttcttcatattatgctatcactgagttagtattaagcaaaagtgttggtgggttttggcatttattttgtgttcaaagaatgcttggtatgtttctgcggattgtaatggtatattgattttggaagggtaaataaaaattttcatttttcttgaaaataaaaggaattattacatgaaaaatacaaattgacactttatttaaaaaaatatatatatatatatatctataagatgtggacaatatttatacctaagtacttttaattaccaaaatatctcttacacaatcagacgaatgttgctggatggttggtcgaagattgtatcagacgaaagtttcaatcagacaaaggttgttgggtgattgctgggtgattgaccgaaggttgcatcagacaaaggttttaatcccatgaagcatggatcgtgctgttgaaactgtaatgcaacagttatatatattgcgagccaactaatgtgcaacttaattgcaactaaaaaatgtaaaatatgaatctgtatatgtaaaaaactatttgtaagtatttttttttgtcactgatcaatattacttgtaccttaatagtaatatgtagagaaataactgttagcaaaatatttatgcaactgttatgaaacattaaaaaccaaaacagtgttttaacatacgtaactctatctacatgtctcttcatgatttaatatgagcaaattcaccattagaaattcggaaactaatgaaaatacaccaggataaatatttgggcattttacaattt

SEQ ID NO: 25055 - DNA, 2229 bp, Cannabis sativa
ggtgaaggagacccacaaaaatagaaaaaaatataaattagatgtttttgaccatacatgatgatctaacagtgaaaattagctcttggtggaaatagccatttctcagatcccgacgagacccgctgctggtactcaaagcttatttttgtaactcccttagggtaaaattttatgccaatagctttataattttgattgaactaggagatatggcttgttaaagcattgaattagctttgtaacgcaagttgaattgcattaatcgaatcaatatttagttatggttattttactgaagccaattcatgacccagcgcccaggttgacatcccagcacctaagtccacatataatctcaatctagacgttgggtaagtgtaaaaacgtccaatggatgtactttgagattcctaagtgatattttggcattacttaacctgtttttatgttctggtgaagttggtcactagttcttagagatgttgttgttctgcataaatgagagactagaaactcttaattttcaagagagtttctcatgtcagaaatgagaaatgcggagttttaaatttgacttctctgacttcatagatctttgttattataaaaaattagactggcagtcgaaacaaaattagaatcaaataagcagaatccaacgcaccagaccacttgtcaacctgggcgctggatactctatataagatctcgttttgatacattcaaggttcttgaacttgaggatgaggtctcctaccccgtttttaaccattttaaattcattgatcgaatcagatttgctatatattaataggaaaacttctggtcttcatccaaatgaagaaaaatctactttatattgttgtggaatgcaatacaatgaactttggatgcactactacaaaattagcttttcccaacggtttacaactgtcttttatattatttctcattgattcctaaaaccgttagctatgtgggtgtcatcaaaataaagaactttaaaagacggtttataattattggaaaagtcactctaaatgacggtttacaactattagaaaaagtcactttaaataatggtttataactgttgaaaaaaaataattttaaatgattatttataactgttggcaaaagtattatataaattaaaaaaaaaatacatataagctcatttattttatatgaattattatttaaattctactattttgtattacaataataattaaaaaaataagaattgtaaaacataaattcaaattaatttatttgcaacatttttatatacaaaccactgatttaagagacaataaattcttaaatcacaaacctatatccaacttaaaaaattacactaaatagtaaataaattatacccaacactttttgctcgttatgagttttaaaatgagattcaaagctcgaagagaagcctagaataccaagagcagcggttgccaaaatgttgaaggtaataatctcctttagaagatcgaaacaattgataatcatgtggatatgatgactatagttgtatcaaaagtcaagttcaaatattatttttatttaattaatatcttgcaaacttgatttgggtacggcgtcgctaatttagaggtagaaagaatttgttgccaaagtcatcaacgtgaaatttgttatggtttggttgtagtgtgagtaattatgtaaaaagtcccacattaattttaaatgaaaatttagcccatatttaggccaataaatacaggtcccattactatttgtaattcatttgaaaatttgtattcattttattttataaagggtggttgtttactcaatcttgcttaactttattcaatttgatagtgaagtgaatcagcaacccggaacgtaggtaacttttgtatattgaactttaatttattatttatttatttatacatttttgcttttattttctctttgagcattttattttagtagttttattttgttgggtcattttaagtttctattcatcaatataatagaaactatttagagaaggaaatatattgttttcccaacacaattcaattatccaaaaaagctttctagataaatttaatttttttgaggaacattacatgtaatttatgtgattatttaataaaaattattattttgacaatttatatattttttggtcaattattttttaagggtacatgctaactttcaatatatatatataaa

SEQ ID NO: 25056 - DNA, 2696 bp, Cannabis sativa
aacaacctgttgtggtaaggaaaagttagcagggtcatcaagacctggcatgatgtccacaggcaaacctgcagcaatctagcagaagtgaaagataaatatttcatttcacgattaagaaaacaaagtaggttcacactcagaaggacaaaagaacctgggtcaacaagatatccagctctttgattggctcagataaccttgattgatcctttgaagccaaagtctgcaaaatatggataaagaccagaagaggcaatgaattataatttcactgtaataaatcttggcaaaaccacatctgggagaaggtaactatgagaatgtaaggatataaaatgaagtgccaaattgcagacaaacattgggggcccaaacgaggcacaacttacatttacctatctttttctataacacgtttattcaaaactaactataaacatatcttccaaaagagaagaagttaaatgtaataatctaaagattggtaaaattatgtctagtagatatctaactttcctcacctgtccattaagaagttcccgaggaatttcaaatgaatttccagcaattacaacttgaactatttgtgctgcaataccttgttcctgttcattgtatagctctagaaagttattatggcgaaaatttgtcaaatccggtgccgcattaaattataaagacaaaataagatgaaccttttcatctcctagatgtcctgttatgtgatcaacaagaagctgaaactggagagggttagaattgccacttccaactcgcaacccagatacaaaaacaacatatttgtcttcttctgaaaggagtgaaaaccaattgtcatatttcatagcaatgttacaactgaactatttcttttctggcttgaattacatgtttctaatgtctctctatctgtgagaaaataaacaatggacagagtagttctaaagaaaatagacaaatgaagtgattgtacttgattttagcggtgtctcaatttggggtggtaggccagcttccaaaacatcttcaacaacgaaatcaccaggacctgcttttccatgcaaagcaacaaccactcctgtcacagtatcatgttagtcaaggaataacaatttcaaaaagcatacctaatgaaatcgaccaaaaaaaaaaatcatactttttcctactattctgtacatgacaagtacctgtcacataaactggaggcgaaagagcatggccactaagcttaactcttccactttcatcttctaagacaaggtaatcatcagtgtgcataaaattatgtaccttgaccagtggggcaacagttctctgtaaacaaaaagattgcagacctttactttctgaatattccattcatatccaaatcaaaatgacccgtacatcaaaatatatgcactaatacgagtagcaactatacctccttagagtactcctctagaattgaaggtttgagtttcatgtgcttgtacaaggtcccaacaactatacattccttcccttcttctaatcccaaaacagtacgtactgcaaacaaaactcaacatgagaacaaagttcatagcccgaactgatagcaatacagcaacagaactaaacagcacaaacctacaaagtagtatataaaacccaaatcaaagtaaacatgacaatattaaaggtttctatagcatataaccacaacgcatataccagattgaggcaaaaaaagggaaaaaaaaataccactacaacataactgaacctcttttaaaattggtcttagaatttgcaagaacctggtaaatgcggtttccaattaggagcaagggaatagagaatagtcctcaacatatgaagacgagcaaagtaaatctgactatactgttgacccctgtacgtttctttccgaatctcaaacttctcatcctacattaataataaaaaaatgattttttttttctttcaaatttgctcaaaatatattatacacattaaaattgaaattgagagttaaactatcaaatttgtcattctgtcaactgtaatttagggttagatatctaagaagcataaaaattggagagaacatttggatttagctcgtaaaagtctgatttttttttttctttctcactaactagtttccatagttcctcgagaaccaaacggaaagagataaatagggaaaataaaagaaaagagaaaggatgcagtactgaccgaagggttataagatgattgttttctctggaaagctttctcggaatcgatttccatggtttctttcatggcgggaaatcacacataagacgaagccaaacttctttgctttcactgaccattgtagcctatttatgtaattaaattattctcaaaaagaaattataaaaaatgaatatttaagcgaacgtattggggatgtagctcacatggtagagcgctcgctttgcatgcgagaggtacggggttcgataccccgcatctccatttttatgtttaaaaattagtatttttacactgaaatttaatcaatacaaaattttgacccttttaataaaattaattttaaaaattataatattatattatttacaaaaaaaagtaatgaaaattatcaaaaagcttcataaaatattaagtttacctaaaaattttaaattattcttaaaaaaatatttttaattttatctattctaataaaatgc

SEQ ID NO: 25057 - DNA, 2359 bp, Cannabis sativa
aagcttggaagggcttgtgcaactatctttaggaggatttcttttccaacttttgaaagaaatcggccttcccattgctgaacacgcttttgcatcttgtccttcaaaaaacccgaaatggcctatttatttcggctaaccaagcaaggaagccccaaatagaaactattagcatcagcttcgttgatatgcaattgttggcaaactctatctctaatggttctagttgtgttagaactaaaaaagacagaggattttgtgaaattaaccatttggcccgaggcaagttgaaaggtatgtagcatgttaaggacattagaagcttctctatcgttggctctacaatagacgtagctatcatctgcaaaaaagcatgtgggaaatagtgggagctccattagccactctacagcctcttagaagtttagatgactcgaaccttctggtaatggaagaaaaaccctctacacatatcaagaataaataagaggacaacggattgccttgacggatgcctctatgaggaatgagagaactaatttctttaccactgctttggatggtgtattgcacggtagatacacactgtaacactaactggacaaagtattcatgaaagaccatcttcttcatcatagcttcaataaaaggccactcaacacgatcgtaggctttgctgaaatcaagctttaatgccatataaccttccttgccatgtcttttcctctttaagtaatgcataacctcgtacgatatcatgatattgtctgaaattaatcgacccgatataaaggcactttggtactcagaaataatctgtggtaagacctctttgagacggttagccatcactttggaaattattttatatagaacattgcataaagaaattggtctaagatcacccatagtcatagcattctttttcttaggaattaagaccatgttaatgtgatttaaacctgaaggcagcaacccagtacagaagaaatttctcaccagctttatcacgtccgtcccaacaatgttccaattacgctggtaaaaactaggtgtcattccgtcggggccaggggacttgtcaagatgcatctgttttacggctttactaacttcttcttcagtgattggtgcggttaggagcaggttttggtcaccgtaattgttgtaggaatgttacttgttattgtttcagctgtatgaggaaaggaagtgaataactcagtaaaataatctttgataacatcatctagtccactttgccaatccacccaataaccgtcttgattttggagctttggaagagaattggttcgtctacgagtggaagcgtaagcatgaaagaacttgctattttgattgccttctctcaaccaaagttgttttgatctttgcctccaaaaaatctccctttgagtgtaagcttcaaataaattctgttcagcttccttgtgcttcttgatagaccgatcatctcttccttttttccaatgctgaatttctttcttgagtccttttatcctgtccttgaaatcacctgaataactctctccccaagccacaatatgctattttatcagtaatagcattcgaaggacagctagcccaactctcttgtataacttgtgcacacattggttcacggagccaacagttttcaaaacggaatcttctttttggagcagttgcatcaaacaaagatgggacaagaagaatgggaatatgatctgaacttgaaacttcaatattgattagttttgctgaattgaaatgatccaaccaatcttgagtaactaaagctctatctaattgaacttcaatccaactagtcgtacctctacccttttcccaagtgaagggatagccaataagctccatatccctcagcttacagtctgttagagcttggttaaagccgttaattaacgcagtagggtaagcattgccacctctcttatcctcattgcaacaaatattgttcaaatcgcctataatgcaccaaggcaaagtgtgcctagacgataaatacctcaataaatcccatgttcttgaacgaaaatttctatttggctctccataacaccctgttaatctccataccatattatcattggtatgaaactaacatcaatgtaagaattagaatacccaagtacccgaacctctccttcaactttccaaagaaaagcaatccccccgctcctaccaacagcatcaacagccataagaccatcaaacccaaggctaactcgaagcctttcaagaacatcttttttacttaatgtttcacaaagaaaaacgaatttgggcctcttctggatcacaatatcctttaggaattgtaaagcccgtgggttcc

SEQ ID NO: 25058 - DNA, 2465 bp, Cannabis sativa
taaaatctaataagttcacttcttcttcttcttttctcttcgtcacccctaaccctaaacccaccatatcgacactcgacgctctcgtactcaccatcaccggtgccggaaaagcctctctactctctgttctaccaccctcccccttgaggttatctttcgtagatatttaaagctctttcatttttttatggcttcaaattttgatttttttctatccccaaattcatgacttcttatctgtgcttaaggagttaaaataagagtatttgatgaagacaagatgtttggtcaaagctaacatctttattttttttacatatattgagacttgagtagtaaagtttatatttttgttgttttacaaataagaatgagatgtataaggttgttgttgttgatgcagtgaattattagtattaattctctccacactccattacaggaatcatccaccacaacaggcctcctcactcccattagttcttttgttgctaagattttattggaagctagttttaaggagttaatgttatgggaagaaattcagtataggaaaaaattggatctttataaataaaatttgaaatgaatatgggctatcaagcttcttgtgtaaattagttgcaacaagcttcttgtataaaaaaaaaacagagagcaaaccagaaatggcggatgaagaactcaatccagcttcatctccatgtttgtacctgttctcagcttttcttgccatggaaccctcagactctctgatcgaattagctcgggtttgcgatgaagggtcggtttcagaaagagtacagagattcatttggagtcattgcataagcaaagttgaaggaaaatttcatgcaccttatttgaagaattttttgaagaagcttattagtgaagctgagaagaactgctgcagtgttttagatgaaatatatgaacaatatgctttttatatgacttcattaaaggatgaagtttctatgggagaaactaaaagagtcaacaaatgcatctcatttctttttcctgatggctatccaaagtggaggaaattgctgatacagctccaatgttctcttaacatgcttgaaggggatactgggtgttcagtttggccttcaagtctttatttatcagagtgtatactttcctatcctgaattgttttgtaataaatcttgttttgaggttggctcaggagtgggtttggttggcattactctttcccatgtaaaagcttctgaggtgctgttaagtgatggtgatgttttgactctagcaaacatgaaagttaatttggagttgaaccagttgaaccaaaacaaggtaaagtgcattcatcttccatgggaatctgcaacaaaggaacaacttcaaagctttaagcctgacataattttggctgcagatgttatatatgaccctgtatgtctcccacatcttgttcgagtagttgcaactcttttaaaccacacaaaaaaatcatattctgaggaggaggaggttaacaactgccaaggctcttcaatgggagaaacacaaggcaatcttggtctgggcttgccatggaggaaaggtccagtggccctcatagcttctgttattcgcactattgacacattcaattattttcttgaattggtagacaaggctaatcttagcatcacagacataacccaaacactcaaacctgtgaacctacttccttacatgaagtcatacaacagatctagtataagcctatttattgtgtcatctaaataactaattctctccctcctcttcccccaaatttttctttcattttcatttttttgcccttcattcaagatttgtgttgtattgcaagagaaagctttaactttgtattgattcttccttataaatttaatggcttgaaatggttttgaagaaaaaaaaatacaatccttttgatcttcctagtaagaaagttgttacctttttctatttggcttattggtaccgtatttttctaaattatataaattttggtaagttggttttaaattttgtttagtgaactaagaaacaaattatgttttgcgtgaatattgtgtttcgtgtggttgtattttgttgaatgataattaagccataaaagtatattaaattttaaatttttgatatttttaatatattttttttaataatataagtattaatttttttttttcaattttaatagagaaattggttgctaaatttttttatgttttattatacacgtacttaacttttttgttctttttttttttttttagcaaaattactttttaaatttactaaatttgagacgttagttaaatattaacgtcaactaccaatttgataacactgtgtctcaaaatatattagttttggtaattttattttttgacaaattggttcccaaatttttagtttcttaaaaacataaagggccacctattgatactactaggt

SEQ ID NO: 25059 - DNA, 4630 bp, Cannabis sativa
aagaccgcggagtctcccccactgcatttgcagcgaccagtcggccaacgcaacacgtgccactcacgtgtgtcttatttattccggctagtttgaagcacgtttacccgttacacaaattacaaaatcacttagggggcgtttatgggtgttaaaaataatttgattataaggagtattacgaaggagaatatgattattaaaaaatgtgtaaactgtgtttggctgtgtagggtaatatgtaattatattactgttaattaaattacactgtttgattgagtacaggaatcttatatatattattttgaaaaattaaaataaaaatatttttttattatatttatttaattttttttttttttttgaatggtaataatctttattaaccaacaacctcagttaccaaacatggtaacaactcacttgggacatcccccatactaaagctacgcccagggtacaaaatagaagctcttgcaaaagcatgagcaaccatattagctgaacgtttaacaaaataaacagaaacattttccataccaacaagcaaagatttacactcttgtatgacagcaccatacacagatatcatttcacttgaacctctcaaagcttgtaccacattaagacagtctgtctccaaaaacacctgctgccaaggtttatcttttagccaactaagagcttcccttactccaattgcctccgccactaagggttgaacaataccattaaagctactggtgtgagcttcgatcaacagtcctctgtcatctcgagcaaccaagccaactccaaagccacgttcccttccgaaaattgctgcatctacattcaccttgacaccattccgttgaggcgcacaccaccgttcagcaccatcaccttccataagtccaaacgaaaatgaacttacctcgtgatcttgagcggctaaccattggtcaagatagttctctgcaaaagctacaatttccatagcagaagtggactttttcttccaaaccttgttgttccttgctccccaaattgcccaacagagagtaaccattctgcacttttttcctttgtccagtcccttaaacgattcaacacaccaatccagaaaacacataccagccgagaggtttgtcccaatacctgttctttcccacgcttgtttgatcaaagaacaagaaacaaggcagtgggtaatagtttcctcctccagattgcatacaggacacaaattagtgacttgtactctctttattctcaatgatacaagggtaggaaggcaatttgtacaactcctccacatcaggttttttattttaggtggaacttttaaagcccacaaagtcttccaaaagatagaagagtcagaattattcccttgatcaaaggttacctgagttaaattgtaagcacttttcaccgagtatatgcctgagttttcatgagcccacacgtagcgatcatctccttgaaaaagatgagtaggaatggcctcaattaaccttcggtccctatcaacaaacaagtcagcaagtatctcatcgtcccacctttgatcctccatagacaataaactagctaccgtagcattgcgaagaccagggtgatcagatatgacataagaattgtcattatcggataaccaaggttctcccaacacatgaatatccaggccattacctattttccaccggaccccttttcgaaccaagtcctgagcttccaacacacttcgccaaacataacttggattattacccaattttgccgtaagatagttaccattagcaaaataacgagctctgaaaattttgaacaccaaagaatccttccgagtaagcaaacgccaaccttgttttccaagaagggcaaggttaaactctctaagacttcgaaaccccatccctccaacacttttatgatgtgtcatcttttcccacgaatgccaatgaatccctgactcttttcctttcgatgttttccaccaaaatttagccatatgttgctccatgtcacggcttatgtcaagtggtaacaaaaacacactcatggcatagctaggaagtgcttgagtgacagttttgattagaatttccttccccgctttcgatagatacttggaatcccaactttgaacttttttcctcaccctttctttcaagtagccaaagaccgttgttttatttctccccaatgtacttggaagccccaagtatttactattatcatccgcaacaatcatttggagcagaccacacagttgttgtcttctcccttcatctgtattggtactaaagaagattgaagatttacccaaattgactttttgtgccgatgccatttcaaacttcctaagcaactcctgtatacaaacagcctcttctagggtagccttgcagtacaagtagctgtcatcagcaaacaacatatgtgaaacccgaggagccctatttgctactttgcagccatgtaatctacccataagctcatatttattgattaacgtcgatagtccctcagcacacaagataaagatatacggcgataaagggtccccttgacggatgcctctcctaggtataactggacccatttctctgcctgcatgaacaattgtataccttgctgaagtgacacacttgagaatcaaacgaacccagaaagggtcaaaacccatcttcatgagaatagcttgtaagtagtcccattcaattcgatcatacgctttgctcatatccagtttaagtgccatataaccctcctttccctgccttttccttttaaggtagtggagcacctcaaaggaaatcattacattatcagttataagtcttccgggtatgaaagcactttgatattccgacaccactttatccatccatggcttcatcctattagaaataaccttcgtgatgaccttgtataacacattacacaacgaaataggccgaaggtcggacatgctttccgggtgcttcttcttcggaattaggactacattagcttcattacaaccttcttcaaactcaccatattgcatgaatttttgaactgccaagacaacatcggaaccagctgtggaccaacttttttgaaaaaaagccggagtcatgccatccgggccaggactcttatccggatgcatttgaaaaacagcacatttaacctcttcttcagtcacgggctgtcgaagactacaattcacttctttcgttacggtacggggaacacaatcaacaatctcttggaaatcactcccagtatccgagaaaagagattcaaaataattaaccaccaagtccggcaaacccgagtcccaatccaaccatcttccatgatcatctttaagtttcaaaatgctgttatttttcctccttgtactagcagctgcatgaaaatatcggctattttgatcccctccttttagccaaaactgtttcgaccgttgcttccagaaaatctccctctgctttagaatttcaaacaatcttttctttgtctccttatacctctgaaccgagctatcatctcttttgtgcttcaagagatttagctcccttttacaacttttaattctccccttgaagtcccctgttattgttcttccccaatcggcaagcttcaatgcacaatttttaattttgcttgatatatttagccccacggacgaatcccaactttcagcaataattgttttacacagaggctctttaaaccaagctttttcaaacttaaacttctgattgtacacataagaaagtttcccaaccagttccagaaaaataggcgtatgatccgaaggagaatgctccaaattaaacaatttagccacagggaaatttaaaaaccaggaagaactcaccaaagcgcggtctagacggacctcaatccagtttgcttgtcctctatttcgttcccacgtgaacgggtacccaatcaaatcaacatccctcaaatcgcagtcgggcaaaacctgttgaaatccttctaacaggcgtctcgggtatggacgacctccccgtttatcctcctggttgacgacgttgttgagatcgccgactacacaccacggcaacgacgagctgtggcttaggcttcgcataagggtccaggtagcttcacgttggtctctcctgggttcaccatataacccagtcaaacgccactttctattattatcagattctaccacaaaatcaatatggtttttagaataaccattaatccttcccccctccctatctttccaaaacaaaaccaggcccccacttctcccatgggcctcaacacaatagaccccttcaaagcccaaagagtgacccacccattttgctctattcttcaaacacttagtttcacaaagaaaaacaaagttgggtttcttttgagaaattatctctttaaggaattgaaccgtccccgggttcccaagcccgcggcaattccagcttaagacattcataatccttggcgggcctggacaccagaacccgcctccccaacgttttttgtcaaaatatcagcatttccattcggcccaatactctctatcatttctgtttctacttcattagtggacactgttgggttttatgccctaaataaaaatctttacaatctgattagttat

SEQ ID NO: 25060 - DNA, 1946 bp, Cannabis sativa
atatagataataaatacaaaaaattctcttaaaagggggtggggggaataagcgaattatataaaaaagaataaaagaagagaggtttaatcaattagctcatggaggaagacgggggcccatgcgctcggccaggataacttccagtttcttgttcttttcccaaaactgagccaaaacagcctcaggatcgggaaagaaggggaggcgaggttaaaacttgttggctttccagcacatgaacaccccatcctcaaagtgcttctcatagtgcttacaagtaactggagccagtaaggactccctcccagccttggtagcctcttcttgagtctgttaccaaaattcatgaagctccttgaattcaatggtcagattgctcgttgtctccaagtcagtccagtgcagctcttttagagacttaagcttcatgacgagttcttggttttcctctttagagtcccagagatccttttttcctgagcccttcccagagatgcccttcagtgccgcctgatgatccctctccatgagagccttcttcgccagagcgccatcacgaagggcatctgactccctaagcttcctcatcaccccgtacatgccaccaaactctgacacggtgaaaccttgatcaatttggaaaactgactggcctccgcagcaatcttgcaacaaaaataatgaggttggaactttgaaaataaagcatgaaaagaggcgcagaaaattgacacttaccaaagtcaaggcaacactcatgtcctggatttggtaaacagggttggaaaaggcacaagctgcatacctcttggtggggagttgggttaaatctgcagcaaaagtgactcaccatttttgaagaaaacggagccaggttagggtccacaaagtgtttgaaccagtccgtcatgggatccaaattcaaatcccaaatgtccccggtatactcgcctcgaaaaggcccatcttgagcctcccttaaccactttttcagggcctatgcttcagtgtctcccttggacagttcctccatagcataattgtttttggcaatgcggagttgaatcctttcttcatcaggatgggcagaagtcagaatgatgcctggaggggccagataattatcgacctctgagggaatccctgaatcgacactagggtcgggggtgttaaccctcttcagcttcttgaaaggctccagctcagaagtgacacttttacgcttccggtcgagaggagggacaacctcctcttcctcctcgtcaatcaaaaccacctcctggttcccactagcttcaacagtaggaccccccagagtcacgctatttggagggtgcttcagtgcgtctgtctcagggctatgtgtctgggctagggcgtcaaggagatcctccataggttttgctattcaaaatgagcaaaaggtcagaatgtcatcaaaaattataagtgcaagtatagtgcaacaagactaatcctaccctggtggtctaactcagccctagaaaacttataaattaaaaagctagcgtcatcatcccctgaaggaagaaaccaactcgaagtcatgaaggaggaatgatccaaagggattgctacaggaggaccaaggcccatccgagaccgacccaagaaatgacttaaattggagagataaaaccccttggcgttatcaccccaccgggaacggggcatccaacatttatataatcttttatcaaatgccattggccttaagttagcatagtctggggcagaggaaatgaagtgaatattcaaaggagacttacaggctttgaaagtgcttgcatcaggggctctagattttggaaccgagaatggaaatttgggccggaccagcatcttctccttccctatctcctcccgggatacctttccagaggtagcttgtgttgggttttgtaccctaaataaaactcatt

SEQ ID NO: 25061 - DNA, 5419 bp, Cannabis sativa
gttagttagggtgttacaattgtatatgattaatcatagtttggtttactctaaataaacttaaaaactcaatattggtgttataagcaaacaaaacaaattaactctatagttatcgattaatttaactctctgtaacagtagaagaagaagatgaaacagagagtatttgaaatcatacataagctagaacagtggtattaaagaacctagtgaactaactgaggaaaaactttatttatatcccaagtaaagtacaaaagcaagaaattacaaaataagagaacaacaaacttttaacagaattaacggtaaaaccgttaagtggtttttatcctaacatcccccctcaaacgaaatggggtaatccccatgttcagtttggatctcaaataaagaaatcgttcagtagttaaagcttttgtcaatgcatcaacaacttgatatgtagcagggacatatcgaactgagagttccttggcaagaatttgatctcgaacaaagtgaagatccatctctatgtgctttgaacgagcatgaaacacggggttggctgctagtgcagttgcactctgattgtcaacccaaattatgggacagtgaggcatagtaacatagagttcagatatgagagatttgagccactgaatctctgctgcagcatttgcgagggtcctgaactcgctttctgtacttgaccttgcaacaacatgttgcttcttagctgaccaactcaccaaatgttcccctagaaagactaagtagcctcctatcgaacgcgtatcatcaatgcagcttgcccaatctgcatcggaataggctgtgagagaaagaaaggaacttggtttaaggtgaagaccatgagggagtgtccctttgagaaatctaagcacccttttgcaggcttcctagtgtgtagatgtaggagcatgtaaaaattgactgagtttatttattatgtatgccacattaggccttgtgagggacaaatattgaagtgcacccattgtgcttcggtatagagtgatgtcctcgagtggttccccatcatttaaggctaattttgcaactgcacttgtgggattaggactggctttggctccttcaatttgtagcttaacaagcaaatcatttatgtacttcgattaagatagaaacatccctgaaccatctttgaaaatttcaacacccaagaagtaatgaaccggtcctagatctttcaaagaaaaagctttgtttaaaccctctatgattgtagaaatcaatgatgaacttgggcctgtgatgagtatatcatcaacgtagacaagcaaaataacaagattggagccttgcccatgtatgaataaagaagtattagaccggctgctacggaacccccactatagtagagtgtttttgagcttgtcattctaagcacggggtgcttgcttgagcccataaatggccttgtcaagtttacatacatgagttggatacctttcatcttcaaaaccttgtggttgggacatataaactgtttcttctaactcaccattcaggaaagcattgctgacatctaactgttgcactggccaattatttgagactactatagaaagaataacccgaacagttgcaggcttgacaactgggctaaaggtttcttcaaaatcgatccctggtgtttgaagataccccttggcaaccaaccttgatttgaatctatctaatgagccatatacgtgagtttcacacggtgtacccacttatttccaataacatgcataccttctcgaaatggaaccaagtgccatgtaccagcttttttgagggagccgatttagagttcattgaggctaaccattttggatctcttaaggcagctttgagggatttaggctcacttggaagtagggattcgggtaaaggatgcttggtggcaagataggatttaggtttgacaatgccattttgagatcttgtggtatatgatgtgtgcgtgaagtagcaggggcagcagcacaggtggatgtattatggttgttctcagtagggcccaaagaatgattaagagaatcatttgtagtaggatttatagatggggatatgtggggaggtaaaataacctgtggtgcagctaatggttcattgccctcagaaatttgtgcatgaggaagactgggaacaataggctgctggtgtggaacaacatctacctcagaagcattactaataggagctggtgtcgagttaggagtgctgcttggaacatgttgttcagtaggcagaggagcagtggagataatggtatcatgtctggacataactgctgtatcttgaggtgcagaaggctcagcagtaggtgcagaagcatgcataataggttgagaattttgattagtaaatggaaaagataggatttatagtggtgttagatggtgatacatgattgtgtgaaactgaagagtgagcagggaagcaagattcattgaacaccacatgtctagcaataaagagtcgaccatctttgttttcacgtaagtatcccttgtgattgttggagtaccctaagaagatgcactgttgagatttgtactccattttatgatgattgtagggtcacaagtatggaaaacaggcacaaccaaacggcttcaagatagtgtaatcagggatattgccaaacaaacattcaataggagacatatggccaagaacaggtgtaggcaacctgttaatagtgtaaacagcacactgaaatgcaaaccaccagtaagtgaagtccaaccctgattgtgcaagaatggttaaacctgttttagtgatatgcatgtgctttctctcagcacggccattctgttcatgtgtatgatgacatgaatgagtgaaaaggattccttgatcactcaaaaatcaagcaaaagtcctgtattctcctccccaatctgcctgaacattttttataggcaaattaaattgcttctcaaccatgcttttgaacttaataaaggtgtcaaaggcatggtttttctgaaccaaaggaaaaatccatgtgtacctgctatagtcatctaggaaatgaaaataatatctatagccatcttctgttgtaatgtgaaaaggtccccagagatcagtatgaatgatctgtagtggtttagaggcacgactaagggataaaggaagggctatttatggttttttcctagttggcatgctgtacaaaattgcagctggtttagagttcctgtgtgaggaactagtggtaggattttagaaaaaacagtgggatttggatgaccaagttttaagtgtcaagaattgatgtcattttgttggaatgtatgaaacacaaaaggataggaatcaaaagagtagttatctattttattgattttagattcagtacaagataaggattgcaaaacattacattgacatgaattcgaaatacaacagttagactcaacaaaagtatgatgacactgagttggttcttgggagctggggctttgtgttgtgtctcctgactggtacaacttgtttttaagtttctctttgagaaggaccttccctgtttgcttgtcctttacaaaacaacaagttttgtgaaattcaagaaaaacattattatcattggttagctgagacacactaactaagtttttggtgatagcaggcacttgaagaacataatgtaattttaaaggacaattagaagaagagggtagagaagtggtaccaatgtgagaaatgaccagcttattaacatctcctacagccagagaatcagggccatggtaactggtggatgttttaagacactgagaattgttggtgatgtgatgagtgccccctgtgtccacaaaccagccatcatcatccccaaagtctgggacaaaagaagccgagaaagcttgaggatcatagtcacattcttgttcagcaacaaaggcacggggggaacagtgcctggtttgggagtaacctatcttttattgaatcgataatgacatgtgggtgctgtatgaccaaaacgtagacaaacttggcattggggccgtgtagattgagtgcctggtttgggatatccacggcccatgtttctggttccttgaggtgggtgatagacattggatcttgagttgccatatgtcaaatttgcttgcattttcatggccaattcattgacagcattgtgattttccaacctgctttcatgagtagaagagcatgaagctcttcaatagagagaagatcacttcttgtagtgatgccagacaccacagaatcatattttgatcccaatccattcaagatttgcaaaatgatatcttgatcattgattgtagagcctacaacagctaaagaatttgcaagattctgaactttgtcagcataatctgaaattgagagattacctttgcggattgtagagaattggttcttaagttgaagaagccttgcacgagattggctattgaatcgttgctctagggctttccacaccatgtaagaggatgagaaattcgcaacagacgcaagaataccttcgaacatggatgaacgaagccaagaaagaagaagttgatctttctttctccattgagcaaacagaggattaggatttccattaacttgggtagagggaggaggaacaccagagaacaatatttcgtcgagatcatggcctatcacagtgggcaccacctgtgattttcaggccaaaaagttgagacgattcaacttgatcgtgagggaagaggatagagaattcgaaaatggattccaagaaggaatcattggagccagagacgcagaaggtatagttgaagctgagttggtggtaggatcaatcgaggaggactccattgacgcaagtcagaggcaatctaataccatgtaacaatagaggaagaagatgaaacagagagtatctgaaatcatacacaagctagaacagtggtattaaagaacctactgaactaactgaggaaaagctttatttatatcccaagtaaagtacaaaatcaagaaactaaaaaataacagaacaacaaacttttaacagaattaacggtaaaaccgttaagtggtttctatcataacactctccaacaggtctctctatctacattgcttattatataattattttccatgtaatgaaactattctgataatctagtagtatcacctctaccatgttggagaagagagagaggagaagtagaaataaaagcaaaactctggtccataccatctctgtgactattattattccctctaaacgaataagacccacttaaattatcaaacgaagatgatagaaaagagtgcagaaaatcatcaaaaccatcatgaccaccaatacccatctgatatttcttcccttctaactgatcatctgagactctcaactctccgggcaccataa

SEQ ID NO: 25062 - DNA, 2417 bp, Cannabis sativa
cagtggtcacaacaaaattcaacactgagaaatgctatgataagaatgacttaggttgatggagtataaaatgaagagttatattgctgtagcaggaatggttgatgctttaaggttgaaagtgatatgccttcaatactttctcgaaagaatataagggtccaaaaggaaacatattaagggcttatccttctcgttcaaaatgagtgaaaaataggctctctcataccacagattgatgagtttaacaaaagaatagatgtcttgagaacattgatgttaagctggataatgaaggccaatcatagatcttagtgaatgctcactacaagcatataagcacttaagagatgccaagttatatggtggggaacatgccataactttgggagaagtacagtttgcagttcgtgcaaaagaactcaatagaataatacaagcaaaagaagatcacactggttcaaaaggaagaatagaaaataagggtccaaaagaaaactctattttttggaatggtgtatagtagactatatttggcatatgcaatgagtgtccttggtcaatttattacaaataacacaggaatcatcaagagcaccaaagtggattgtgaggcacttgaaatgatcaaacactcttagttatctctttgcagttctttcagtttcaggtcttttgtcttgggcattttttttttaatgtgctatgttgtgttgtggcttttgtacatattattttcttgaagtcatttctataacagtaattcagttaaactcacattgcaaaaattaccaaaaattatggctgaaaatgcatctcttgagcatttaaccataacacggtacaaacatatggagtagaaggttacctaaacttcggccattcttaatacttgcaatgtagtactgaataataagcccaccaaatgaatgtccaagcaatactggtggtgacttgagtgtacgatggataaagtgagcaatatcacctgcatgagtctactgcagaaattggtgtagaaaggaaataagaatatcactctatccgatatggcaattctgagacaaaagaaaataaaaaatcgaactaactcatgttctttgcagaccaaaagcaaagatacctgtagtgtaccggcaacagaatcagtaggcgcatcactttcaccctgatcaattaggagtagtaaaaccagcatcagaataccataatcagaaaaaaatcttgctattgtttgttgtgtcatgtgacttcattactaaagtccaacttagtactatagtgagatgtagtaatcaatagttgcaatgttaaaatttcttctatcaagcatgtttgtatagacatatattgatctttagacaggacattattgttcaatgtgaacataattcacacttaagagtcgtacaaacaatctccttcttactctttctttcctttctgttttttttttttttggaattcaaatttagtaaaacaaacaacaaattctaaacattatctcaacaaaatgtaatagaaaaacttgaattaacattgaaaatcaatcatttaacgattcattaaagatgaaaagaaacggatttgacagccttgatgaaaaggagaaggtaagatgagagaaagaacctggcccaacaagctaagagcatagcaatcgtagccatgtgatgaaaagaagggtaaccagtgttcagcccagcaccaagcagcatgatagcttccatgaacaaaaaccagagatgggttatcaattcttgtctggcatttatcatctgggtctttattatctacagcacccttctgtacaatcaactccatattcagcccagatgggagctcgtgaaaaagacgggactgcccctgcttcaatccataagacgctcgcattttgctagcgctgtcaagaacagctcggggctttgtcgacataaccggagagttaaatttcaatggaagaagagaggtaacagcagccattgccgacgccgtgaacttgagctcacactttccgacactgtccaactgagtcacaactaagcacttatcttcgcccataacttaaagattttttatttattattttagagttttttaaatattatacttaaaattaattttatttattaaaatactttttaaaaaaattatttacataaatatcattctgtcacattagtataaataccgaattcaaaataattatcgaaaataaaataaaattaaaaaaatattatttccagaaagctttttgggagttttgaaaaaaaatactatttatttaattattttttatatgactaagatatttagttatttagttatttttgatatcaagtagttatttttctattaaaaaatttattttagaattttacacaaatatagataataaaataactaactatctatat

SEQ ID NO: 25063 - DNA, 3230 bp, Cannabis sativa
ttcaaggcttggggtttatgattgggtatgccactcaatacattttgcttgccatccaccccagtttttgacgtttgattcttccagtagagatcgtttatttcatcttcatagtggcatgtttgggatgttgagctcacagagttggcttgtttttgtttcccaggcaatgtcgcgaggtactgcgatctcacagagttggtagtcgagggcaccttactggtgatacttttagcctttgtagactattctcaccaataggtgtgatggatgcagtaaatccatattggtgcatgttttttggattctcttcatgatggtcaccatctcctcttgtttgaggcacttggcgattctggccaacttcttcaaccatgggtgttggtgtctctcttttagaggtgattagctgagtcttatctacatgaatctcgacacccagaagacgatcagagcatctaagcatcttatagcagtggaaagtaaggaaatgatatgaattgagtttttcattcccatggagggcagcaaactgttgacagtgaaaactcgttaactaacatgagaccaaaaaatagaaactcaaacacaagacttaaaacaaagacaaatatatgacctggggtacatcagtggtcccaatggacatggcgacatccatgacctgcaagttgcattttgcaggtggtggtctcacaccttacctttgtcgagtgttggatggtccttagttgcaggagtagtggttgttatgcactcttggtcagaatgtcagtacttgtaggagtggtgtctccactattcatacatctctggcatcataaattgctggaggtgtggttgtacttcctttgcatacacaccacgtcctttgtatgcatgtcttgtccttgcaatcgtacctacgttgtattcttattgaacacttaggaaaacttcactaagcatttttatgtcattgagcagagcattgccaatttacaagcatgcaagttttggcttagtgacttgcatgcaagtctttcttgagaaacttgcatgttgcatggccaacggatatgcaagttcatcacatggccgagtgacttacacatccatagccgagtgactttcatgtggcatggccaagagatgtgcaagtttgtaacatggacgagttactttcatattgcatggccaagggatgtggaagtttgtcacatggccgagtgacttgcacatccgtggctgggtgacttgcacatcaatggcttagtgaattttatgttacatggtcgagggatgtgcaagtttgtcacatggtcgagtgactttcacacccatggccaagtgactttcatgttgcatggccaagggattcgtaagtttgtcacatggccgagtcaccatcatggctgagtgaatttcaagttgcatggccaagggatgtgcagatttatcatattgtcaagtgacttgcacatccatggccgagtgaattttatgttgcatggccaaggaatgtgaaagtttttcacatggtcaagtgacttacacacccatggtcgagtgacttcatgatgcatagccaagggatgtgcaagtttttcacatgaccgagtgactacagatttagggtcgagtgactttcctgttgcatggccaagtgatgtgcaagtctgtcacatgaccaagtgacttgcacattaatcgccgagtgactttcatgtttcatggccatgggatgtgcaagtctttcacgtggccgagtgacctgcacaccaatggtcgagtgactttcatgttgaatggctaagggatgtgcaagtttgtcacttggtcgagtgatttgcacacccatggccaagtgactttcatgttgcatggccaaggggtgtgcaagtttcgcacatgggcgagtgactttgatcttgacatggtcgagtgaccttgatgctaacatggtcgagtgaccatcaattctacttggtcgtgtgaccatcagccctacttggccaagtgaccctcaagtttgggtttggttaaatggttcgtacaggcgtcgatctagtcattccttgcacgactcttaatgtggattttttttaactactcgagactaatctatgactaatctcaagaattttcctttgtaatttttggggtttaaaaattttatttaggcccaattagtattgagcttattcaatgaataacaatcatttatataatggttaaatttctttattttgtgccttgtgtgagagttaggggtcattaatagcaggtatgacatactaaagacaaccctcttttacatgaacaactctaattgtgaaggttcatttaccttgtttggataattatattaggctaattatataagttaaacctaattaaaattgattagcaacataattaattcaaaaaatattttaaatttattgttcaattgattattatttgattaatttagaacatctacacttagtttgatgagataaattctagataattaatttataaggaaactcatttgtactttttgtaagtatttacttagatagaaaattaatatttaagttgaacttaattcaagatatataaatattggacaattattctgtgacatttaattaaacaagaaaattatatttacgatgaaaattaatttttaattagttgtacatcaacataaattaagaataactttcataatttattttattgtattttaaaaagtattagagttttgaagttaatatgtaaatatagaaaattaaatttaaggttaaaaattaattttataataacttaaattaattttcattaatatttatttaagataaatattaattaaaattatcatacaattttttttttttacaaaataataaaatttattataagatattcgatctctattgttggctttacgtagttactatttttaatcggattcgtctctaatagatggtcatcaatttgataattaaacatcgttagatctcaaaagataactattttctaggttcaaattctaagagcttcatcaatataatgactacatagagttgaatttacaactatgaaacaatggtagaagcacataacataagaataacattgattcttacctaaaatgagataacgttgatttcttattttaatcggatacaatgttgtcaaaggttgtcagaatggtgtccattctagatgagctaagtactctatttaactaatagtatctc

SEQ ID NO: 25064 - DNA, 4533 bp, Cannabis sativa
gagagagagagagagaagtggtggtcaccaaagggtggaagaaaggaaaaagctttggaatttggatcgatcctttggcttgacatattagtgttatttatatattttagtatgaaagagaaaataaatgaataaaaaaaaaagttgtaaacttgtaacttgtaactttatgacatcttttgttattgagaattcttaaatgctaacaccctcttatgtgttaatattagaaagtatcgctagccaatcacaacgtgacatgtctagaaagtattagggcaccacttgtacctaatagcaatactcttctaaaaaactattattggtgtttatcattttttttaaaaatattatattactaagtataattaaatattacatctcatatagtttttttattttttttttttgaaacagatctcatatagcttaaaagaataatttttaagaaatatcgctaactaattataggacgctacctatagaaggtattgagcaccactagtgcttaatagcaatgctctttattgtttgtttattttgtagtattattagaatttgtaactttataacccataatgtggtaaattagatctcagtttggtcaattatctatcttgtttattcgtaagaacatcttttgtgatcaccgcgagatctagctctttctatctattgaacgcttgctttcaaaaaaaaaataaaggttgaatttttatttattggaaattatttattaaaaaatactattggaaattttgtagtagacatctaaagggtcgttttgatagattctttatttattttatcattcaaaaaaaaaaatagttattttttttatgtttgcatacgttgtagccatttaggattacttgtaaatttttaagaaattataaataatttatagtactgaaaattaagttaaaacagttacttaccatgcgtataaaaaaaatagtcgcttgtgttacaaaatatgtaagttaggattatttttggcattgtagactattcaaaatttcatgaaaatttataagtggtctaaataagtataacgtacgcgattatgataaaaaaaaatgactaaaaagctcttttgtatattaaaacagataaggagtctactgatgaaatatccttttagggggtgttatgtagacttacctaatattatttttgaccttgtgttttgtaaaagttaatgatcaggctttctattttgttaaatgataaatcgaccatgtattttataaaatggtacacaataatacattaagttcaattttctttaattatttttttaatattaccaacctaaaatcgatcaatttctaacaagaatatatgcaaaaaatacaattaatttggtcataacatctctaataaagttattattaagttttattttaacaaaaattaatttcagagtactattttataccatttaaaaaaatacaaatttaaattgtcatttaacaaaataaatgatgatctaataaataacttttataaaatatttaatatccaaaataatatttatcctcttatttatttcttaaaaaaacaagaaaattatgaaggttgcatttttgtctacgaagataattgactttaattagctctggtttttaaccatgtttgtttataaaaatcacaagaagaaacaatttttatgcacaaagaatatactttacttgatcatatattataatttaggttaatttgattgtacaaccttaaacaaaattattttggtatattttttttatttgtttaagtatttaggaaaatattttagttgtatatatatgtgtataaatctaataaataactatttgaactttaatttattgtaaactattcataatttttgaagtttacagttaattttaaataagtataaaaaaaattatattaaaatttttttctaaacagaacgatgtcggtcctttggagtaatatagattttttctataatttatacatacttagttttcttttttttttttttttgaaatgataaactataattttaattatggataaaattaaataatattaaaaaattaattatatatgacctattgtggtcataatatatattttaattaatttataatgtaaaaaataactttttaaaaaatctttttaaattatagaaaattattgatggataacttaacatatcatcaaatacataatataaatttaataaaataaatactaaaatatgataatatatattttttgatacttttggcacaaaaataacttgaatgcatccattcgaaaaattgttcctcaattattccaaagctcttatctaattaatttgtgggccaattttgaatgcctaatttcacaatcatggccaaccattaccatatctttcttttaatcttttgcattttctttattagacataacaacaataccccattcccatgcaaatatatgaatttaatttatatgtgaccccttttcttatcttaacacaaaattggcccaaaaaccaaatatattttattcttttatgttctcccaatagaaaactcgatgagaccaaactcaaatttgatattaaactaatattaaaaaaaatataattttagcaataaatttatttttattttaaactataatactaaaaacacattatttattattatatacatatataaatacaaataatacatatatatccaagaaatttaattattcaactattatttaatttaaaaactaaagaaaataatcttatcgtggtctacaatgtccactaaattttgtgaaatactattatagacaatcttatttataggtttaggtattcaataatcgagttggattatttatttagtgtgaaactatactatttttgacattttataggccagttagaaatgacttaagatgatcactaatgaaacttctaaagcttatttagaagaaatcataaattggtcattggataatttagtcattgacactagggccatgccaacacatgctactccacacaccaacacacacattcttcttttcataatattgaaaaaaaaatatcaaaagagaattgaatgtattttaagtatcacatgctattaatttatgtcattgtacacttttattagtgtctagtacaaaagcatgtgtatttaggtttaaaaagaaagggtacattttcttggacttgattttatatatgttttaaattttaataattaataatcgatcgatcgatcaaatcttagatcaaacaaataatagaccgaacgaaacgaaatttcatccttgagcaagacaaagttgaaaccttttgttagtaatgtcatttttgtagggttttaaggaattgggcaatgtacaaattaagagtattgaaaaagggcatatgtgtaaaattctaagatgtatgttatgttatgttatgaaatattaagatggaggagattaaaacaaagtactatgatgtgttgttgtttgttttgattgtgatattgaaaatgaaaatggcatcaagttgtggtcccttattatacactctcactttcaccaagtaagtaaaggtgatcatgatgattatgagtcatcccataatgccacacaccattattacatcacaactccttcaccattacttttaattaacccttttttttttataattaaaacaaaaaaataataataataattaaagatagaactaaaaataatttatatgataagtagatcttggatgaatttctttttatttttagagaaattataaattttagttgtacgacgatttctattaaagttacaataaatattttattaattttataaaaatatatattttattatgttgaaaataaatttatacgcacattaaaaaatttaactttaattttgttactaaaaattattcatataatattatgtgttaataaatataatatatacaatcatataaaaaaaatataatttcccatataagaaaacaaccgataatgttattcataatatttttaataataataaaaaaagacatttggagtttcccaattgggttctacttctacctctagcaataacaaacacaaataatttattaaagaaatacacactcaaacttataacatctacttgtgttgtttgttggccaagaatctaatataaaaatgttaaatttcacttgtatatgtataacataagaacttaggatgagttatgaaaaaaaaaaaagaacttaggattatcatatatatatatatatttatttatatatatatagtgtataatatttatctttaacccaacactattatatataccattttgttgctttgttttatggttaaagtagtagaataaatgagtgtatggtaaaatgtatgaggttttatctcaaaattaattgacaatgagaggagtagctcatgcatcttatatatagtatttggtttcaacacattattaatgtgagactctctaacacggtgttctattatatagtgtgtcactgtagactactatatttttactttt

SEQ ID NO: 25065 - DNA, 4658 bp, Cannabis sativa
aagatctgagaagaggttttggctggtcaagctaaagattttacaatgtcaagtaattggatgttgttgtatagaactagagtttgtgtttcaagcagcgtggaacttagaaatgagattctcgaggaagctcataccactccttaacttctcccattttttttttttgcctacgaccaattttaactcagggccagttctgagtttccctatcgataaatggcatggcaaagtcctaaatattgaggaaaatgagaaaagcaacgaaacatgaaatctgcctaaaaaaaaggcatgtcgtttctataaaaacaacaagctatttttctaggtctttcccagtaagaacagtaggcaatttctatagaaatgttctgctgtttttttactgcagaagaacaaagaacctccaaatcaacacaaactaccccaaactttccaaaactcttcagaatatctgtaatcatccatatgaatcattttcaagtggtaaaatcaagtattacacaaaatacacaatccgtcattaatagaccaagtatgagttcattgagtttttaaactcaaacttttccaacacaagataaactcttcaaatccacaagaacccaacgtaaaacaacttgactaaatagcagaaagaaatcaagaacaaatcctaattctaacagcaacaaattctacaattcatgctcgaacccttcaaaactaagaaaaataaaagagaaaggtattggagtccttaccttaggttttcactagatgaaatcttgctagaaacttcaagattgatgaaaatcagttgggtttctccttggtttttggctgaaccgaagctagagagagagagaggcaataattggattttctattttttatcttttctttggttaagtcctaatttccaaactaaagataattctaaataatcttatttcttttagtggccagctgctaacaagagagaaaaccacctaaacttcaaaaccaaaatgactaaaatactctcatttgagtgcttaaattgtaaaatggcttaggggtcaaatggtccaacaccataaccccgcctaaacccgatgttctaaatatcaacttataaataccctgttaaataaaaagattctaaaataatccatgtgactaaattggacatctgtcacattttctatcatcaccgagcaaagatcataaaaattataaattttccatataacataaatcgtacacttagattttaataaaatctctaaaattgagaaattacaaatataatgcccatttttgaagataggactcgtaataaatataaactcatgtatagtcattaaatattaataattaatgctaattgcctttagtaatctaaaatccaatcatgcggtcattacagaaaggacatggttgcgaaaggatccaccttaatagagtctggagataactctggattgctagggctcctaaagatctcatctaccttatttatgaattcactcatggggtacttagtgcgatctaaatttaaaaagtatgtatgaaatcccccttggtccatttaagatatgcaatgaagactgggggtgtgatacacacagaagggtctgttacctcttccaaaaatgttggctcccaatgcgccctcatccggatatgctacaacatacctctcctggatctcctcaacttctatcaaaggatttggaagacggagcatccaactagcttccaggagctagtcctctttagtagcctccgcgaggattttagctaaatcacaagaaatctcctccttggcctcttttggagcccgactttggccccaattgctgacaatgtcgatactatgaaagtttacaataagcccatgctcgaggagcagtggtgtagtcaccaagccttcaactttcaattgggcttcaatgaaagccttgtattgggccaccttcttggccagctcctcagtctcaacactctgaggtataggctttgccaatagaaacaaagaaacacaactgctcagtcagcactttatgtcatatcaaaggagagattgaaaaagaaacatacccaaaaagcaactgtaagagtttttatctagaacttggaagctgagttggaaggtaggaaccctcttcactgggaaactagtaaagaagaacagatactccttaaggtcgtgggaatgcttggtctgactggtggggcaatgagcatctaaatacttctcaagcttgtaagatcccaacttcttacagtttgtcctcatcgattgaggcttcaccccgtagaagtacaaaatttcctccagagtaggcgccttgaacttattaattttatagaaaatgtaccatccggctaagagcttataagccagaggtatcagttgaaacagagcaatcccattgcgtgcaataaactttgctaagtaagttgtcagtgggaggtgtgcttcccttgagatataggattaactctaggtgctgaacacatccgtgctcacagatgcagactcctccgggatagccatcctatgccacattagttccagtacgttgaacaatctggcttcaatgggatatgtttctagcatcccatatgaacggaagcaattttccttttggtccacctcccaaatgaagtcattgaatttttcctttcccttaggaatttttggatgtcctggacggagcgactttcgggatagtttctagggcaacctccaggagggcctcaagggtaacatctaagtgaaaatcccctgtaggaacctctaccggagttcccccagtgactattttcttgacatggacaactaatgtgtcctctccaatttccaccgcatcaatacatcactggaaagatgaaaagaaaagaaaggccaagcaataacacccactacccaaatgacaaaatggctatcaaagaaggcctcccctaaattgcttggagaggtccctgctggacccaatgctgtcaaaaacttatttttcccagacaactcaaaatgattggtccggaacccataagaaagttaacagaacaaagcttaaaagaaaaaatccagaaagtaaaaatcccccagagtcctaataactccgagtgcgtattacaaaacaaactggtctaatattcatttaagagttcatcttgcctggttttgccctaattctagaatcctacaagcatgaaaatatctatgggagtgcaaacaaccatactcaaactattcaaaaaaaaaatcaacacttccagggcacaaaaaaattccacataatcccattctagaaataaaactctacaggcgacactttaccattcaaacatgcaaggtatcctaaacctagcttgaactaagcatttctatcttagacacgaaatagcaaatagtcaacaaaatatcaggatacttacttgttgtgcgaatcgagaaagtgaggttgtcgtggtaatcttcccaagaatgctaaacccagtcgattacaggattgttgccgacctgggcattgaagcttttgtcggtctaggggtggaacaattcgaggttcaacgactctattttttggaaaataggcttaatggaagtttagaaagatttgaatcaagcagtcaaagacttcttgcattcactattagagacaacgatgagaagtaaattttctggaaaataagggattttggtttgaaagtttaaaatgaggggctttaaaaatctgaagcaatgaaaaagaagaaatgaggtgggaaaatcaatttatacctcaatcgagatcctcacgattttaataaacgacccagattccatcttctaaaagcacattttgatatgatagataagttaaaaagatggcatttaaaattttcctctagcatttattattcatcattatacacctcaagtaccgtacacattaaaggagggttcattacaatcgtcctgccatcattgcaagtcctcccaagaaatgtgccctcaatgcgcttgtgttatcaacaaatacattaaaggtgtcacatgtgagccacgcccgtggtaccttcaatttatggtccgtacttgatgacagctcacgggatgcatccgcgactccagtagttaccacatgctaagaattcatcccaaagaaacagaggagtactacaagctcctagatctcatagagtcccaaaagcttaggggtaaatgttatctatgtttttgagcatgtgacacgtgacatttaggagaaggaataattttcataatttccctaataaaaattccctactatgatcctgtcacggagaagcctcatagaaccaggaataagtcaaaactgggaagatacacagaaatccatttggccctaccttagcttcctggacatggaaggtgtgttacctttctcgaacccaaaggggtccaatattggcagtctgcccaacttatacctggatgggtactctaagggcctaatgcggatgtcgattgccttggagtgtcgcggacgtctacctctaatacaagccaggtcaccaagtgacaattatgcctttcctgtcgcaggatcaaatcttgtccctgttgtcctcaaaagtgagtgttttaatatttatactcgcaagtgcacgaatcgtttcggaatatagtgttcatgtaagtgcaaggtcgaacccatggg

SEQ ID NO: 25066 - DNA, 2998 bp, Cannabis sativa
taatgtgtacgcttttcttcaaaaaaaaatacaagaagtggtcaaaataactaaccgactaagtaataactaatttaacagaaaactaactaaactaactctaattattacagcaggtatttaattgtatatatggtctatttatatatagtgtttagttttaattttatttaatttgagaatttatttagtataatattatttttgcaggctatattaacacctaacacatttaaaagacttattagaactatttttaatattatgggcagtcactttcaaaagccacagtggtgaactgagtctttgcattttgagacattagatttctaaattattaaattatgaaatttttagcataaataaattttgttgcttcatagtcactattttttttattgaattcacaactctttttccatcaaattttgtgacttgtgggaacaagtaatataatgaaggtataatctcattccttgcaactttttggctaaggtacatggtataaataggctaggagtattgtactcaatagtagtaaggccaaactcataacatagaggtgaaagaacgaaaacgatctatttatgatagtttaacagtacaactagtacgattgtagagtttgttaagtgcttatatatgcagcaaattaaatgtgttgtcataatataattggttggaacatttattgggacacagtatttgactcccttattttgtgtcttgtaagacacacaattctaataatttttggacataatgatcagttattctatttaaatctagaactagaaagtttttcttttcataaaaacaataatataataagggatgtattacgaaatggacagaaaatgtaatatcatcttattaatgtgattgagataaagaacaaaatgaggtacataactatatatagatgtcactcacaactaactctatagcgatcataattaactctcagctaatagaattggttaggtaaataactaaatctatatacaagctgacaatatgcaagaatagtacaatcatattcttaatacctcctcaagatggagcgcatatattgtatatggacatcttggatatatgagcagaaaatatgggatatgatagaggtttagtaaatgcatctgccaattggagtgaacttagtataggaacaaggcgtatggtggagtgttgatcttgtctcgaacaaaatggcagtccaattctatgtgttttgtccttttgtggaaagtcgacttgtttggaatgtgaattacagactagttgtcacattaaataaaggcaggatgtggctgtggtatctggaagtcatggagaagatattgcagccatgtcattttacttgttgttgcatccaaggctctatactcgacttctgcagagcttttggatattattgactgcttctttgctctccaggaaatgagactgtctccgaggaagatacaataccctgttgttgaacatcgagtaacagggcaagatgcccaatcaaagtcagaaaaaccgcgtagtgtaaaggctgaagtaggtgaatagaagagcccttgaccaggattttctttaaggtagtgtagtagatgatgaactgcttggagatgagttgtctatggattggccataaactggctgagacagttgacagcaacggtgatgtcaggtctagacagggtgagatacggaagcttcccaatgagttgtcgatagtgcgagcggttgtcaagtgcttcaccaagttcgttgtcaagtttaagctttggatccataggagttttgctaggcttgctacctacatagcctgtgtctttaaggagtagaagggtataattcctttgagagagaaataaaccttccttggcacgggcaatttcaaatctgagaaagtacttaagggcaagggccttaagcttgaatttttggtgtagtgtgttttgaagttgatggagaatagagagattgggtcctgtgatgatggtgtcgtctacataatcaagtagagctatgaatgtgtctttggtgccccttgtgaacagtgtgtaatctgcttgtgattgcctgaaaccttcttagagtaatgcatttgacagcttcttgtactattgtcaagaggactgtttgagatcgtaaattgacctgtgtaatttgcagacaaggtttgtttttgcattaagagaagaagggagtgttagtcctttaggcaaggtcatatagacctcttcattgaggtcaccattcaaaaatgcattgtcaatatctagttgtaaggtgtgccaatgcttgatagtggaaatagcaagtaatagtttaagtgtaaccattttggctactggagaaaaggtatcaaagaaatcaagcccttcttgttgcgtgtatccttgtgcaacaagtctggctttaagtttttccacacttccatcattattatacttgattttatatacccaatggcatgcttgtttggaggtaatggcacaacactccatgttttgttaccgatgagtgcccttagctcatattgcattgctttttgccattcttcaatttgaatggcttcttgatatgtttgtggctcattcatagatgatactgcaaatatgaaagctttgtaagggtcagataattgagaataagaaataaacttagatagatagtgaggtgtagatgatttatcctgaataattgagtaacactcaaaatctttaaggtatgatggtggtttacttgttctgttggatctccttggaggatttggtgtacaagcctgaggtggtgatattgaagtttctactacatctggttgcacactagcatatacatcactgttttcctcaggtgttggcatgtcatcatgtacctgtggtggtaaaaaaacaatagttatgcggtctgtggggtaatcacaaacaagtgtgttgtgaatcatagtgttgttagaatttattttaccaggatcttagatcttctcacaagtatgttgatt

SEQ ID NO: 25067 - DNA, 1347 bp, Cannabis sativa
  modified_base (91)..(95): a, c, t, g, unknown or other
tgataacatgaaccaaatgacacattaaataagtgaggaaaatacttctgtctctttattgatatttaaataatagagattacattgaaannnnnttttatttagggcataaaaccgagcatgtgtagttttgcatacttcaagagcttgaacaaaatagttacaaagttaaaaaggtcagagagtctcaagtcttggctgttggaaccaaaagctttgcaaagtgctaaaaagaaatctattgaatggcataataagcaaacaagagcaagaaaagaagcaaaaaataagcacggatataaagtaaacatgcataagcaaagtatatgtctctaaagttattactattatttttgcaaaacaaaaattaaagcaaaaaaaaaggaaggagtggttggatagagtcatcctttagtctattcaatgggttattccaaagattggcttgagggaatttcattggttgggataatgggctactcttgagactgggctactagactgggggtacatcttgagtcaaagctggaagatctgctggctcatcctgggttgggccctggaggtcttttgcagcagtccctaagagaccatcacttcaactgaatgctccatctcaaagtttttagttaattcttcatcagactaatcgttattctctttgtcaaagtaatttttaagatacatatcatcatcgattgtgagaaccttctgagtgtattcctcctcatctgccccaaggtgcccaagaacaaaaagatctttttgtccatagacggtgaagtagcataacgtacgacatatccatcgaccgaaaggaaaagcattttagctctagcccctacctcaatagcatcacaaactgattgtattgtagtctctctaggtctttgcatttcctccagagtaatgaaagcctttatgccattagcttattgatgtgttagctacttttggagattggcaatagtggcgttatgtttgttgctggtagtaggagtgctttgtagaatgagattttggttatcattttgatgctctctctctctctcttgttatctctccctctctctctctctctctctctcttcagcttcttaatctccttgttcaaagcatcgttctcatctagtatgcctttgataattttctccttttcatgtaattagttttgcaagttagccacctctcagatgctggtgttcacggcttcccctttatttgcaaacatatttcccttgttatctctctcaattatcacttaggtgaggtccttctcaagagataacacacaggattcaagtgttggaaattattttaccaggatctttgatctactcacaagta

SEQ ID NO: 25068 - DNA, 1393 bp, Cannabis sativa
taattagagtaacttatgctaaaatttattttgtttcaatattcaaatacaaaaaaaggtaaataccattttggaccatatattttgtaaaatttaccaattagaccctctattttgttaaatgacaaaataaactctgtattttctaaaatggtaaaaatagaaccctgagcttaatttctgacaacgtttttttttaatctaactaacttaaagacaattcctaacatgaacagatacagaaaatgtaaacagttttgtcataaaacatttagatcggattattattaaattttattttgacaaaaaatcattcaagatcctatttgtactattttagaaaatacagaatccattttgccatttaacaaaacaaagagttcaatttaacaacttttgcaaaatataaagttcaaaaaaaatagtatttactctaaaaaaaaatagtaaaagaaatgatttaacaaaccaattatccattataataagcaagagcaatcataatagaaagagacttgtcacatgtaaatgcctagtgaagagggagcagtgtaacgacaacgaagccatcccattatgaattaatagagcaaaccattcttactactcgagtaagaagcagatcatggcgtggttttcgattcttttatatcttttatattaatatttctattacaacagagtttgttaatgaaagcccaagtaaacaattatcatatatgtcgtttgaattcaggactaaaatattaaaaaatgtcacagggatattgcaaatgttggatgataacaaggataatcatgtaaaccacatgatctaatatgctcacgttttctttcgactgatttgtttgaacaattaactgagtttttatgcactgtatagcataatgttttcactgttttgtatgaaatattgtagagcagacaactccatgcttatataatgaactattcacacgtaaatggggtatttcgtaagaaaaatcagtgagaaagatgaagggaaaagcctagacaatgaaaattgtttccagttcataccgaagataagtgactgaatatcgataacgtttagagctttcattgaagttcaagattagaaaagcaagctggcccaagcagccatgaaagcaaacccaccaaatggagctaaggtagaatacttcctgtcctcgagaagtgccacagcatagcacctacaacatccatatatgatcaactgtcgagttttaatagagtgatctgacattataagttcaaaaaatcactgacaagaatacagagaaacaaacaaacaactaaaccagtaaaagtcccaaagacaaggcactgaaaatggaaagagatcaaaattaaaaggcatcagaaattcacagctgccgcactgtttaat

SEQ ID NO: 25069 - DNA, 3029 bp, Cannabis sativa
  modified_base (2873)..(2893): a, c, t, g, unknown or other
ccggagttgttgggaaatatccaagtacctaatagagttatctatatcagaccaattatgttggagttgagtcgtacaacttctcacctgttatggctcggtcttaattatacatatatttgcctcacccctaaggggataatcctgatagtgtggatcgttttatgcctattgctctttgtaattttatctacaaaattattctaggataatatctcagagattgaggatggtgcttgattgtttaattaatctttactaatcaacgttcattccaggtagatagattattgaatcctctatccttactcaagagatttttgatgttattaagaaaaagaagggaaagggtggccttatggcgattaagatgggcatgaataaggtttatgataggttgtagtggccttttcttaaaaaaaattatggagctattcaattttaactcacttcatcaaccttgtcatgacgtgtgtaaccactgtttcgtattctatcttgctcaatggtaagcctttaaacaagtttcatcctagccgatgaataaggcatggagacccaatgtctccctacctcttttttgttatgcattgaggttttatccaggttgatttcacatgagaagtgtcaaggtagaattcatgtcatcgcattgctcggaatgcctcagaggtgtctcacttaatgttcgctgatgacactattttctttctaagagataaagaggtagaagctcctgctttggctgattgtattgaatttttttagaaatggtcttgtcaagtctgcagtaaaaaagtcaaggattctcttttcgactaactgttcctgcggctttaagaatgtgattgaaaggaggttgggtatgagaaattttcaagaaggttagaagtattttgggaacccttttctctttacccgtaacaaaggaaagattttaaattactaaaatccaaactttaccaacatcttgaaggatgacgtttaaaatctctctccatagttggaataatcgtcttcatcacttttgttgcacttgttgtaccctctaacccaatgtttacttttaaactccctttagcctcctatagagagttggatggcataatctgaaggtactgatggaatggtaatattgatagaaatagactttttgctacaaaatctaaggatgctttatgccaacccaaacaaagaggggagtgttggggtttcgttggatggaagatattaaccaagctcttctctctaaattttcttggatgttggatactggaatagaaagaccgtgggctattgctttaaaatccaaatacttccctcgagaatctttttggagtgtccataagaaaaacactgattgctttgtctggaaaggaatcttgaaagctcgccatacaatttctcagggttcttggactattattgccacaggtgaatgtattaatgtctagtggcagctctgtatcacttggttggactatgatagcttcaaagaagttatggaaggtattaggcttaaagcccctagtttgagatgtatggcaagtctgatgtacagacggactagaacctagaatcagggtacttgaacttcctctttggtttaggttttagccaggaaattagaaagattcaaattgctcaagatcttgagcaagatactcttatttggaaagcttctaagaacgattcttactcggttaaaaatgcttattgggaaagtcaattgcataggtttggaaatgagaactgtatttggaaagggatttggcatcatatgattcatccctgtatgagtatgatgccgtggagagtttgtgttggtgctcttctcacgggtgataagttcaatcctaacgcgagtgataactatcatttgtgccattcacggacaaaaagtcctctacatttgtttacactttttccttttgcagcgactctttggttcacctcccctattcttgttcaatcataccttgttcccgaagagaatatgagggaacgtatcacaaacatatgctctggtctccatacaacctccaggaatgctcttcttgtcaggcttgcttcagttttgaaattatttggcgcattgaaaatgaaatcatccatggcgatggcgatgctcccaatattgatcaagccatgttggatgtcactaaacgtttttaggaacttattcgactcccagacatttaggaacttggagatacaaaggtaatctaattaaaccaccatttttccctccccaaatcttgagttgtgatggttgatggatctttaaggatggaatctttagtgggctgttcttgccattgaaaaagattccttggactggtttgtagttactacacgtggtgttgctgtgaatgctcttgttgcagaaaaggaggcaattccttagtcttatgttaggcttacgataatcactgagataatttcattgtcctattttatgccaaggcgttggtccatgctattcacaagaggaaatcttcggattggcaattattggttttgtttttctctttgttgtaattcttggagttattttttgattgttatgttaattttgtctatcagggcaatttagcctttgttgataagcttgttaaagatgttcaattttctaataacggcttaataaaattgtaagtttctcctgtgaatctcacacttttttggatttaatttgtgtgaattgagattccttttttttttaaaaaagaataaataaatggattttagaataaaatgcacgaatacaattttattttgattgtttaatttgcttttttaacatcaatattaatagcctgcttacaaattagagagtgtgcagcgttatatactctctctctctctctctnnnnnnnnnnnnnnnnnnnnntctctctctctctctctcatttaactgattttggaaataggcctaaatatgcagaacccaaagcccactttcagtaagagtccaaataatgaaaaatatcaaggggtaagttgaaaaatgcctcttttattcatca

SEQ ID NO: 25070 - DNA, 4172 bp, Cannabis sativa
ttcgtctcttggagaccttgttgctattgctgatttccatttcgtaggtataatgaaccagctctcatggatttatttctcttgaatcatatttcttaggtctcttccggtagtgatttttgagaagctatctcttttgctatttcacctccatgttcgtcattggtcgccggttgctcatgtctgccgccgctttcactcttgccgaatcctatccctaaaatcaggttcattgtgatctttcttccaccatcagtttattcaaccacaagaatttgtggtattatatataaaatttcccgcgccctattattttttttctctaatgtgatgaatattggaagcaaagtgattatatatatatatgtataaatgaacctgtgttcattatcccaaatcttataattggtgtagggaactggtcagactatatttttatgtcttcaggtcccttgtttggtcccctgttttttagttggatgtgcttgtttcttaatgccttcattttgtttgataaatttcctgaatgaagttgaaggcccgtgtttgtgtttctgtgtatctaccccataatgatcaatgtgtgaagttgaatgaaactggctaggttggccttatttcagatcacggcacaccataaaaaaattatatcattatgtatacatgatgtgtatcatataatttataaaatatcatgttctgcaaggaaaagatcatacagaatataatttggaagtaaacaacgtagattactttcatggttctaggaaatttgaccatattaactaatgcttaaatagacgtctgagcctactttctcataaaaagaattcggtaaaatgtcaaatggaagtgattttgttgatatttgagtgagtgagtttggttggttttgtatcaagttcttgataagataaagaaacaaaaatgactaattgttttattttaatttacaatatttcatcatatataaatccatattcactgttctttaaaatattaacttggtcttttcatttgtaagtttggacaactgcattttcttgtttaagttcttcaaggacaaataattttctaacagcaattcttcccattgtgtatgtaatgagcttgaatttgaaatgttggagggtgtggttagttttggtacaagtaatattgttgcttaggaatgtggtactgtaattttggtcagcattgtataaacaaaacttcttattcatcatgttcacatcatcattttcttctcgttttagtcctttatatagcaaagacaccaattgattttgatcaatgctaatttcatttttctgtttatagaacggagtcacagtccattcaactgtcaaattgtttagagtaattcaaaacaaaactagagtttctacggttctcacttccccaattgaaatggacccaaggcacacaggagatgttttcaagtaaggttttcttttgaagaagttttgactaagttatacttatgcattggtgtgctcacatcacatttaatttactggctttgcaggcatttggaaaagcaaagtgaactcttaatggaagcctatagatcaatgtcgcatgaactacataaacttcaggttggtcctcaatttacctttaacttgtcttggttttgcctacttaatttaattgatttgaaaaagattgataatttacaattacactttataggacacttattggcctatttcaacaagtttttaagttttgcaaaaaattaatttgtggtagagatatgcaacttttcttgtattcactttctaagatttattcccttttagtattataggtaaaaaaaagatgataattgctgtgcatctatttacttaatgttgtgaaatttatgtatgcaggtatacatattgagaacaagtaataataatgaaaatagattatgtatctacgaggattgattacaaattatcaattgttttcagctttaattatatttggaaatcgattatcatacttgagaaacagtaaatttgaaataaaagaacaaaatgagattgcaagaaaagaaacaaagataaaattcaatggattaaaccttaggacatttaattttgtcaactatccactctataattatgtatccaatacaaagggcaccacaagtactcagcttccaacactactagaagtttgttgcatacccaaaaaaggtaaagggttgattgaatttgcagctttgtttgtgctgcccctttagcattgttcgcttgcttactcttacagttgtgtttcttcatgttgatttgtatatactttgttaaaagggaatgtggtttcttggtttttcctaacactaacactcattcgagaggatttaaggacactatttcatgtttaccctcaaaacttgtggtcattctattaaaccttgtcttaaggattttaaccagagtgttttattcttgcaactttctattgacagtagaattacaattgcattgaacgaacctaacttcgtgctaatttgacatctacaacttacaggtagaggaagaaatgttgatgcggaagttctacgagataatgtctgctcatggaaaaactaaacaggtaccatttgcctcgccaattcacattgttgaactttgtgtaaactacagtagtactacttttaaaaggctcaaaattgacgtggcaaagattgctatttcttcaacagtatattatgttattctatttttcacttatgcagattgaaggtggtagtaatgcttcagatgacagaaaagttggagacaatctgccttagctgtttcaactcacagcagtgttggtcttttttatgaaattgtaaatgctctttagttgtttgtcattactgagaagaggactgtaatggaggattattcatgtgacaatcgggatttattgattttaaacaaatgtattgcttgcgttccatataaagcatcaacattttatgttttactaatctttcaattgaagctttttatatagcttgcggtaatttctctcgagcacttggtatatgaaattttattaaaagaagaaaaatgttataattgtcttcacgttctaacatacaaaaactaaatatgaatcatttatacaggaaattgcaaactttttgggttttaatattttttgtgtaaaaatgtgacatccaaaacgcttattttataggaaaattgaaaaaaaaaaaaaaaaagttaagaattagggaaatttacatagtatactaacttttgctatttttttacaaaaatactgtcaagcggcattttttacttttttactgtgtttttttataagtttcatactgcagtgtactgttctactgttgttttgagttgttctgttttgtattttactggtgttttataaaaacaagtatttttgaaaacttcttcgtgtgacagtatttttgtaaaagttaacccaaatttcaatatttttgtaagttttcccatgaaaaaattaggtaatggtaattaggtacctttatgataactaagaaggtaaccagttattaaggcggcaaccatgtatcttatgttatcattttttttcataatttttatgatttttcaaatttttttcatgaaatattttttttttttaaaaaaatagtcatatatttacaaacttaagaatcataaaaacataattcccatttaaaaatcataattaaatgcattataaagaagatgattccctaatttaaatggtacaaaatttgaattgggaaaactatgatacaattacaaagaacagaatttcggttaaaaatgaaagtaatggaccttgatttttttttttttattattatttttgtaagagaccttgaaaaggaaattttacatattatgccctatttttgatatagttatcacatataactttgttaaattttactaacgtttaagtttttcattgtttggtatttttcaatactttttatatgcatgtgtttctcttttttatctctctctcattttctatccatttttgtaactttaaaataatgtttggtcacgttgttactagattgattctaaaaaaaattattgtaatctactctttaatgcatatatttttttttcctaattttagaaaaaaaaaactatttagttactaatataataagggaaatttgaattaatatgcttata

SEQ ID NO: 25071 - DNA, 2450 bp, Cannabis sativa
aaaaaagttttaaaatcttaactaatacaattaaaataacttcatgttttaagttttttattgattacattaatgtgacatttcaattttcatgaaaatgctttaaaaaaatgacactaaaccacttattttcaattgccaattttatatttactgattctatttattatacacactatttcacttatatttgttgttttaatgagttctatttgagacatcattttttttccaaaaatatatatgtaatggatacccgatgagaattcttctcccaccgtccccgctttaatttaaatgggtattgaagtggatttaggaagtgggtataggggtgggagagcgattcccgctcccgcccaccctgtttacatctctaactaatttttttaagagaatatatataattaaaaagtagtatatgagactatgatggacaattttggagttacccaccattaaaataatttttttaagaaaatgtatcaaattttatttaattgagggagaaaataataaaaatatatatatattttaagataatctacctattttgaaaactacgagtgtcgcctattaaaaatactctaatagtaatacttttcaaaaatatcaaaactttccacattatttaataatataatattttattttattttattcacattatattttcaattcttcaaatttatcatcatggtgtcacacataattatgtaatgtattatttgatataatttttcttaaaaaaaatgagtatgacattaatgccaggcatcaaaattattttttgattcgacacccaaacatgttcaatgattagcttattttaagtactctaccacattatcaagcactttcttcgaaaatcaccacgggagattatctaaaatccaatcattgttttttttaacacgaagtatagtaaattttcattatgattaaagcgtcttcaaataaatactcaagaaaataacaccataaaagtaaagtaaacatagaaaatcatcaaagaaaaggcttcttaattaaaattccaaacaaattgatctcatagtagtagtagtaatatacagcttaattattaacaaataacaagcattttttttaacaatttctttttctccttttatgaaattaaaattcgaagaccacaaaatgaaaaatcccaattcacaagaaaaaaaaaaaaagcaaatgaacaaacccaaccaaccaacccaatcccccattttaattaaattaaaatattagataagattaagcatagtcttcagaagaagcaactggagcataagagccaatgaagatgtcaccgtagacgaggccagcgagcccaccaccgataagtgggccgacccagtagatccagatctgtgagaagtctccagaggcagcagctgggccgaatgagcgggctgggttcatggatccaccgctgaatgggcctgcggcaaggatgttggcaccaacaatgaatccaatagcgattggggcaatggttccgagtgagcccttcttggggtcggcagctgtggcgtaaacggtgtagaccagtgcgaaggtggcgatgatttcgaaaactagtccttgacctattcctactccagcgcccaatccatgggttgggatactctgcaaacaacaatattataaccttttaattaccaattcaaaatattacatcaagagcattgctattaggcattagtggtgcctagcaccttctcgacaatgttgcattgtaattggctagcgatattccctaaaagctattatattaaatagttggaccaatagcaatattaacacatagaaaagtgttagatagtgtcctttaacatttctcttacataaatactttttttttttttttcttcaagtaatgatgtattaaatgcttctttaaattaaatattgagcatttattgggtaacattggacttaacatttttttatattgttgttatgtgattagttagggataatttttaaaagttattatattaatttatatgaaaaataataaaaaacactcatgatatttaatactttttttatgtattaatattacaattaatctaattaaatattagatcttatataatttaatgtaataacttttaaggaatatcgctagttaatcacaaggtgatatgtctaaaagcgctaagcactactggtaacatatagcaatgatacttaattaaagcaataacaatattgtattaagcaccactaatactttttagtgtttatctaaaatattataaccttttacttaccaattcaaaatattacataaaacacatcttttttagtagaaagtattaatcattatctcaacctaataatattgctcaatgatatatataggtggtcagtgcctttttacaaaaaaatattacacttaacaatacaataatgcacttttttttaaaaaaaaaaaa

SEQ ID NO: 25072 - DNA, 2610 bp, Cannabis sativa
attctcaaacatctcagagtagacgaggaagagtacactctaagggtggaggccatcgaatcaaatacttatcttaatatttatgacattgatgccactgaggcacttgctgatgaatctggagatgagcactctgcagaagtcatggagatatcttcacagaatggtgttctaggtctccaggaccctccccaagaccaactttaggatctacccccaattctaacttaagaccctccttagccttgattttctctcctttttttttttttatcttcaactcattttgggatttgggcccctttttctgttttgcaaagacaatttaattatgccttaaccgcgaggctcttgtaatagatgtagacatttctgccttacttcttacatgatgattatgttagcttctgcttttgcttgtttattgtgccacttgataggttgtcttaggatgcttagagcttctggttccaacagccaaagcttcaagccttagacttcttaaccttaggtcatttgttgagctttggaagcatataagtagcaagtccttcttccatacatcaacatttttaggtgattaaaggttcctttatggtgcacataaactttagctagttaatttgtaagtagcatagaaggagcattatctagttcccggaccaccaaacggatcacagaacttgattcctttttgggtactttaagattaactacttgagtagatgttacatttgaatgcgttaataaagtggcttttacacagaatattaggtttctattttccaagcatagctttattttttctacataaaatatagtattaatccacctgccctaacaaggttcgttgtttgaatttaacaaggaaaaagggttacaagtgtaacaaaatttaggcgaggttgcttaccaagaaacaagaatgaaaatgcatcaacattcagactatgttttcctgtcgtaatctcaaacaacaaaactgacttgttgcacaataggtatttttccaaactatgctaaaaaaaaggtagctgaaaacgcaagggatttcaggcaagtcttattattcagactttttgcacaaaacttataaaaaatttggccaaaagaccagctgacaatgcaatagatttcaggtgacattttctttccaggaaagaggctgaaaacatatcgattgttcaggcgaggaaaaacaagctgaatatgcaaccgattttaggcaacacttcctaccaggaaagaggctgaaaacgtattgaaattaaagcaatgtttcccttcaaagttttaaaaagaccggagaaatttaaatataaaaaaatagaaataataggtgggcattgtatgttttttagggcacatagctaggtatattaccccccaagtgagctaggaatttcggacgtctcaaaattcttggtcacttgtttaaaatatagcttgtgtctggagacaaaaatacaaattcttttgtgaatttcttccatttttatttcattatggctgcaagcttacattaagaaggaaaattataaaaaaaaaaaaaatacaattcaaccaaagagatgcttagatccgagcacccccaacttattagtaatagtgatgtaagtggtctgcatgccaagcacgcgaaatttttgatccatccattctctttagttgatatgttttgttacccactttatggtgaatttcatagggtcctttccagataggtcctaagacccccactcccgattcttgtaaagctagaaatactcttcttaggatgagatctcctacttcaaatgtacaacttttgactttagcgttaaagagcctaaaaatcttgccttgatacattttgagttgaacttgcgattaaagattcttggagaagagagtgattacggttggatcataagtgtcttgcctgtgggaaagaatggtgtttatcgggatgactgcttcacacccgtaagtcattaaatatagtgtgtgccttgtcattaaatatattattatgtatgcccaaaggactcgcggaaactcctctagccaatgaactttgtaagcttggagtttcttgttcaacgttgttttcaagattttattttcttcttcttcaatattatctcactaatattaataaagcgtagaccatggtataatatttttttcttttaattttttataatttaatgtttatatattatttgtaatatatatttgatgtaatatatattattattatattaataaaataatataataataaggaatatatttttttaatgtaatttttagtgatatggttaaaataaataaaaatttagtgctaaaatcttctattttatatattttgattcaatactaaatttggtttttactattggagttagggacagagctttttgaagttcggggccaaggcctttttcaattatttttttttcttttttttattatgttttgtaaattttttgtatttttctttaaaaaattattattgccccctaaaattttgtttgtgcatattgtctccctcaccaagtttttatgcttccatcgagttggccttaatgagcaaaatgctcactgttttactgaattgaaagcaaa

SEQ ID NO: 25073 - DNA, 1192 bp, Cannabis sativa
ataattcagtcatatacattttgattggtgatttgttatatattacaaattagaaaatgatgttgggcgccaacaattctataatttcactaaatgcacattaacgttattctattttataagagaatttatgcttatataacttaagcatcttaagaattattattttgtgatggataaaatatctatataaaaaaaaattgaattataatttattcacacgtcaatgtggaaatggccacacaaataagggcaaagtacctcatattagaatttgcctatatatagtagtaatagtttttaatcactagttcactacctataaatattattggtattttcgatgtatgaaattaattgtaacgcatgcaatgacttgaaaacctacaaaatgcccgtataaatatcgaaacaagcatgcacgtaataatttttttaaaaaaaatatgtgaaaaaattcttgttaaaaaaatagatcgagttgctattaataatagtgattaaaagtaattatccaacaatttgtcatatctatatatacacataacacatgcgcaataacattaatttatgtttaattatttgtcaacgtacgtgcatgtattacacatactttataattcttgtcgtatttatatatatgatttctatgttattttgatgaaaacattaattaaaaattaaaaaaaatagtgtaatttaatattaaattttacatattttaatttaaaaaataacataaaaaattactaaccactaataatgtgctactatggtattagctatactaaatgcctgaatacttttttttaacttgtgtgagagatggattataaatatttatcatcacgtgtaaaaggaagtaggttaggctactcctcatatatttttttcacagccaatgctttagcatgtgagacagaatcgtaccatatacatatatattaataaagagacctatatatatagctatgtgtggtgctattgttataaccaaatattgtatgttttatagtagggattatatatagtattgtgaaaatgtgaatattaattagacaaaatattcatattggggagcacgatttagtgattgtttatgtactaaattatgctcctcagattttgatatctactaattatgccccccaaactttgatatgtactaaatcatactccttgaactttcatc

SEQ ID NO: 25074 - DNA, 1213 bp, Cannabis sativa
gcaagtggtaaaattgtaataaaataaagttgaagagtaaaaatgtaagcttaactgtgtggtggtattttagtaataaagtatgtattttgtattttaagtgtaaaaatttctaatatttatctatatatataggctatacataaatcataactggtgatagattgttctttttttttttaatttcattcttttctctctcttaattcatgtataaattaaaattttcaataacaattatatgtctatacatatatacataaacccttatcagtcatagcttattgttctttctttttttgttttcatttttttctcttcctactaattatttttcaatgatattttatcaattattatttttatttttccaatgatatcttctaagtactctctcgattagaattaatgtagtaatgaacctatttttatgatgatttgtttattcgtgcaaccaccataaaaagatatcttagaagaattattaaagcacttgcatgaagtatcttatcttttttttttttttttttaataaaagatgaattttattagaacatttcttgcacaattacatcaagaatgttactcagaatagaactacccgagtaactacgatcatcatataaccatgagagtctaacaaaagcatgagcaatatgattggcagatcatttaacaaaacgaaaattaacattggtcaaagtagaaaaaagacctttgcattcctcaatacaactaccaaatggagagatcatgatcaccgaactccaaagagcttgggccatgacaaggctatccatctccaccataatgttagagaagtttgagttctttatccaactaagaacctcctttactccaagagcctcggcagaacccggatccacacaaccatgccatgaacccgatctagcttgaataacatggcctttagcatctcgaagtacccatccaaaaccaaatctgtgtttgtcactaaaagttgcagcgtcaacattaatcttgtaaaaatcaccatgaggagcgcaccattgctcatccccctctccatcctcattcgagtaagagaggggcgaaatttttttctcttgagcaaacaaccactgttcaagattatttcttgctaaagccacaacagttttgaccgaaccagatttttcgttccacactttattgttcctatcttgccaaatagcccaacaaagcatggcac

SEQ ID NO: 25075 - DNA, 1509 bp, Cannabis sativa
cccccccctcctgcaccactagcattcacagaagaccaagtccaacatgctttagcaaatagacagccacctaacaaaatgaaaaatagattcatccacttgattgcacatatgacaacgcaatcaaaaggaacatgtttgaacactagttgtactttggtggctaaataaccactaagagcacgccaaaggaattggtgcaccttgaaggaatataaaggctcaagaaatcttccaagttctaccatcgtcactacataacccaaaataattagccttatggtgaaacttataggcttccttaacataatataaagctttgatatccaaagatcaataccaaagatctttagctgccaaagaattgagttgaatactaaaaatgagctctttatccctttcattaaaaggatcttcaataatctccaaatcccactctcttgaacccaccaccatgagatctaccaccttacaaccatccagccccactagtgtagacgggatataaggagacgtagcatctggcagccatagatccttaaccacgaaaaatattagtaccatgaccaaccgaccgcctagtcccaacctttattaaatcttggcttttaaaaatactcttccaaataaaactagtattgggaccaaaagaagcttctattgatttttatggtccatataaaagttagaaaagcagaagcggatttgattaaaaataatttaatccaatatgaaccataagcccaaggatctcaacatagcgtatatagataaatctagactaatgaaaagagagacaatacctcttgtagcctatcgggaaatttttactatcgttttgtattatatcgaacatccaatctaagaacttgttgaagagttcacaccacaatcccaggccaacatcctcaacactcaggaataaagggctattaaattctattggtattggatgagtataattatgaaatcacactatgctcagctcatgagatactgtgaagagataataatgaacaaagctcacaccacactacagtgtgtgtggcgagtgagtagaggagagagagagagagagagagagagagtgaaaaacaatattatttttcaattagattctctctcttaaaagtatcgctctattctcttatttctcaaattataaacaaaccttttatgtaattttgtaaaataaaagataatatttaatttaattcaaattaaaaattcaaatataaatatcattaacaaaaattagttaaatctttttattttattattaccttttagttaaatagatcatccaataatttatttaatttaagaattaaaagataattaattaatttaatttgaattattttaataataaaataattaaataaaattaacatgggcctttatatttcaccttagacgtgtgggcatttatatgccaccatcccccaccgaaatcaccacttcattatctattcaccaaatcgtaccaaaaacataaaaaaaaaaaaa

SEQ ID NO: 25076 - DNA, 3041 bp, Cannabis sativa
aattaatatttatagtttaatttgtttaataccattaggtaatacccattaagaagtgtttcatatatatatataacaaataaattatatatattgtaaacggtttgatttggtttaatcaagaacgaattagattaacagaagtaccaaagactgtctcacctattacgatttgatttattgtggtccgaatttaaactgcaatttgtcggttttgataagcagccctaggctattctactcaccgtattttcttttagaataataataaccgaattttttattcacaaggaaatgtttaatgtaaaatatctttaatatgatattaatatctatgtatcatcaccatctaagagcatctccaataagagttatttatttgagtaatcttgttaggtctaatttttaagattaaatttatataaagtgttactcaatataattaaggaccacatatatatattttttaagaaaaggttacttttttaccaaaaaaaaaaaatcatttatttaatataatgtggacatggtaggcaactttaaaagttgtaactgttaaagtattttttttagaataattatcaattttattccctgaactttaaacaatactaattcagtccttaaaatatacggttggttaaaaattctcctaaaattattttttttattaaaaaatctatttagatataaaaaatatatttaaaatttaattttttaaaaaagtaaattttacagggaagtctatttttttttctctccaaaaaattaaatttgcttaagtcaacataacattttttatatttctaactttttttctaaaaaaaaatatatataaaaattatttattgaattttttttctttattttgtaagatatgagtttataaatataaataagcttaattttttcttcacaaaattttaacttgtttaaattatttattgaattttcaataattttagtttgatttcttaagttatgatttaaaaataaaataaagactgaaaattttaaggaataatttaggtttttttaagtaaatgtaatattttttaaataatttaatattttgtcagattttttaataattgttattactttttttttttcaaaattaatagaacattataatttttgaaattatatttttaataaaatgtgaaaaattttaaaaatttacaaaatagaccaataatttgaaaaaaaaaaaaactataaaaatacatcaaaacggacaattttttatttttactctttgaacttttttatttacaacaatacctctttagtaaatataataaactgtttttttttttgttattttataatttatttatagttgttatgaggttatttatctggttattttttattattttatagtttatttacaattaatttatagttgtcgtgaggttaagttctcgttatttttttacattttgctgagtaaagtacatttttgtaattttaaaactttataagtatatttttgtaattaaaaattttagactgtaaaattataaattaaacataaaagatatatatttttaaaaatttcctgcaaaattttgtattagttaaaattttgggattaaaatactaatttataatggtaaaagaaactgaatctaacagaaaaagaaaatgaacctagtgagcataattatctaactgttatattttagagtataatttttaccaagggatttattttaaggaataaaatcaagtagtttcgaaagttttaaaaataaaattactaaatattttttaatttaagaaaaaatattgaatcttatgtgaataaaaaataaaataatatgttagaataaaacgagtaattttaacaattagaagtcaatgaaaatgatttatggctgaattatgttataaaagattttgcgacaatcaattttaaatttcaggtgattaccttttttctataaaataattatttttttttgaaacaatataaaataattaattaatttgtttaggcgattttaagcaattacctttcagaaaaataataataataataatgggacaatcaattttaaatttcaggcaattacctttttttataaaataattaatttttttttttgaaacagtataaaataattaatttgtttaggcgattttaagcaattaccttaaaaaaaaaaaaaaaatcaatttcaggcaattattgcagccctgcagggcataaaagatttagtatgtgtttttgaatggaaacttctaatatctcagaataatcaaacagacatcggattgtttctttttatttttgataaagaacatttaatgtttttaattaattataaatctaaatccttaaacttgtatatatactaataattcgaacctattcccaaaccatcacgtttcaccatttgttttcttgctctctactccattaattccattgatctctgcaacgtgaattaagctagaagccatggagttttgcatccaatttgcaacacaattgattcttaacgagatgaaaaagaatgtgagtagtgctaaaaacgttgtaatgtctcctctgtcaataaatttgatgctgaatatgttggctgctggcgctgaaggtaagacattagagcagttgttgaaatttcttggttcagaaggaatccaagatttgaaccaaaaatttctgttatgatgtctcttctccactcctctgtctctaaggcctccaccccttcccctcttcccactactcaaaaccaaacaaatcgtcagaagaacaacaaccacttttttcggttgcaaacgccttatgggttgataatagcattcacttaattccatcttttaaagaaatcactgaaacaatctacaacgcaaaagtggaaaacgtcgaccttacaatggaggtataatttcattttctttttattctatatctataattgttttctttgttcattcatttattccaatttttatttttttttgtaattttcatatgtagggtgataaagttagggaagatgtaaacatatgggtggaaaaggaga

SEQ ID NO: 25077 - DNA, 2478 bp, Cannabis sativa
atattctgttatatatataatcgttagctttagctacttttctctaatcttaagtattgctctaaaataggaaatagttactgatttgatttcatatataacccaataaagatataataataataaaaatgaatctcgaaatttaaaaggttgatgaactttggaacacgagtttctttgagttgaaaataagatttgaaaataatgccagcataacttgattgtggcaagttatttagtctttttaaattagtgttatattacaatcacgtgcactcttaataaatgaattttgtgttttttatgttccttctaatgatccgaatgaaaattgatttgaaacgtgagaagcaaatcattgttatttggtgttcaaattacgcccatctaaagcctcatatttattgaatcaaaatgttaattatgtgtgtcattttaaactcttgtctcaatccactctagaaagtaatttttttttttggagggcagttaagaaaaataacttgagaaagtgtgtaaacgtgtttgacattatatacatgatctacgttacttacaaggcagaaagcattaattacatgaaactcttgccaaaaagctctgattacaaacaattaatcattttataaatattgctttagccataatttaagatcacttggttttcaccatcttcataaaataaactcactcacttcctttccgccacaaaatctggtagcttctgaatttaatggcacaaaacatgaactagccactttactcttgaaatctttaagccaaaaaatcataacatttgtaactagttactcaatatctctttctctcaatcaatcaaacacttgaacgacgtcgtttctcatcaaattcttctttctccacccttattctcaccatgagcaaaacaccacaacaactcaaatatcaccatcgtaataataaccaccttttttactctcctaaattctccatttaccttttagcagccacttgtgtagtcctcttcattctcttccacatcaactctctccaactccctccgaagcccgccacatggtctttcacccaacagtggcaaagaatcatattcaacaattccaccgaggcagcagcagtcacagtcgaacaaaaatgttctactgatactgctgcctcggttggaacagttaaaaactgttcctgctcggcggaggaagtttcagctaaactccgccgagcagtaacattccttcctctgaaggatcttcggtactctaacaccgctcaacagggccacacgtggtttatgagctctatgtacgatgatcacgaggaaggggaggtacaataccaggaattcccttccgagtcatcggaaggtagacttctttgcattaaaggccgtgaccgccacgacggttcgtggaattcctacgctttggcgtggccggacacgttgccgcataacgccacactcatgaagggcctaacgtttgtgtctaacaatcactataactatgacaacatctggcatggcttgtgcgccatggttccgtttgtagggtggcacatcaaaaacaagtgtacttccacgccggacaggtaagactactttgagttatctatttttcttttaccattgtttggttgaatggaaagaaaaataaggaggcttagaaaaatcatgggtaaggatgatgcaaaacaaataggggaatttcaaaagaagttttttttttaatgttttatttagggtacatatcattttaaaccatatgttttgcaaaagttactaatgggaccatctgttttgttaaatgacaagatgaaccttgtattttctaaaactaaaatggtaaaaataatatcctaagtttaatttttgacactttttttaatatgacaaacataaaaacaattttaacatgaacagatatagaaaatgtaaatatttttattataacaattttacataggattattattaaattttattttgacaaaaaatcagtccaggatgatatttgtaatattataaaaaatacatagtccattttgtcatttaacaaaacaaagagcccaattagtaacttttgtaaaatacagagttcaaaatgatatttactcttttatttataattttatgtcccaaaattttatttacaaaaatacgcttataaagttttaaaattacaaaaatatactttgttcagcaaaaaaataagaaaacaactaacaaaaaaaaataaaaataaaaaataaacctcacgacaactataaatcaaatataaataaactataaaataacaaaaaaaaaaaattatcagaaaataacatcatgacaacaaataataaaactacaaataaattatagaacaataaaaaaaatattttattgtttatactaaaaaaatatttttgtaaataaaaaaattcaaagcgtaaaaataaaatttttccagtataaaatatttttgtagttttttttttattattttt

SEQ ID NO: 25078 - DNA, 1655 bp, Cannabis sativa
ttatgtaaataaaattataaaaatgttcaaaattccatgaaactgtattctgttgtttttgtgcatttgtgaaattaacccattttttttttcaaataatgggtgtctttccataactttttgagtaattgtttttacactccctaaaggatcgttttagtatatatatagactaatctggtctaaaaatttaattagatcatgcatatttaagactactcgtaccattcaaaaataaaaaagactactagtaatttttttaaaaaaaattaaatagttttacaataccgaaaataagtttaaaatatattgcttatatgattattttttcttaatagtaagtaactatttaaatactattttcaatactataaactataaaggatcaagaaatttctaaaaatttataaatggaatataacatacacaattatgaaaacaaatctaactaaaaaattattgatgttgaaacaaataaggaatatatcaaaacaatttagaataattacgcttagaataatcatagtcatataaatatttttataagcattactataaaggatcatatattgtcatcaatacaatttaaataacaaatctcatatacatggactaataatacaataggagcattgttattaggtattagtggtgcctagcactttttcgacatgtcgcgttacgattagctgacgatactccctaaaagttattataataaattatatgggacccaatacttagttggaccaatagcaatattgacacataagaatgtgctagacaccactgattcccttttaaatttctcaatacaataggcctttgaaactaaaaatgcttcttagcatttctcttttcctattattaatgacaatttattacaattgattattgtgtaattaataattaacatctcaaagccattctcttcaaaaaaaaaaaaataatctcaaagccatgggataaagataaaaaaaatttggtgaaaatagatatgggtgggaaaattatattttgtacaatttatgaggaaaacaaattggtttttacagcagaaaaaaattattataaatatattatatttaatttttgtaaatattattttatatatttataaaattataaaaatttgttacaaatttataagagtttttttacaaaaaaataaaatttgtttgtttgtatatatttttataatattctgtattttttaatttttatatatttttgaaaattctccatattattatgtattttttatttttatttttctgagaaaagactattatattaatcggaaaactaaattacataacagtcaaaaaaagaggcgaaaatttctctaaccaaatactgtacaatctaaaatccatcgtaagagcaaacttagccaacaagtgggcttcgttattagcagatctataaacatgagagatctgtgctcgtgggaaattgaataacagaaaagtaacatcgttaagtacagtataaaatgctgatagacctttagtttgagactttaatccattaacaaccattaatgaatcaatctcaattaaatcaacaataagtctgagagacaccagcaatttgagactccaagccacaactattgcttccatttcttatggtttaacacaccctttcattgg

SEQ ID NO: 25079 - DNA, 2475 bp, Cannabis sativa
tttttcttctactctaataacgctttttttgtccataatcaccaccttcctgtggaatcgaccgcccgatctatactacaaccaccgctagtggaagtcacatttgggcatcaaacaagatcaaattgatctatgagcaactatgtgatactgacatagaatagacgtaacagtaagtttataatctttttcactgtaaatatcggtctagtccaatgtaaatattatacattcgatacaagtctactttactaatattttggaaaagaaattccacttgcttaagagtgagtagaccacatcaccgattatcacgtcagtataaattcggtgcattggtaattaaatctcaggactaaataaatttgaaacatataatcacaattatttttcactgcgatcactataattgttaataattttatattcagtatttaataaaatttatatattagatatataattatgaaaataaaacatgtaaacaaaacaaaatataatgtcaaaatataatttctaatatttaatactaataaataacattgaaattagattttatttagagcataaaattcaaccgtaaaattcattgaatgcttgtcttgtccaacctcaatcacaaacattggcctttttaaatcctgtaaatcaaaatatacattcaaaaatatgagactgcgcgcgtaaccaagtaagttctataaccagcaacatagtatataaaatcatcaatatttcatcttctaacttcatttttgtgtagtgctaaaaaccgatgcaatgaatctctaacatggattactgcaatatgtctaatttaactcgatgacatttaatatggatactatgttcaagtacatctaatttaggtaaatcatttgataagtaattttaagtttgtttaaataatttcaatgagggaacaacctacaccaacaatgaagtcaatgttctacgtaatgaatgggttgattatgtcaatgaagagctgttgccaagaggagagcatgagttgagtatagttagtttatacactgattaagttagtttcataatttttaggaaaatattttggacttactaacttaaacatatatatacgtaactaagttagattcttaatattagaaatatttttgtatttactcaatcgttgtaaattaattagttgttcttttgagatattattgtggctaaaaataatatatgaattttttctgtaaagttttgaatttaatgcaaggaaaatgatagaaaaattacatttttattattaagcatcagtctagaactattgattattagtagctccagttggatggctattatcggcctagtaccaacaccaatactcaccctctatagcattgattacggaccgatggtaatgctcgttagagcatctccaatgatagtattctttgaagatgttatagatcttcacatcattcaaaatataatattttattttatttttcttccacatcatttttgtcacctttactttaaaaaataatccaatggtataatactttttaaaaatgctatgattatgatattacgtattattatatatatataagtttttttctttattaaactattatatatatatattgcacttttaattttttattgtataaaaaagacatagcatcaatgccattgtgtggcatcaatacaaatttcaaaaatagcattcttttatctccaatggtatagcatctctatattttgccataagccttccatctcatcaagcattctccaaaatattaccattggagatgctcttagtgtccatatgtaatctatactaaggtggcatttggttagaaagtattagaatgtcattctaatagaatattctttcgaccattttagtagaataactattttattttaaaacagaaagaaaaaccattttaatgtaacatgagaaaaaatttagtgattttttatcaatttttttatacaatttaaattttattctattcctattactattttcattattattcttatatttttacctcaaacgtgtgagtagcctattttttttttttttttttgtcacttgcatatacgttagtttgaggaactcaagtataatgatttgttgaaaactaatgcccagccctttttcttagtagtgaatataatgcttatgagaatcgaatcatatattatatagaaattatacttcgttacttttgataaattaaattttatatgtacattttttaaaatattttatttttttccaccataatattaatatttttctatttatactcttccatgtttttactttattctcataaaatttatctttttaatttttaatacacatattttttttattcctaccaaatttatatttttatttttatttttatactcacatatttttatttttatatctacaaaaatgatattttagattagtacccttttaaccaaaaaaaaaaaaaa

SEQ ID NO: 25080 - DNA, 7606 bp, Cannabis sativa
aatattttctagtttcttttttctaatataaaaatgtgaatcaatgtattttgtgtatgtgcaagtgcaagtgcaaatattaagtcattactatttgtattttataaccaactaagcactcatttagacactttattatatccatttagaataaaatgtgaattttaaaatgctaactataaaaactcaaatttcacactactttttcagcttatatttaaccaatcataattgtttagtgttgtttaaataagatggttctttggtgactttattattaccttacattttcaataataagacacattttagtatttagcttaattatatattgattcaataacacttgtttataagatattggtatgttgataaaatgaccctttaaaatatatcttattaagttaataaaatcatgattccaagatgaagataattccatgggaggttaatcttagtgaagttgatagttattttttgttatagtgagctaggactcattttcaatacaacatattcatttttaatttttgattgttctctctaaattctaatatggtatcaaagtaatttctctcaaattattcattttcaattcttgattgttctctctaaaataatcaccaaaaatggatgataaataaagatgatgaatgaagggaatcactacaagtatatatggacatggaaatatatgtttttcttttcatagttgtaagaacaaagtagaggaatttcatttcttcttcttctccttcttcttcttctattttccccttttgttgtaaaatattacacacaattatattcatagatttcttgaagcaaaaaagaatttgatcttggattttgtttttggatagaagctaagaaagaacataaagtgaactgaattgaatatttgtatagatatgagtttcaagtagaatcatgaacactattgttggatatatgttttctttttctaattgaagtatttatatatacattacattgcacaacttgagacttgaactcagggctccacataaacactatggccacttgagctagcctaattcattattgttggatatgagtccttgcttaactccctatggaattggcgacatggtactatcttattcgacaagctggacaagaagatctcaagacagttatttcggttacatttgttagtctaagcctatatacatagttgtatactgtaataatgtgtagcaatatgaaatgtaatacttgtaattaagagagtctaagatattctagtgaagatgatattcttcaaggggatttcttaaaggttctctaatagttttgaaaatagaatctcatctgatttgaaaacttgattcaaggaacgattcttttcttcgagggagttcaaaagaggattaggctctcttatttggaaaaaattcaagtctctataaatttcttgtgtctattttaatttttggtattctttaaattcaatttatgttttctttattaatatttgcactaacatttctagttaaggtttgttgattaatgggttaacaatattttggatcttatagtttataaaagttattaattgggttaacaaaatagatcttgtattttctaaaatagtataaataaggccttaaattcaattttggacacttttttttgatataacaaacttgaaaacaatttcaagcacgaaaagatatataaaacgtaaccagctttgttataacgcatctttatcgagctattatttaattttattttttacaaaaaaaaaaaaagaaaccatatagtactattttaaaaaatacgtaatccaatttatcattaaacaaaacataaaattcaatcagtaatttttacaaaacacaaaattcaaaataatatttacctaacttaatctaacaacaatacaatattaaaaaaaatcatcatttcaagtagaatattgagaatacaagtgtacaagattagaattaaggcaaaaacaaaacctatcaatatcaacaatacaatgtttcatcattccaactttgtttttgcaatggtaaattgtaagttgtttttttacctttatgacttatctctttggcttcttccaaaggcaacttcatccaagctttgaccagttcttttatacctaccaccagattcaacaaaaccaggacaaggtctataagcctttattggccaccaaccaaaccctggaaatgtagcaattccaccttgaattcttccttcaccattgcaacccttctctacttcttctctcccacaagccttacaaccactactccacaaaattggttcacacattcaaaaacaaattcactagaagcaaataagagtaagtactattttagacctgtcttttacaaaaatgttttgttaaatgacaattcagatctaaacgattataaagagcaaaggtggcgtttggttggagtaataaaatagaatagaatggaaacaatcttcattttattcctttgtttgattgcatattaaagtattctaatagaataacctttctaatattttggtcaaatgatcattttatttcgaaaaagaattctaatctatcaatttcttttttatatattttaaattttattccattctatttttattcttattcctatatttttatacctcacaaacaaaccctaaggatattattatgtttctgttttgatcaaacatagagttaaattctcatttaacaaaataaacaattttattgaaaacctttagtactaaacaaactacccaaaatggtatatttaccctgaaataattaaactaaaaataaaaaatcaatttataattttatatgaagatgataatgctattagctatcttcaatttaaagctttgatttttaattgttaagttttactaaatacaaaatccacaataatatttaccattgaaataataaaactagaaataattatggctgtgctatcttcaattaaactaagatttgataaagctttgatttttaccatcaaaattcatcattaatggaaacccagtaaagaatttgagtctgtttttcagttttggagaaatgggttttcagtgaagtaccttaaggaggtgttgttcccgtcttccatggcggaatcatctgaggaaggagatgaagagccttgttccacgacagaagctaatctgcaacgagtagaagaagaagaagaagagagaaagttgagatggtttaatggcggaatcttgagagttgttgaggtgtttaaggttgtagtgttagaaaaatgaaaggaggagggtaagtgatgaggtctcccaactgagaccaccgccatttccatgtcttctcagagaagagagctcacctcacccctttacccaccaaatatgtgaggccaagaagaatgttttttttttttttctctttaaaaattatgttaatattattatatatggctgccaaaatatgactttctttatgtcgtttttctataaaaacgacattatttttgtattacctgcctcgtttctatccttactcattagtgcctttaaattcgtgcatatcgagttggcttggtccgacttatatttttgtgtgatttttaaaagacaagttatgtcgtgtcgtgccttaaaaattatagattgtgtcgtgtcatgtcgtgctaatatgtttaaagagtagactcgacacaatccgtagaatcaatattttcgtgtcatgctcaaattcgtgtcgatttatttttcttaaagaggttagctcatttttatattcgagctcaaattcatgttttcctttcatatttttttttactgaaataaatccccaactatatatattttatagttttaaccatatttatgtaattttttattacaatttaactatttacttataaatacttaaattttataatattctataaataaaataaatagttttagttttataatttttttaataattttaattataaaattataatattcaatgttatatttaagatttattattattttaatttatttataattaataaatacatatatattattataattattaaagcttagagtattttaatatttcgtgtgatgttttttgggccacataaggtgacttttaagataatttattcatgcttacgtatcgtgtttaatatcaattttttttatctcgtatcgtgcttaattctatatttttttgtgctcgtgctgattttgtgtcgtgtcaaaaatttcgagtatttccggcactaatactcacaataagtttgacttaacctcgaaaaaacgacagcattttaattgtagtttatcttagaggcttgaggttttactcaacctataaaaacgacatctttttaagtgtcgttcatctaagacgttttgaagtttgacttgacctctgaaaagtgaggaaaattaatatgaagaaatgaaatgaaaaagaacagatcttgagaaccaagcaaagcaatggcaatggaggagaagacccaactggtcaaactttgcatagctgcagcgtgtgagagcaaacacagcgtggaccaatggcggaagcagaaacgaactctcgaacgcctaccttctcacctcgccgaagctctgcttcacagtcttctctctcgtcgtctcctctacccttcattactcgagtatgaagaacaaaaataaaaatctcattttttaatcagacccagatatgattttctccaaaaattggattttgatcgattatgatgttttaaaggtatgatttttgatatgggtttctgtttttttactcagaattttcaaggacactgtggagaaagttgatcttagagatcataactatgttgatggagaatggatggcttatattggagcttttaagtatttgagttctttgaaagttgcagattgtactaagcttaataattctgctctttgggctatttcaggtatatatatatgattatatgtgataatattcatactttcatctatgtcttgttttgttttgttttgattaatttctgtgttttgttttttaaagggatgaatagtttgaaggagttggatctttctaggtgttctaaggttaatgatgctggttttagtcatgttttatctatttcaagtttggagaaattatctgtttcgaaaactggtctcactgctaaaggacttaagcatatttatttgcttaggaacttgattgtgttggatttgggtggtttgcctgttaatgatatgacattgaactcaattaaggtacttatcatttctcaaatttgtgcttttttatttttctatatatgaaaatgttgatttagtctctatggttgttgaaactatgtaatggctattcatgtttttagtttgaataaattggattcttacccagttcacttgtaggattttgtccctttgatttatttttgagtaaaaaattctcatcgaactatgaaaataatttattgaagagccactcgtataagcaactttgtaattatttctatagtttgaggataatttattacaaaaggcaaaaaaaatcaagaggcaaaaaaaatcttatttgttcttttagttttatttcaagcttgaaagtttatggaacaataaattttttggttgggtttagtaggcttatgttttactctcagaaggaatagatttttagtgctttggctcatgttgttatttccttggttttagggactcacaaaactacaataccttgatctttggggaagtgaagtatcagacaaaggggtttgtgttcttcaagttcttcccagtttgagtttcttgaatctaacttggaccaatgttagaaagttgccaaatttatcgtcactcgaatgcttgaacatgagtaactgcacaattgaatctctacttaaagggaatggtgataaagctcctttaactagacttgttatctccggtgccaccttcatagacgactctgaagcctttatgcataccgaaatgagttttctgtcgtatcttgatctatcaaactcgtcactctcaacattttgcttcttaccccgtctgaacatgctggaacatttgaatctcagctctaccatggtgggagacgatgaagtcgaagagtttgcaagtataggcgaaaatttgagatatcttaaccttagcaagacgaaagtaagcaacattggaatagagatcttaaccggacatactcccaaactcgaaatattatccttatctgacacatcaattgatgatatagccatctcatacatcagcctaatgccttgtctgaaagaaattgacttgagcaatacaaacatcaaaggtatgaaatttgtgtgaattatgtaaagttattatagtgatagtgtgatacaatgatcctagttggcttgacttttaaaattgctggttggattatcagtgagtttcaacttttagtagaaatcaactttaggcctagtttagctgagcttctgcttatgcttttagcttctcgggaaactcttcatgggaaaaaccaacaacataagtacttttgacgcttcaaaactccgaaatcaaaagattttcccgagaagcaaaaggcgccaagccaaacagggtcatttatagtttggtttatggttattatacaagttttgttgagtgtgtataacaaatatcttcaggtctaatttaccaagatggtggccctgagatggatccaattttgtcattggaagcactacaaaggctcaagaatttgaagaagttgaatttggaaggaacccaagtgagggattcagctctctcctctgtatcaagcttaattgaattaacccatttatcacttagagatgcatcccttacagacatctctctatcctacatatcatcattaacaaaactaacaaatctaagcatacacgacgcggtccttacaagctcggggctgaactcgtatcaaacccccgcatcacttaaacttatggatgtcatggggtgttggctcttgactaaggatgacatcgtttcgttttgtaaaactcatcctcacattgaggtaagacacgaacatgttcatgtaattccgtcagaccaaagttgtttgaatcatcgttcatccccttcccgagcaacacaatttcgtcgggagaatattagaaagatgcccatatctccttgttttgtaggtaagatattggcattaaagatgtcatctttttcacttagcattttttttaacatttcaaatctaatcatttcctttcataatgctatgatatgaaacagatcaaaggttaaagtacacaagggaagagctacttgggttgcagcaatttgcatctttatcccctacaccgcctcctcgcgatggtgattagccgaatgtcaaactcgaattagccgaattacttataaccattgttgtagtagtctaattgctaaaccacaagttgttttcttttcatcattttttagatttatacaatccaaaggaaaaatatgaaagagtgtgtcaaaatctgaattgtagtgttacttttcttaaaccagttttgttttttatggtaccaatcagagaataaaaatgtgttaaaaaaaaaaagaccaatgtatagtgagtgactaa

SEQ ID NO: 25081 - DNA, 2637 bp, Cannabis sativa
ccgacatgcacctcaaaactttatgaaatacctctctcatctcatgttatttatttattttgataaatctctcccacataaaaaaaatgtaaatctatatatttactaaaattatgctgatataacctttctttctttcttccctttttctttgttaattttcatatcatatatatatataatatatatcttttgaccaagaaaataaaaatatataacatctattttaaatctttaggaggaatataaacatcaaataataaaaagtaagttataatttttttttaaaataattttagaattgataaaatccaaagccctcttatataataattagaaaccaagtaatcaacttgatcaattaagtttccaaatatagcatacatagactgctatatatattcataatcgtaagtcaaggactatgtcgatcggtatatatatataccacctcagcaatggtggatgtgttgtcttgaacaagaattccagcactatatcaccaaagttcatattattaaaagcccttaataagggtgataggcaagtgaatccccgacatcaaaaccaaacataaatcttgtaacgcctagtgcaaccacaaaaggaccaactgaatttattatatttctattttattatttttataacattatactactgtataatttaacttgtataatataatatgaaaaaataaatatgcaacctatataaaacaatatatacaatacatagcacacaaaataagttatccatctaatattaaattatatataatcacttctattttatttcttattgtaatatttttcttttgaaacaaaaaaataattaaatcatatgtgtaataaaagaaatctaaaattagagagtggccaactcattaattcattgtaagaacaactcatttttggaatgtaatttgttaaaggttcctagactctttaattttattgttgttgatcacaaatatttagctaattaagtgagctttcaataggattgattgaggcttccttaatattggatcagttgttatttgtaacggccttatggcctaatttgattcatatatttatatctatttagcttctttacaaggaaaaaaaatagttcttgccaaaaaaaattcatgtgggtgtagcggtggtgtatgtcgccggccatcttagtagcacaaaaccgccacactaaaacacaaaattcattttgcaaattgaaaacacatgataaaattcagcttcaagaattgagaattgagtgaggagatgcatgacaaatatagatatagaggaagaacttaattatagcatttaataaaaaataagacttaattatgtgttctaaaatttaaatgggacctaaataagtgatattattggtataaatataattggggagccattgctatttaacttatagaatactaagaataccttaaagtgctaatgctatttttttatattattgttggtgtaatttaatatgaggttcttcatattttattaataagtaatgtaaaaaatattgactaataaaatttctggtgatattagaaatttttaagtgtactctaacaacaataattttgatcttaatacatatggatgttacttttgagtttggttgtttgctttgattcataattatgttgttttcatgtctttttacaccctcactataatctcattattatatttgaaagggattcttttctttttggtgcaacaagcaaattagacataattaaaaatataataaaaacagaattttgaaaattagagcagtaactaaagaacttaatgagattatcatctgcttaagaacttgccgtgccagagtactactcatgttcattttgcatgaatactaaagtagcatgagacccaaccccaacacaacactcaaatcaccgatccgacaaaaagatatgttattttctaaagagtattgttataagatagtaatgtggaactggatattaaattgtaacattagcgatattacactttacaagaatactagccactatgagtgtagtcaagttaagtggtagaatccatttttttttcttttcgaaagaagatacaattagttttgattgaattaattttagagaaatttacatagtatactaacttttgtcatttttttacaaaaataatgtcaggcggtattttttattttttttattgtatttttttataagttttatactaaagtatactatgttaagttttcacttgtgttctactggtgttttttagttgttctacctttgttttgagttattctgttttctattttactggtgttttataaaaacacaatatttttaataattttttcgtgtgacagtatttttgtaaaagttacccaaattctagtatgtaagttttccttaattttattacattgcacatacacaaatacaggtctccaagaagtatttgacatgaatattactctttattaaaatttaaaggtatttgacatgaatattactctttattaaaatttaaaggtaacaatttttttctcatttttttaatcccatacgtaaaataaactcaatactcaaaactcaaaagtgagaagaagggggagtgagtgtaacatgaaagtggcctagct

SEQ ID NO: 25082 - DNA, 3075 bp, Cannabis sativa
caaacatacccgaacaaagaaaaaccttattatgaactctccaatgtggttgttgagtctaatagtttggtaactatacaagcaatcagaagttcaattttcttttattcaacctttggtttttgtgttacagaatgccaatctttgtttttaaacttaagtgatgttgatttatattttataaaacgatctgcgaatcgtgtagctcaccatcttgctagagcttctgttttttatactgattgtatgtgtacagggaatctaatgcccctgctacgttgatggatgtaattcttttagatatttaataaagtatgcatcttttattcaaaaaaaaaaaaaaaaaatcatttttgataattaaattaaaaataaaatgtaaaaaaaaaatatttattatacatattactgtgattaataagtgtatgaaatttgaatgtaaatctaataatattagtgaagaaataattaatatttagtgggagctaccaaaagtaatattaatgtagagagccccacaccttatgttacgtactctcacaaattaaattgatctgctatacagtctattctctgcatgtgaggatataaaggatattaattatcatttttaaaccagaaatatattttctatcagcacatttatttattttttgaaaaaaaaatatattttctaatttgtttcccactctcccatgatatttttcttttgagaatataatttattagctgtaaaaaatatatataaaaaaaaacatattttgtacgtcttttatcaaaataaaagtttatagtatgtacataacaattcttgtgcatagcaattctgttttattattaaagaaaaaaataataagaagaaataaaatgtaaaaaatttatgaattttataaaatagagtacattagaaaagtcattattgggatatgaaatgttctaaccatatatttcatgtatatttacattatttggtgaaaacatgaataatatttatctacaactacaatattatttttaaagggtaaacctattaaatttatatatatatgcttctaaagtacaacttccacattaatgagaaataattataatttgccgaaaagaattaataatttgtaacgttatattaaatagtattgtattattttttattaatgcggaacatatatatatatataatacaatataatactatctaggttcatttatataatatataatactattttaatttataataaaatattatatatttgaatgtctatataaattaatatcacatataattttacataaaaaatattgtataaaatacaattcaatataatactaatacaatataatagggcgtaccaaacgaacctagttcaattattatgaaacataaaataaaattttgcagctgagtgacaagaaaaataaataaataaaaatcagtttcaataactttttattttattttattattttttttagatgaatagtgcaacaactttacaaaataaataattgaagattaaaagaccatgcatgaccccaaaaaattctcccacctcgtacggaacaatatcagattatatttgaaattttttgagtagatgagggagctcagaaaagatttcactgattgaaattttctactacaactcctacagagtttgattttatttgaacataatatatataaagttataatccaatatttttatatagccatatatataattaagacattgctgggcaagttctgtatagaaaatattgaattatttaaggtgtaaaattcagtgttaaaacattttattacatactcataagaaaaaaatgtggattaattgcaatagttttaaaatctaaattcgatattttaaataaagatagttctatttacaccctaaagaaatataaatacacctcaattaccccattttatatcttttaaaatacatatttttttttataactacactcaatttattttccaaaatagatcttatcatgaaatagaaagtcactccaaattagtttttttgttgttggaatatatataatttaattttttttaaagaatttcaaaaatatcctaaataactaaataatactgttatataaaataattgacgttataactttaatttaaacatattccgaaacaaaaacagatgcactgtaaaattactcctaactaataatacatttcactattgtttaactttatatatatataaaaagataataataataacaatatatggcatagctagcaagagcattcgtatgcttaaattaattattatcattatttttttttttttgattaaacaaaataaaatgtataatttattaggacgtacatatatatagaataagtagtagctagtagtgttggatctctgaattttcataatcagttggcgctggtcttaattattatctttggttgagaaaatccaagaggaccgtactcttacattttgggcacttgggattagagtctgacaacatcacgtacatcagacaccgtgggcaccccgccagcaccatcggggctgccgccaccggttctgctgccgtgcggatagtttcggggctgctcatggcggagtcttgttcggcatctgaagacacacaagacccgtcaattgacatgtctgatgattcagatgccgacgaagaggcggaggaggaagattctgtctccgcctcttcagtctcactactcgagagagaatcgcgttgtcgagtctcggctctatgctgacgtggcagtggctgcctcggcagatttaggctcagttgcgtgttcatgttttactgtaatacagcaaaataataataataataattattatttttagtaatatataacaaaggaaaaagaatagaaaatattattacagagatagatatatatacctgcggagatggagagactagttgggaaggataatatgtatatatatatatatatatctttatttaggaaatgtgtgcttgtcaaatgtgtgtttggccctaaaagttgatatctatatgtatttatatatatggtcgaatatttagagagagagagaa

SEQ ID NO: 25083 - DNA, 4596 bp, Cannabis sativa
  modified_base (964)..(968): a, c, t, g, unknown or other
attgaattgggtatttatttatatatgtgtacatacctgcggagattaagatttcgaggagaagtgaaagatgtaccggaaatttgttcggcgtaaagggaattaggacagagaagtgggctgttctgagtcgccggaagtgagcccggaagagcttccgatgagaaggtgttgccgtagccggactggtatgacaagtcatccatttttgattgggttctttgttcttttgttcttacatatgaaaaagaaagagatgaaaatggattattatatatatatatatatataatgatcggttgattgagtaattaatgtaattggatttggattaaatttggattagattaagattagatgattttgtcgtgtgaggaagaatccagcttagtcgggaaaaatgtacacggcaactcgattacccgattttttcgcatgtttttttttttttttgggctttggttctttctatagtttctatgttttatgttcagttaagtttttttagttttttttttttttttttttaaaatgagaaatgttaaaaagtattattggtgtttagtatttttttcgatatcatactattattggtgtaattaagtaacggatctcatataacttaagaaaataattttttagagaatatcgctaaacaatcgtaaagtatcatctatcttcagtgtaatattattattagtataattaagtatctagtttcatataacttaagaaaataatttttagagaatattagtaatcaattgtaaggcatcacttatagatggtgttgggtactattagtgactaatagcaatgttagagattttattacaatggaagataaattaaaatgtatacaactcaattgtaaaaataataaaacgacaataaaagtgattgattaaatatatgtcataatacacatatatatacacactatatacatgtaatataatatatnnnnntatataacaagagaaaaatatatatgtatacactcactgaaaaatcttgagtgtagattagtacggattaccatgaattgaacaaggttttacaccttcgtccaaaagcttattttttctcatctctaagcacaggaactctcatgaaaatagctttgggaattatcaagccttttagggttgttagcaaagtgttttgttgatagaaacttctcatctcaatgagcacactagattcttttatatagtgtttaggtgatcacttttaaataccacctcatttctctcccataaatgagtattaattcattttgtaacaactatattatcataattttgaattttttaaaccaaattatgtaacaaccattttattacattaataatatatgtgatcaatacaatagttacaaataacaacaaattgtaactcctctccaagttacaacatgtaggttataaaattatatataagttacatattcatttctcatacacttaatatatattattcacgtaataatatatttatcacattttaatctattataaaataatataacaagcaatgctctttttaaatagatctctttaagggtttttttgtcaattagatttttttaagttagaaatctttttttttttgtgatactttcatgcatgcacccttaaaaatgttgtttcgatgcacttattttagcatttaggatcattttttagtccattttttttatagtgatgtatgatgtaattattaatatatcttagagaaatttaagaaatttaaaataattaataatataaaagtattggtcaaaaaatatatttcacacgcatataaaatagaagagttatgctacaatagactattttttacatgttaaatttttttgagtttctcaaaaaatttcaacttgtcttaaataattacaacgtacacattaggaagtgcattgtagaattttctttttctttttcatttgtataagttttttggtgcttctacaatgcacctctttaaaaaaggtacaatgttgcagccctatcagtttcgagattgaggataattttttagtctatttttttatagtcatgtacgttgtaattattttttatagtcatgatataattattaatatattttagaaaaatttaagaaatttaaaataattaataatataaaaaatattgttcaaaaaatatatttcacacgcatataaaatagaagagtcatgctacaatagactattttttacatgttaaatttttttgagtttctcaaaaaaattcaacttgtcttaaataattacaacgtacacattaggaagtgcattgtagaattttctttttcatttgtataagtttttgggtgcttctacaatgcacccctttaaaaaagatacaatgttgcagccctatcagtttcgagattgaggataattttttagtctatttttttatagtcatgtacgttgtaattatttaagctagtctataaaattttaagaaattcgaaataatttgtactatagaaaatatttttcaaatagtatatttcatacacacatataaaataaaagagtcgcacgagcaacacattgttgaaccatatttttgacgtgtaaaattttcctgaatgtctcaaaatttacagaatgtcttatataattacaacgtacgcgactgtgaaaaaaattagactaaatacataagtttaattattagttgtacataaatacttaagtttaattttttacggtaataatacttaaattaaatttttggaacttttgtaagtacctggtcgttaataatctggaccaataagagactatcacgtgatcattgacttgacacttaacggtcggatacctacgaaagtttcataaatataactcagaaattattaccgttaaaaattaaacttaggtatttatatgcaactgagaattaaacttaagtatttatgccgcaaattacttcttttttacatttttttgggtatttttaaaaatatttacaatttccttggtacaaaccaagtcgggttgacgtaaagcccaacaagatagccatattgggcctcatacttagcccatttcaagaagaagaaagcctgtacagattaattaattatttataaaaaatgaattcaaatttcaaattcgcgctccaacggtcatattttctggctagggtttctgaaacgtttctcctcttcatccctaacctcacctcactcaacacacccatatatatatatacccaataccttacattttctactcaatcacactttcccaatacatttctttctgcaaatcattctcagatcacacaatttatcaaaacagcttgttttgaatttaatcgccatggattttcacaccctcaacaggagagagcttcaagctctgtgcaagaagaacaaaatccccgctaatcaaaccaacattgccatggctgatgctctccaagctcttcttccactggtaatttatttcaatttcttcaatcaagtttctttctttttagggtttgggattttcccctttttttctgatttgttgaaaatgaattttttttaataggttgaaggattagaggagttcttgagtcaacccagatctgatgatgcccaggttgatgaagatttggttcttttgtcaccagatcccaaaacttcttgcagaacctctacaagaacccgaaaaccagtattgccagaacccgaaaccttgcagccagggactcgaactcgacggggaactgttgctactcctgcagctaggagtactcgtggaaaggttccatcttccactgttaaggatcagatttcggtgcagaaaaccgcagcttatagcactaggcgctcggttagaacacttgagaaaaccatggagaatttgactcttgcttctagccgaaagtccaaggatttctctgaagagatggctgatgctgcagagaaaatggatgctgagattgaaaagggtatgtctaaatctaagtttcttgtctaaatatatgttgtgattcggtgggttctataatgatgtttgtatcttacatatttgttaataatctttatcagaagtttcagtaaaaacccaagatttgaatgtgtcaaatgaggtaaaggaagtagctaatgataaggatagtttggttgagatagaagtgaaggctttggttgaacaatctgatgagactatggatgttgaagttgaggctattgatgaaaagggtaataagattatgcaattaagattagttctgataatcatgtttatgtgtttgtttttggattggagttttgacactaattgtttttcaacagaagtaattgatgccccacttgccaaggaagattcaattgaagctcaagagtcttcatttgatgagtcaaatgatgccaatcgagatttggaatctgagtctgtagttgctgaaattgctgaagtgaagccccacagtatgacactcagtggacctgaaatgcatgtatcagaagaagatttcgatggaaagttcgattttgaatctgtatcagaatctaaagaactatcttctgatgttgaacccgaagaagaggaagaagacgagttgagcgatgaagacagcacag

SEQ ID NO: 25084 - DNA, 2666 bp, Cannabis sativa
gaaaagttataaagcgccttagaagaataaagttactcttaataaaagaaattccctttatattatttgtgtttattttaataatttttttaatattttatttttatttcttattctaagaaagttttatatacatttttttgccttaatatttaaaatatatttattatatatatatatatttgtgtttttttaaaatgtattttttaagattttttgtttaatgagtataaactaaaaaacatatatatttacatttaagacaagaaaattttcctatttatttattttgcatatgtaattagactagagatttttaaattgatttgttaagcttggaagtttaattaactttattggttaatgagtgtaatatgccttttttctaaaataaaaaataatataaaggaaagttactttcctttttttttaaaaaaaaaaaaatgggtacatgatcaaaatttccattaataatgaatttgacataatccaatccgttacataaaaaatatatattgcttcaggaatcaacaaaaaaacaaattgattttgacataactaatgaataaataatgttgtttcctaagtttttcaaaaaccatattaaaagaaaattatgttgaagaaaataagattaagaaagaaataaaatgagatgttttacataattggaacattaaagaattttaatatgcgcgtcaatattattaaacccttttgctatggaatatatactatttttttatacaaaaatttctaactatctatatgaagggacatcttatttataggcgggctcattagggtttgtgtggtggaaaaagtctactcgtgggataaatacaaaaaaatatttgttatttggcccgacaagtaagatccagtttgtaggcagtcgtcatttgtacacagaggtactgttgacaatgacaacttagcatgaagtgtcatttttttagggaatgtgagagtagtgggcgttggcctaaaaatattattttcgtttgttacgcgcctttccaaggcctgacagagaggacgtgacagtcagagtcccgtaattcgaaggggaaagactgggagttgtacaatcctccatcgcctggggaaggtcatgtgtgatgattctgagactgtgtaggtatgggactacatagttgaagaggacttaaatgaattgattggtactacctatatcaacaaggtgcatcttattttttagtagtccatcacgaaagaactctatggttaagcgtgcttgatttagggtaatttcaggataggttaccttctgggaagtttccctaagaagtgtgcgagtaaggacaaaacatgctagaaacactcgtgttggtctgtagggtcagtcgtcattccatgaagcagccaaagtgatgtactcgtgtataagagccatcattctgtgggtgtaagggcccaatagaagcttgaagcggggacattataaaggacatgctgccaaagttttgggattcttgtcggagaagtgccacataggctggtcccccaaatactatatgttcccaaacgccttttcaacttttggtcctcgacaatctttgaaggtattcgtctttgtctctttgagtgcctatcaactgatatgagattacttctcgagaccttgtgtccgattttctcattgcagttgtgaaatccgaacaatacatctagcttcgcccataggttgggtggtttacctatctagatccaatgaataggctcgacaattttaatgagtttattctaaggcttatgtgtcatttatccgaaaatttgaatagtaagtaacttttttttattgaataatgaacttatcattcaaataataattagagagtacaaagaagataaaaaaaatttatcatcgaaaagtgaacttgtgaaaacaagtaccatgatctttgagtattctatttcaagtataatgagaatttattttactttttccaaaaattcaatattgtatgttcccaaaatttaaatacattcttctcaaaaataaattaaatacatgtttttatttatggtatgaaaagcaacaaaactaaataaattctatcccttttcaaatcaaagacaaattttaatatttttgactaattaagattattgctcctaaatattttagactgttaaaaaatttatcgcgaactattgagattattaaattcaaggatctctattcaatttttttaattttactaacatagtgattattcatttaccaaatcgtgctctccaaactttaatatgcaacaaattgtgctcttgaattttgatatgtaccaaatcgtattttctgaacttgtatccatgtaaggtgtctattagtaaaattgaacaaaaatttttgaatccaaaataatttaagaaaaaatttttatgacttgaaaagtttgaagaacatgtcaaaatttagttaacaaaaatcttaattatacataattataaaacaccagatcaacaccctatataaaaaaaaatcaagaattcaatcaaaactcaaataaattctaaaaactcaaactttaagtattattccaaaaccaacacatttttagatatatttttggggaattattttatatactatttttttaactttttttttttttttcaaatttacattttgggtttctaaa

SEQ ID NO: 25085 - DNA, 1699 bp, Cannabis sativa
ttttcttgaataggcattcataagggcttatattaccaataaccggggttggtaatctattaattgtaaacacagcagaggacatggcgtgccaccagtattcgagggataaaccagcttgagctaacatggtgaggcctgtttcagtgatatgccggtgtttccgtttagcacggccgttctgttcactggtgcgggggcaaggatgttggaaatgtattccttggtcagctaagaagcgagcaaaaggccggtactcacctccccaatccgcctgcacacttttaattggtaaatcaaattgtttctcgacaagactcttaaacttgacaaatacatcaaaggcttggttttttgtggtaagaggaaaaatccaacagtatcggctaaagtcgtctaggaagtgcacataatatttaaaaccttcctttgaagagatgtgggacgggccccaaagatcagtgtgtataagggcaagtggttgattagctctgcttgtggatattgagaaggggagtttgtgactcttgccttgatggcaagcagtacagaactttaaagattgtaatgtccctgtgtatttaatgtgagggagaattttggtgagggtattgagggcagggtgcccaagtttatggtgccagatgttaatgtcattctgtttagtaacattaagtgccagattggaagagcatgaagagaatgggattttattgatatcatcattattacaagagattacattcttatctgagtgacaattacaagtacataatgaggaagtgttattatcactagacagagtggtaagatgacattgaagagaagtgttagctgcttcaccaagctggtacagtccatccttagccttccctttgagaagcactgtccctgtttgtttgtccttaacaaaacaacacgatttgtgaaactcaaggaatacatcattatcagtggttaattgggaaacactaataaggttcttggtcatggatggaacatttaggacagaattgagatgcaatggcttatttggtaaagtagaaggaaaagaagcatgaccaatatgagtaataagaagcttcttaccattccctactgccattgtttcattaccagtatagttggtgttcatgtcaagattggatgtatccatagagacatgattggtggcacccgtgtcaacataccatgattcatcatctccaagttcatgaaacatggtagttgtagcagcctgaggatcatagtgaaagtcagattcaacaagaaatgcttgagattgagaattaccgtatttgggggtaacccaattcttgtcgaatcggtagtggcaaatggcagcagtgtgtcctgtgcgaaggcagacttggcaaagcaatcttgcaccagggggacgaccatagaatctgtttcgattggattcagtgtgagagccacgattcgagccaatgggaggtctgtaggggccatttcttgcagcaagatttgcttgcattttaacagacaggtcattgacagaatgatggtgatcaagacgagtttcatgagagagaaggagagcttgtgcttcttcgaaggagagaaaatcgcttcttgaagttatgccagaaacgacaggatcataatcaggcccaagtccatttagtaattgcagaatcaaatcttgggttgacacaggcgaaccagcaattagtaa

SEQ ID NO: 25086 - DNA, 5449 bp, Cannabis sativa
attcgaaaattttcaaaaatttagagcaatgatgttgtaactataacgaaaatcgccataaaaaaatttgaaaaaaaatattccagcatatattttcgagtacagaggttaactataagagaatataataggaggttgacgcgataacacactcctctattattaatatttaattatttatttattataaaaatatatatacttatcttaaattgtactaatcaaatacttaatttttattataccaggtggaataatgaagggttgagtggtgttagtaaaaagatatttgatgccctagataatcttgtaagggaaatgtcaactatgtaccttgaacaacaagaaaaaagtcatgaagacataaccagctacataagaaaaattgtaagttatagtttaattaataacaaataatatctattatttgaattgttatttatttatttatttaatattttattttaaatattaatgtgtgtagtggtatgaaacgatttgttcatggcttactgaatctgagtggagtaaaagtggaattgtaccaaccatggaagaatattttaaagtttcaatgacttctgtagcaactcataccttgcttcttccagcttcatttcttctgaaaccgaccttaaaaaaatctcagttacaattaatggagtataaaagtgttactaaattggtcatgattatttgtcgtttgttgaatgacttacaaagttctgaggtacgttatgtaagaatagagtaataacgtgacacaaattttgttgttactaaaagtatacgtaataaattagaatttttgtgactaatattaatatatattttggattttagggtaaagatataaagtttgctaatcacaaaatttattgcaataaaaatatgattttttttttttttttgtacttaattattacagagggaaagagaagaaggcaaaccaaactcaatcacagtttacatgaagaataattttgagatagagaataaggaagaagtagtaaagtacttgaaagagatattaaacgataagaagaaggagttccttgagcatgttttgattaatgacaatggttttaccaatcttcctaaagagtgtaggcttctacacttatcttgcttaaaagtattccaaatgttctttaactcttcaaatcgatatgattcagacactgaattgcttgaagacattaacaaagcgatttacattcctttgaaatcgataaatcatgaaggaacattagaaaagaatctcgtaaagcctccaaagccatcgatgattgatcttcctcgaatcaaatcgtcatcaccgaccaagaaatgtttgatgaacatgaataactttagccaaccctctaaacattttttcatgaatgaactttcctttcataaaaataaaaaagttgacaattggaaaatagctacacctattatgccattaaaagtcaacttgtgcttcatttgattctagccatatccatactatgttgtattatattttctacacaaagtttttaatattagtttgtgtaataaggattggaagagcttacttatattactaggatttttattatatacatatgtaataatattggttgttttatttcggattatatacataggttattatttaatagttacattaaaaatataattatgatagttatatttttatataacttgctacatatattagtttttatttagatgtgcagttgcacatttcacttataattttatataattaaatatcacaataaatttatataaatagaattataaagataactatgatttttttttattttaatagaaataaactgtattttcattcaaaaaccagaagaaaaatattttaaacaattaataatagggttacatttgtaacatttagagaagttgatcacacattaattgccttgctttaaaccaaacaactccttatcacttttttcatcatttctcaaaggacaatctctaccctctactcgatcattatcatcatcatgatgatcatcaccaatgacagaggcaaaaaaaaccttataattaagggggcaatactatgcaaaaataaaatttgagaggggctattcaataaatttttaaagtaaaataagaaaactttacaaaactatcattgaaaaagttgtataataaaatatttgggggtgctaaagccccgactttcatgtagctccgtccttgatccctgatcatcgccatcaccatcattatatacaagaaataaatgcatcattgacgccacaattaccaacaacaaaatatcctcactaaaaacaaagggtattactaacgacatatacaaagtcgttggtgataattattatttttttttaaaaaaaaaacaaattattgacgacattggttattactgacgatattgtcgtcggtgataatattatatcactgacgacaatgtcgttagtagattatcatcggcaaattgaaattctgccattgagtttaggcgggctttttccctctaaaataatcattaacgactttgtcgttggtggaaacatgcagaaaaaaaaaccccaaacccctccttctccccatttctattttcatttcatcttctcccttctccttcttcatttcatttcatttcatcttctcccctttccattttatcttctcccttctacatttttctctccaaatatgaaattctctctattttttgcccttttcatattcttcatttcatctttatttttccattcctcttctcattccaaatctcctcttcatatccaaacccacaaaaccctttgtatcaccagaccaccgcacgctgccgcctcttctccaccgcctgaaaaatttgtcgaactacgatctcattaatgtaatgttattattctcatttttttcttatatattaatttaatatttatatatattgatttgtaatttatgtatatgtgtatttatattaatatattttttaatattttttattttattgtttaaattatgttagttatagtgtatatgtgtatatataaatttatttatgtgtatttttattttttatatttgtaattttatttctgtaatttaaaatattttatttttgttatttgcagattgggcataagagtgtaagtgagatttttagcagcttggaggaagtgttcacaaaatttcttttgtgaaatgtatattttttattaatatgtgtaaagtaaaatgaaatatgtgtattatttattttattataggtgtattaataatttatgtattgtatttaatttttaaaatataatataaaatatttagttttttattatgttttactcttaatttaattattttatatattgtttaattaaaaaattatttaataaaaattaatttgtaaaaaaatgaatgtttaatataaattagtttttataaaaaaaatcaaatggatttataatttaattaattaaataatttttatataattgaaaaaatagaaatttaatacaattaattaatattcattaaacaattttaatataattttatatattaattaattaaatagaaataattttaatataattattaaatttttttcgagccagtcatcaatgacgacattaaaaattgaaattattatcaacaacgactttgttgttattgatattattaattgccaacgacattaaaaatcattgttgataatagtttttaccgacgaattattcctaatgactatttaccaacgaaatgtcctcattgatagataatactgacgaaaaaagggcttttcaccaacgaaatttgtcctcattgatgcacatatttcttgtatatgtattgtattgtattataacaaaacttcatcgttaattaaaagatttatttgatcggtaaccagattctcaacgggcattgaccaccgagataggttaatctcgaaagcctaaccctccaattgatcaagataaaatttcactacaaatttttttacttttaatcacaacaaaacttgtgactaaaaataaaataaaataaaagttgtagctaattataaatcatcaatattgtgttgtgactaaaagatccatagctaaagatatattagtcacaaaaattacaattgtgactaaatgtatttttagtcaaaatacttgttgtgattaaaattaaattagtgacaacttataactaatactatgttttagctagtcacaagtaattttttatttttgttatgattaaaagtcactttagtcacaaaaaatttatgttgtgactaaaagattatcacaaaaaataattatatttttcatagtgtttttttagtaatatagaactagtactatatgttataaaatatacaatattaataaattatatatatataatatatgataagagattaattattatgttaattattatcatgaatatatgtatcaaataatcattaattaatgactatatctacattatattcactaattaaatatactttatttcacgagtacatatactcactacaaaaaacttgacttttagtcacaacaaaagttgcgactaaaagtgaaaaatgccgtgaccaaaggttttaatcacaattttttttttgtgacgacgttgtagctaaaaaatccgtgattaaaagttttagccacaataaaaataatgttgtgactaaaagtcactttgtttggacaagtaaaaatatatttagtgtgacagtcagtagtccacaatccaaataatattcagtgtttcctccatatcacaatccaaatcaagaacaagtatatgaaagtcacaattcctgcatgattaatcagacaagttagactacactaaagaaaaatagcaaacaatatataaatatatatatatatatatatttatatatattagacttgcatgattaattagacagaaataagaaacataataatgtagaggtactattaattaaagtaaattaggaaaatgaaaatggaagaaagatggggtacctgcatcatgatgagaatatgactgatgagcaaaactttgttaaaaaaaaaatgaattcatgtttgactgacatgagtgattatcatcatcactcaaaattgggttttgacatgaaagaaatataaagtatccaaatcaattgagtctttttgtcaagttcatatttggctttgctttctttctatttcaatatcctatattgtgtatgttttttccataagatcaatgttaaaacaaacaaaacacaaaacaagttaagcaaatatataattatgaattgtattcttacattattaaagtcagtttttgaatactcttatgttttcattgacccttgatctcaatttataaaattcattgatagaatatgcaatgtgatatatatatatatatttatatatatatatatatgaaaaaccgtgtttttgcaaatgtc

SEQ ID NO: 25087 - DNA, 4509 bp, Cannabis sativa
tacacacataatttacaaacatacgatacatactcatgtgacatgttaattttaataaggcccattttaaataaacataattagttaaagttacttgcataaatatgtgcaagttgtgaatgaattatgtatacatatcatctcaatttaatacacccttatacaaaaagaaaaaaaaaaagaattataatattttcacgttctgaagacaaaattaataagggtacaacctcactaaaaaaataaggggacaaccgagtaattttcttaaagaatatttaaaacactgttagttttatgaccttctgaccccaaccaataactatgtataaaatatcacataattggtaaagaaagaaattcatgtacaatgaacatagcatgttattttacataacatcaagaatacactaacttttgttactgaaccaaaaccaatcgcaaaagtcttagagcactcacatcaaatgctctaaattaaggaagatttaaaaaatttaaagaactaaattaaaagtacactatatgctctaaagtttaaaatctactatttatgctctatatttataaaatactattaattgggtaataatttattttatataaagatatgtgtatatactaggttgatattacatgcagaacacgtacaattaattttctttttaattagatttaattaggtaatgttaagtacaatacatgtttaatttttttttaattaggtaatgtgtttctttttttaatttttgaaatggggttcgagatttgggaggattttttttagctattgcggtgtgctctttgaatgtgattatatatatatatacgtattttatatgtataataaaactcaagtaagatatcgtggtgaatcatcgtgtgcatgattgagcagaattgtctcttattttaattcaaagttaaacaaccaaagttaaaaatgtggttaaaaatatctataatattttaactattctaaattaaaaatttacataatttatgtttttaaatacatataataatattataaaattaataaagaatattctaataaataatagtaaatttgttaaaattaatatagaaaactaaaaaataccgttatatattcatcaaaaaaaaagaattttgttatatagaatagattagtattatatatttaaaatgaatatgatatattaaaatttaaaaaaataggatttatggtattttttttatatatgatgtaatgtaaaagtttgagataaaattttaaaacaataaataaatacattggtgatgtattttaaagatagagtagctaaggaactctcaagagaaagattaatcgaaaagatgaagagaaaatagtttcacaaagaagtgatgataaatggagctgaccttgaaaagatccttgaagtcaatcagatttctcattttctgaggacaagagaaaggtgacttacaaatgctactcagaacctataaagatagagaagaagccaggctcaagagcaacttccatgctatttaaaagtgcttgtctccttgatgatcctcacttttttcctcctgcagaaaaccaacacgacataaaatgaaaccaaactcatggagacagtcttctgcatgctatctatgtactattgaacagctttaaaaaactagtacttctgtgatttttttttttttttttctgtttatgatttggtttctaagaaacaagtgtccttcccagacttgtatatcgcttactaaacgctaaagcccagatgagagtttaaaacggatctgtttaaaaggaatgaaatgatacaaacgatacgattaataaagaaacaaaagaaaaggcagtattccctgttgagaattatttacaaagtggtggacccaaaactatattcaccttgatgtaaattagataattatgttaataatattagtatgaaaagagtgatgacatgtattattagaaatgaatagaagattgggcaaaataaaaaagttgcattgtaagtaaagaagtcaatagtgcatattagtagtgtataaatgagagtaaactgtaaaacaaaatatctgtaaaactgtctattaaaacaaagtcagtggggtatagatagatgaactatgtcccccagtgtacgctcatctttataaagtatgagataacagtctcaatataaccgggcaaaagtataaatctaatgtaaaaggaaaagttaagaattaaaatgcaaactcatttcaaactcccaaagatatcagttatccccaattttcctatattcttcttgaaactctgctttggataatggcttccatatggtcttcccaatgagaatgcgtacgtacaaaaataagatttcaagttttgtgtacaagtatatgagttttctaaccaatagttaataacttcctatcactaatctgccttcaaaaattcatagattttaattagggtccactaaagtctctagcttccttcaaacgatcaaagcatataattccttgggagtgtgaatatacttaagttacttaatgttggactttctatgagctagttgttgcaaccaacattcactatttcaaggagatttgataaccattgtcatacagcttcagagtcaaagcacacgagtgtgtatgtcaactaacaagaagatcatacacaaaactatctctcgagtttttcgtattccaatcactcgtaagtgacaccctagtttcattattatattactactctcctacaagccggcaatgacccacttcccaaatttgcctacaatggcttcaatagtagaggatgttgaatccaccaccaaatgaggaagaattgtagacatcaagagtttcaaccaaaagaaaaagttaacaatattttaaaaaaaaaatgggctcgtcctaagattcatctttaagagtaaagataataaatttatactgcgggaatgggtaaccaccaggacccgctcctaatgggttgggaattccccatcttggcggttaatagggtggtggtgggggacaatttcaatacccgtagcggggagagggcgggaatggggcggagataatactatccgcaccatatgcgaccccgatatactatatatagttttattttttatttttaatgtatatatagtatatatatatatatatcaataataatcaaacttattttgattatcatccataattaaaattatatatcatatgcttaaatcatgaagatctaatgacgatagtaaactaatgatcattgtggattacaagttttaagatattttcttctcaattcttaatttcatatctttatttacttttttaatttgtagggaaacttgagaggtatgacaccatatactatacttgagttatgctttttttgttttttttcaaacttcaagacaaattttttttttttaactttgagcttgatttgtcttttatcttctatgaattatgaatacataataaatatttgtgagaatattagtttaatttaaatttaaaaaaagaaatcaattactttaaattatcatatttattttctattttgccttaatggatacccaataggttctccataattaatgggtattcccctaccccgaatccgttggttattagacgaggatggaggcataaataggtggtggggatgggggcaggaattacattccccgtgcattaactgcccaatttttatctctatttaagagattgtgatctagtgttgttcaaaaatttattatcctaaatgaagaagcttccttaccctttattagaatttagtactcattcccatacaagcatttatgctaaggatattgaagattttgctcatcatttagtttatagtcctatgaggtaccctctaccagctcagtggacaaaggaaattttatggaaacaaatagtagaaatggtaaacatgttaacaccacttggtgcttaattgagactaagagactgataccaagagatccaaggtttatggtctcatcccatttcccaaagcccaaaccgctagaccaaacctagttgcatgaaatgataaacatgttatcgaggatgtaatttggctactaaacctttcagaatgatgaaaattggatataaaactacaattaaacaattgagtaaattggatgaccaaaggaattttagaaatctagtttctcataacaatagttatcgaatgcccaaaaatttacccttgggtgattgggtgaaaaataagtactgtaagtgctttatggaccaattgaattcagtcatatctttcatctacatatttttccatgaagaacgtttcataaaactcttgagcacatccatagacattgaacattcagactataatgtactatctatattcatcatacatggaagaaaaaccgcgcaatacaataaataaaaagcaagctccaaattggtccttgttagacaatacaaattctcccatagtgattcaaaaagggaaaaatttgaccaaaaaaaggtagctcaaat

SEQ ID NO: 25088 - DNA, 2355 bp, Cannabis sativa
agtgaagaggttttgccccttctctggggtacgacaaactgacgccattgacatagtgcgagggcccactgtgtggttcaagatgtgtgaagaaattgagcgcaagtgggaggaattgatttggatggttgttgcggtaccatctaggaagatttcgattttgacgacaatttgggaaacaacgtgagggacatctgatggattcatgattcgttttggcacaacgtggtaattaacgagatcatcaacttctaggggttttgagctggaagtgagtggcgttagagataaaggaacgagaggttccgcaatcgatgtgcgatggtgctcaagcagggaatttaacttctccaattgagaatcaacatgttgcttgaaacacaactccatcgttttcaacctctcagcaagttctttgctcatggcggaaggtactctcagtgaaagcaccaattaatagctagctattgggtactgcactctttgagatagtgctaatctcctcggtacaaaccagtttcttcattcaacatgttacatacccctccttacaacaaccccactatactatagcgatttcacaaattacaaattaaaggaaataaaatatagcataacaaaattgattgtaacttgctgtgttgctgatgtataacctgctgcagaatggctttctcatgggccttatgcttatcccaagcctttgtttgttcgtggaccaagttaagagtccaaaagcacccgaccttgcctatcacaaaactgattggcaatctgtgaattaacacataggtttggaagtttattaatatccttatatctgttcattgtgaaacactccatgagtttccaggaggtctcagtttgattgtctgggacctatctaaataagagcttcatagagttcagcgagaggatctcatcccaaatgttaaaagaacaaaaatattaaaaatgaaatgtgtgtaaagctataaaattgttttatggtttggtttcacttattaggaagattaggttctgcattgacatattggatttattttcctttgtcgtggttttcttttgtcctaggtgttaattatccaactcaaaattaacagcttttcagaacaggatggatattgatgattatctctgctgtgtaggttgcatttaaaacaggtgattacaagcagcaagtaatatttattggtgggctaactgatggttttcttgcaacagagtatgtgttcctctattagctttattgtgtcagcatggcaccttttagtttcatggcaacaatttatctttctcttattttctgtgtgaaaaccaatttacatattcagtaagattttaactgagacgacaacaaatatctattcttgggtaaagcatttattttttatttttttttaaaaaaataatattttgattcttgtttttttgccatgtatctcttttatttaatgtacagatatttagaacctcttgcaattgcattggatagagagaaatggtcacttgttcaatttctcatgtcatcatcgtattctggatttggcatctccagcttgcaacaggtaaatcactgtgcagttttgctctcttttttcttactaggtgttctttagtgcatggctgcatgcttattatctttgtaggtcattgctgtgtattatgattctagtttaagaacatgttgcattcagcctttcagagacagctagtcagttatgttttcctatataaattttgaagatattcattttgcaatctcaataccaagtgcactctgtctgagtgctcttttgcttgttttgtaaattactttatttcaatagcaaaagtcaggaacttaattgctcatgtttgacatttacttctagtactaaccaaaagcacttgcttgaggtgaaaattatacgtggtacaagaagaaatctactgtgcttaagaaacaagtcaagaattttaccgtctgtgtattgatgcagtggattagattgattaaagccaagtccatggcaaagaagggggaaaccccaaaataggaataaaaattctttcatttgtaaatttcaatattaatcaatgtttctcaatacagttaattttttgggcttttctatatcctcaataaagctagcaaaatgaaaagtggcatactagactgtaacaaactactactctagatatccttcagctattatcttgcagtaataggctatagttatttgagtctttagcgtttttgatccattagtctgcaactagccatcttgcatgttttaggtttttatttcactcatagcaaactaattttctgcataccatttccagccatatctgcttttatctcttgagtgt

SEQ ID NO: 25089 - DNA, 4336 bp, Cannabis sativa
tagttatttaaattaatacagttaactaaattaattgtttaatattttggtataattaacttatgattattcttgaaattatatgctagttgcagtaggaatcaagatctctctaaactaatttaagttttacactttaattaattgattttttatttattaaaaaattaaatatttaattgaagtcaacaaaaataattaatatatttaatataaattaaattaattaacttgtcaaaattaaattaatttaatatatactatattacactactttttaacatgggatcttaatctctaagagattttagttagtaattattaattgcatataattgaccctagctttatatgtgacacgctgcaccacgtgtacatatatacatagctttggttcctatatatatagctacatatacagttatgtatttgtatgagttataataagaatgaaattctttaataagtacttaataatcaataaacttttcatccccttcatattattcaataataagtctttatagagctgcatggcacgtcaattaatattaatattaactatatatatgtaaacaatattataaaaatgtcatacgcgcgcgatcatatattaactacaatttatatatatatatatgatccacatttaactagattaatttgcatgaaaatatgtacacaaacgaacaaatggtgcagatcggcaattaagcttaggttttgtaatgttgatatgattataaaactaggggaatcgatgcgaaggacccgacatcatgagtgatcgtatctatatatataatacatatgaagggaaagaaaaggacaattgagaaacttccaccatcaatataaattaattatgcaatatcctttcttgtcatcactttgtccgtttatcaatccccaaatctttacttttgcactctaattaatgataatctgcatgtattgaatattcaaatggggtccagagaattgaacaatatgtatcacaacccttaggcataaaggaatacagtttatcctggctttttaattgaatgcatcagtaatcatcaaacgtgtaacatatgtatatgtttatcagtactcctattcatatatattataggaaataggtaatacttactattatttatatcatcatgcatagatgcattagccaataaatgcacattttatttatatatatagattataatattggaagaaaaataaaggcaagatttagatagaatttttaggttgagaatgttccttttgtatagatatcaatcaatatatatcatatatatctggccggtctattattatcactttgttatagtagtgagggatggactgtcatcgtcttgaggatgagacggattcttgttgggcattggtgcaagagaaagttcgtaaagcttatttcttttcctttttcttttctttcttcaatatatattctcgactatatatatatatataaattaatatttttatatctatacattacaagagttgctaggccgtttaagatatgctttatatgagcagatcacgtttcttgaataagaattaatatttataattaaatacgacggttaattacgatatccaattaatttggtcaaagacatttatgatatattttataataattaagtagctaggactttgagggtatacaatcactggctaaccattagggacgtacctaaatctcaaccatgtatctcgatgttacttcgaacattttgaacacaaaaatccacatacaatagtgaacgtaagcctttctgtctgagccaagctatactataaaataaactatttttctttgtacgtgcaatctttccaaattatattgtttccaattttgcatctgcatatttgtcgtgtcaagctagggtaatttacgcactcagctttttgggtaatttatcattactgaagaacgcaaaatttcatacttcttcattgtttcttgagtaaaaagcatttaaaattttaagtttgtaagtgacataaatttaaagtttatttgtaatagcataaataccatatgttcgtaaaattagaatttttttctaatttcaccaatacagactctgttattcgcttaaactggatacatataaaatcccaattcttgatcattgtggtttagacagaaacttgtagtatttattactttcaaatgttattttaataaattcaaaatgaaatatttattgatgatcatctccagccttttttggatttggacacaaaagttatttcagtttctttctcagtgtcttttaacaacttgttttatggctcatcaatattaatgtcgagaatattgaagagggtttgtcttgttatattctctattattctaatttgaataattggtgtactgccagggccggtcctgaaatttagagagccataaaaaaaattattttaggctcttatttaaaaaaaatataatatttttcaaaatcagtaaaaaaaattgtataatttcaaaagggaaatattttttttggactcttgggctaggtgggccctaggcacaggcctagcccgcctatgcccagggccaggcctaggaactgcatgtttttattagaaaatctttggatgaatgtcatttcacatgttcatttgggatgaaaatttagtattttttgcattaatttaatactttactactaaaaagatggacattcttatcgatccaaacgtcgatttatttttatagttacaaaccactataaaagccactattagtgtcggttacaaactgacgctaaccattagcgtcaacttataactgacgcttaaaataatatattaaatatgttaagaaatactatatttgttttaattatatataagagtgtttttttaaaatatatataataatgttgttaattgatacaaaagtatattataattagtagataaaatgtagggccatagcattaaaaaaaaaaagatgatttgtggattaagtagatttatagagcttagatgcaaattggtgggactactcagcaacattaatttcagctagaacatttatacatcaggaggtctaccgacttctttgtccgcaagatggaattagagttagatggaataatgaaatgtgaaatagatttaatagccctaaacatgtcgtgattgcttagctggctgttcaaaatagattaagaactcgagagagattactcaaattcaatatattagaataagacttgtcttttgtgtggtttggatgagaaaaatgttaaccatctcttttttaattgtcctgtgagtatgaaatgcataaaggcaactatggattagatggattgacacactaatgcatgccagctctattgtctctttatataggtagatagttcggactaagatgagtcaatttaggagaggttttttttttttcagctctcttagcttctcttatatatcatttgtggagagttaggaatgaaattttgtggtcacaaaagttgacaaaattaggcataaatataattgtaaaaagagtgataaaaagtgtaaaaagtagaattttgttaatttagcctaaacataattagtagggaagatgtattgtggtttgagatatgtcaattaaggtgaaatgatgtaaagtatgttgaggcatttaaatcaggtgatgttaggaggtaaggttgattttttcctcattccaaaatatatatatatattacaaataattagttacaaattaatgggtagagaagaaaaaatgaatgaactagcatttggacatatatttattaaggaaatttatataaaatattatttttggtaattattttagagttttgtagtaaaatgttttttttttttacatttttaatgtgtcctataaaaaattatataaaaataatagtaaaataacataaaataatatacaaataaaaaaaatcaacaacaaaatacataaaaaaaaaatataaaaaatatcaatagttcgtatttttcaaaaataaaattttaaaactggtagaagtgtttaaaattttatacaaccctatttttgtattttttatttttttagatatatatgtataaaaatgtcctattaaagggcacaaagccaaaagagtcacatacgtacaaaacaaaaaaatcagtctttagaaccgaaagtaattaaattaggctatcgaatttgagaaacatctaaagataaagaactataacattataattactacaccaaaaaatagatttaataacatttgaaaatgttagtattacttagttttaatgacatttattggtttagtaacatttttgacaaatgtaggatata

SEQ ID NO: 25090 - DNA, 1273 bp, Cannabis sativa
attcattaaataattttaatataattttatatattaattaattaaatagaaataattttgatataattattaaaaatattttttttcgagacactcatcaatgacgacaatgtcgtcattgataatataatcaatgacgatattatcatcgttgatttaccaaaattaaaaaaaaattattatcaacaacgactttgtcgtcattgatattattaattggcgacgacattaaaagtcgttgttgataatagtttttgccgacaaactattcccaatgacttttcactaacgaaatgtcctcagtgatagataatactgacgaaaaaatagctttttaccaacgatatttgcccttattgatgcacatattttttgtagtataattttcttgtcttttcaataattttttcgtttttgtctatttcgtagcttattcttgagaattatagtttctatcttaaaattaatttgtaataagtggaatagttcatattcttatatatgactcaatactctactatttattctatgtaaaacaatattcacaatacttatatatttatatattttgagtattattggccctattttaaatgagcatatatacttgtgagatcttactttctttgaattctcgcgttatttggtgttattcaaatttcgatccataggagtatgtaacttttgtttttaaatatataattatatatacaattttcatataactaatattttttgcaaaatcttgctttataatatataaattaatttgaaaagtgtattggtaagcacgtacgtacgtatatatataaaaataataatacttaatttggataagaaaatgaaatattaattaattattgattacacaagaagccagctagctaatagctatatgcagtcataagtcatgtgaagtgtgaaaacgttttctaaaatacagtcgaaattaattattattccaaataaggattaattaattaattatagctaatgtatttgacctatatatagttttatttaattatatatataattctaaacgtcatgtgcttgaaccataagttaggcactgctacatgaatatatattgggtaaatgcatatacatacatgcatacatacatatatacaaattatttaaaatacataattaattgaactagccatatataatgtataattaataaattaattatcataatattatatacatttatatattttaatttacatattattataacatcgattttatatatagtcaattgttt

SEQ ID NO: 25091 - DNA, 3604 bp, Cannabis sativa
attataattatttaagatatgatataatattttaaaaattttaaaataatttataatatagaaaatagttttataattataggtcttaggctaaaaatatctaattagacattttttgtataattttttatgtttttgtatatatatatagtagtaaaattttataatacagtattttaaaagtatgttatattttaataaaatattaaatgtagtattttaaaaataaattaaatatttttttttcgaaaaaataattatactattttataaataatagttaaaatataaaatattgtattttaaaaaaaataaatttatctcctccttaggttttttttatttttgctttaaatagggctttgggcgtgttttgctgcccttctccgccctggttcaagagactgtttgaatcttgttatcgaaataaaaacaaattaaactaaaatatttgtgtgaacgtcgaaaacagatttgtttgggtgcattttcgaataatgtatacatatttactttgatatgtcgtgtcccttctctgtcaattagatagcagaggacgaggtttttatctctttcacaatttctaagcctctctcctcctcaagtttcatactttgaaacacttctctctctctctctctctctctctctgtgcacatatatttttctcacctcttaccaacatggaggccaaccacagagatggattttccttgaccttacctcttatgtcagatgataacaagcaagagtataataataatggactaagtaccaagatagaggaagtagagtcaaaccattctccacaggcaacaggctcaacctctttcttcaaaacatgtttcaatggattaaatgctttatcaggttcacctttctagccagatatatttcaatttcattttattcctggcttttgtttctgaatctcaaaaatgttgctaattaagttgctttttcaggagttggaatactctcagttccatatgcattagcaactggtggatggttaagcttgattctgttctttgctatagcaacagcagcattctactcaggcttgttgattaaaagatgtatggattttgattccaacataagaagttaccctgatattggagagagagcatttggtaacaaaggaagaatgatagtctcaattgctatgtacactgagctttacttagtctcagcaggcttcttgattttagaaggtgataacttgtacaacatgttccctaatgatggttttgaagtagcagggcttataattggtggcaaacaatgctttgtactaattgttgctcttgttatcttaccaactgtatggctagacaatatgagtttactctcttatgtctctgctagtggtgtgctagcttctgctatcattatctgctcgattttgtggactggggctttcgatggagtcgggtttcgtcaaaagggagaactcattaattggaatggaatccctactgctatgagcttgtatgcattttgttattgtgctcatccagttttcccttctctctatacttccatgaagaaaaaacaccaattttctaatgtaagtaaaggcctcatctttatcaaattcagtttaaaatgtgaactcattatgaaattcttacattaagttttattgtttttagtaaaatttattgtgtttgatagttatttgtattgttagcttatattattatagttcttggatttagtatctcagtaaagtttttttagtttactaaagtctttgattagaagtctaactagaattatgtagttaaatcgccttcttaactttataaatacatattgtttcatcacaattgtagattttttataatcaaataaagaaaactagttctaatttaaagctctaagaaagacttaattgataatatttcactgatttatcaattttcagtgtcattttgttgtaatgacctgaaaatgatatttgtgcaaatttcaaataagctaaagctgttgttgttgtggttaatccaggtgttgattctttgctttgttatatgtacgattggttatgcatccatggctgtatttgggtacttaatgttcggaacaagagtacaatcacagatcactttagatcttccaactgggaaactcagctcgagaatagccatatacacaactttggtgaatccacttgccaaatatgctctaatggtaacacctataattgatgctgtcaaaaatggctttccaattccatggtttctcaacaaaagattctttggtcttatcattggcaccacattggtcatcagcagtgtcatagtagctcttcttgtgccatttttcgcgtccctcatgtcattagtcggagcatttttcagcgtgacagcttcgatcatcattccatgtatatgctacttgaagatttctggtatttacaggacatttaactgtgaaatagtgattgtagctgtgacgatattaatgggggttgctgttactataatcggtacttacacatctgttcttgacatattagtgaacatgaaaatgtaaaaggcttgtcttagtataaggtatctgtccatgtagagaaattgagacttttcctctgtcaattttcggatgacaaagcaaataatgcttaccagttttgtaagagctatctttagtgattgtttatatgagtttattcgaattcttcttctgtgatttttttcattttgacttattcatcggactaatcagaattgctttcccaatgctctattccaagctttcacatttacagtcagaataagagaaaaaaaaatggtgaaaaaaggttataagttgatcatcttcatgtgcaagttaagtacatcaagtagttggtagacattgacatagtcagcttctaaatcatagccagagatgaatcgacgaatcgatccacctaactcgatacaactctccccagcagcttttttcatcctcccaactctcataactcttctaacatcagctgcttcattccacatcccaacttcagcatatatatttgccaccatcacaaggttcccacatcttctaggctctaattcaagcaacctcttcctcactttatctcccacaccttcctcgtcgttgacaccatgcgtggtgcacgaactaagcagtgtcctccaaacaatgggatcgggctcgacaggcatgttctttatgaaagcataagcctcactcaaacgaccagcgcggcctaaaacatcgaccatggcaccataatgtattagcaatggcttaattccatgagtatgttccatttcgcgaaagtaacgatagccatcttggacgagaccggtgtggctacaagcacaaaggacaccaagaaaagtgacgtagtttggcgatatggaagagttcatcatctttgcgtaaagggcaagagcttctacggcgaatccatgttgagctagtcctaaaatcatagcactccaagtccaaacatttctctctttcaacctatcaaacagtaacttgccataagccaaagccccggatttggcatacatgtcaacaagggaagtaccaagtttgcaatttacaaccaaccctcttccaatcacatgagaatgaa

SEQ ID NO: 25092 - DNA, 1723 bp, Cannabis sativa
tgcataagaaagaggaaaaacttggtcagaatgttgatcaagattataaaatggcacacaacctattaatagtgtctaccctgaacttttagaggagcaccctcccgaacaaggattgaaagagcgttatcatcagaggattcttcttcaatttcttcaaggattgccttccttttcccttcaacatgctgaacgaccctgtgaagaggttcttcctcaggatccttgagacgaataggttcttccacaggcgaagccttgaccttattggctttggtctttttcttcttggaagaggttaatttggtcgacgctaatggcttctcggggaacagactgtctgggcttggatagagtccatacttgagtaaattctcaagagatgtcaaaagaacaatatgtcgagcagaattagacaagttcaagatggcttgggccctatccctaagaccaagtgtaaaatcaggctagatataagttttagcacgttgaaaggtcataaatttagtcctcacctcggtgactgtgtaatagtcttgaagaaaaccaccaatttagttgacacacttctcgtttgtgttgatcaaccatgaacactccagctgggaaaagtataataccttgagcgttcatgatgcggagaggacttcagttcaaagaactagtttatgtcatgagcagaaggttccccccatccttgttgtgcgcaaaaaataaacatcacgaccaagtatttaatttcctttgacgtgaattgcatcgaggaattttgtagtaattagccaacttcatgaaatatgaatgaagtggcaagagggcatcgtgcttagcatgtgggctagaccacacacacatccctacaaccggatcgttggctagttgtccctcaaaggggagaaatacgtgcacgtcgccaagaaggccattttgtccaaatttctaaggtgcctctctattagttcggatggtagagaaacccacattggcccttccgcctcctgatgctcgaatggtccaacctcatcaaactcttcatttgtgtaatcaaaacctaaggttaaaagacggccctgagagttgaatggtagcccatcctctgaatagccaccgacaccctcaaaaggcatgaaggtgtgcctgtcattctcacatttcccttctatttcttggacttcttggtcccgtataggcagagcgtcttccccctcagagttcgcccctcccattttgtgtcgcctagcaattaactggacgaattccagtccttcggaccaattttttggacagtttgtttggtacgagccacttttcttgagcaaaatggatagatcgatgaagggtcatctgagacagtgacatctatttctgccttgaccttaggccgaaatgaaggtttgagattcgcctctagcaaagtgcctgggacaccaacacaaacaatgtacgtccagttagagggcaaatatcacctcaaaactctgttgtactcccagacgaatctcctgtacatgttgcctccaatttggtccatgtaaaaatgatgttggacgaatgatacaacaggcttagacttgtcacttgatacttcccactcttcaaagctagaggaagagttaccatcagaagaaggagactttgcacgggcctttggttgatccttgaagagtagttataaaaggtcgtcttcaataaagttattacctccctaatagtcgtttgaatt

SEQ ID NO: 25093 - DNA, 2738 bp, Cannabis sativa
aacactattatttattagttagacggttaagcaaaaaagttattagttattggttaagtaaaacaaaaaagatacatgtatttatgtttatgtaaattttagatcatagtacatgttgtgcaaaataggtaaaataatatctaacagaaaatgttgatttaacgactctttgaaattcttctgttaaagttaaccgttaaaactaataccgttaaatcaattaattaattatctttttttttaaaaaaaaaaaaaatatatttaaatttaatttatttattaaaatataacttggataattatttaaaagtatcaactaaattacataatattttaatatataaattttaatttaaatttaaattaacattaatgatactttacaataaatttattagttacatcgtttaaaattctaaacttatttacttattttattatttaataaaaattagttagatatatatttttttataatagattaatattacatgcaatacatgcatgttatactgatacttataatacatacatatgtatttatataagtttttactatgatataattacactattggacaggaaaaagaagtagggagttttgactttgcatttgtggatgctaataaagatgggtacataaaatatcacgaacaacttgtaaagctgattaaaattggaggagtgattgcatacgataataccctatggtttggaactgtggccctttctgatgaagacgaaatggatgatttttttaagacaaatagaaaaatcataagagaggtcaatacgtttctagccaatgataatcgatttgagatatcgcttgtttctattggagatggactcaccatctgtagacgtctctactgattaagagatccattgcacacaatagtagtgtactaatgtcatacaatctgaggaaataatatttttatgaagacctttccaaactacgtgacagtccaaaattagtcgacatgtatcaataataaacgtacgtttaaaattcaagtcttatttgtaataaatgagctccttgattgctactctattttaatttttttttttttttgaaaagattgctatctattttttttgggtgagaaataatagtaaaggattcaaaaacatacgactatgtagataaatattcttattttaaaatttatagtgaaatgatgattttatatagtctttattatttaaattatcttttgtcatataaaatttttatggttttatttggaaaatttgattttctatacttatatatacctaatattttatccctaaactaatacatatcaccattgaaaatatatgaccactttatttaaaacccaaaaatacccctctcaaatataagcataaaaaaaatcaaatttcccttctatttttaataataatcaatttatatttttttaaaagtgttagaaacatagaacttaaatataatggtatatccatattagttttgttaaaattatttttattttaaagttatgttgatttttctctataggttattgttggatatcgttggtataatattttgttttacagtatatttcttttttgttgtatgatatattattattcttacatgatatttattttttattttattatgtataataatagtatatattttgtaggtatatataatatatacataaaatttttatgtttctcatatttttgataatattcaatttatatatatttttttaaaagacttagaaacatataacttaaatataacgatatatctatattaattttattaaaatcgtttttattttaaattatgttgatttttgtatgggttatggtgggttgatggttaatatattttgttatactatatatatatatatatatatatattttttgttctatgataaattattattcttatatgatatttattttttattttgttatgtataatgatagtatatattttgtaggcatatataatatatacatttgaatgtataattttattgatatgttatttttatacatttttaattatatggtatatcatttattttagataatatttagtttcttatatactatggtgttatgtaattttattgtcatggtaaatttattttagttgtagtatataatttagttagtatggtacatatatttagtaatatattttctttttttttattattattattatttttggtatattttatttattttagtgaatggtatgtgtatgttttattttatggtatatcatttttttttaagatgatttttaaattttagtttttaacatacttttattagcgtgacatataatattagtagcatgttatatatatatatatattaatatattaatttttgttattatatatatttaaaaattagcgtttataaataaaagaaaacttagaacttatggtgattacatgtaatgtttgttggaattgttgatatcttaaccatactagttaaaatccaagtatacgtccaattagttgcattaggggacgcaaagtagaaattacaactaaaacatacttaaagagttcattacattaatgcatgtagttatgaatcctccaaatagcacattgttgtatatcaaaatggtacgttttacatttatcaactcgcaagcgcacgaatctttattgtagtatggagattgtgaagaacgaggtcgaacccatgggaattgcgtgaaatcgaagaaaata

SEQ ID NO: 25094 - DNA, 5655 bp, Cannabis sativa
  modified_base (4483)..(4485): a, c, t, g, unknown or other
ctattgtattgacacaaccgatgaagatactaccattaatgttcctagacagaaagtcacggtaccttgttgtagtgggagggttacaaggaactcacttgtatattatgctatttaatatgttatctcttggtcctaaagtgagacgaaggaggcggccagcttaggccccccaccgctcagggtcccatttcgaaaaaaaatattaaatatagttagcaataaaataaataataatactcaaactaccaaatatttattatatcttagtggtaatttgattagtttaataactaagaggtttagagtttaaatcccaataacttcacattttctttggggtcctaatttttatttttgcctaaggtccaaattaacataaggtcagtcctgataatcatctttgagattatatacaagtgtataatgatatttattgctattaattttatataattaattataaatttgtgctcgttcagagagagagagagagagagagagaaatttgtgaggcacactatattttgaagttttatcaaaagttgataaagagatattaatgagaaaattttcattgttgttttacggttgttttttagttgtttcattattattttaattattctattttattgttttgcgattgttttataaaatgacaatatttttgtaaaaaaaaattgtaaacttttacccaaaattaagtattttttgtaaaaagcactatatttctttactcgtactatgcaaaatatcttgagaacattttatagcttgagtttagattttttaacgttttctaattcattttgtaatagaaaaattacatgccgttttaataatataattaagcatgaatatttaattttgcaaaaaatatatatctaatttttctattttttctattaaaataaaaataaaaatatctcaccttaaacaacatgcaaaacaaaatatttgacttattttagaaataagttaattatacatatattgatatataaataattaaattaatatatttattgtatttatatatcacgtaatacctattattaaattaatttagtataattagttaattaattatttaatttataaaaaaattaattcaaattaattatagttaaaatatttatttttttacacaagattaaatcttaagaaatatttagatacaacgagtgagacaatgggtgagaagtacaggtgagatacggtgatgataacgggtaagatacgataaggcaacaagtgagatatgatattgaatgatttgatataaaaataatgcattataggaaacactctaattttttcctacaccaacctatttacttattttttttttatcaagaaaaaaacttcattaatcgaaccaagcaaatacaccctcaagtcccttccaaaaggaaagactcagctcacaacaattaattacaaatcaatctctctagtgtaaccaactccattttggagcctttcctatttttgaacatgaacaatctatacttgacatccttctttatatccttaactaaactatttacagttttgagaaatttaagaagatacaattgtttctattcctccacaaatggtatattgttccagccaacaacaccaccataattcttcctatgaaatcgttctgcatacacccaatccacgtactccagctgccgaaattgttggaccaacctgaaaatccccgccacgaaaacattcctgcctacacttgctgcgaaaaaatgtagcagaaaaataagtgttgatggctttctttagctaacctgcacactgcacagcttgtgttatccaccatgatctaaaacctcctcaattgatccctagtttgaagattcaaatgaaccacttgccacaaaataaagtcatgttttggaattatcaaactacaccaaataacattggttgttgggtctattggttgctgcagggaagagttataaagctttgtcgctttcaatttatttccagaactagtagccacaatttctgcctaagaaaaatcatcccttaaccgacacaattttttccaataccaacttttgtccaaactcaggttatacctccagaaattgatccctcttagatagacaacattaatctatttcacccacaagagatcttttttgttcataagatcccaaacaaaatgagctagagagaccttgttctatttggttccatctttaaaacctagaccaccaaaagctttaggaagacaaaccttttcccaacttgttgtgtgaattttaggacaattccccttcaacccccaaaggaaccttcgacaaagtttctcaatttcttttatcacactttgaggaagaaggaacaccctcatccaatagtttcttaggctaagcagagtagagtggatgagtaggactctaccagcaaaagaaaggtgtttcttgacctagcaaataagcttttgcttcatctttttcaaaattatacaaaaatcctcaagcttccatttagtcagtctaagagggatccccaaatacctaaagggaaagctccctattgacaagttgattttctgagacaatgactcagggtgagtcactcctcccataaagatttgagacttctcatagttgatagccaagctagaagttttactaagctcttccaaagcctctttgataacatgcaccgagtctttatcccctttgcaaaaaacaagtagatcgtctgcaaagcaaaggtctgtaagtttgagtttttattttttacataagggatggtacctgaactttttctctttagtggcaagttggaatttccgcgaaaaataatccatgattagcacaaaaagaagaggcaaaataggatccctttgcctcaatccctgctcacctttgaaagtgccctggaatctcccattcataagtaaggtatatgaagtatttttaacacaaatcataacccagcatatgaatttcgtcagaaaatagaaagcatttaatagctgctcaagaaagtcccagtagacagtgtcgtaagctttactgatatctatttttatagtggatctcggagagcaatttttcctcttacaattcttcaaaagatcttggagaattaagatgttgtaggctatagatcttcccttaacaaaggcaccctggttttggttgattaaactcgaaagaattttagccaaccaagaacataaaagcttagatatacatgtgtacactgttgcgcagcaagctattggtcgaaaatctacagctctggaaagattgtccttttttggtattaaagacaacattgtattgtgtaactcaacaggaaactggatagtttcaaagaaatgcataatggcactacaaaatgtccttccccacctcagaccaaacagttttaaagaaccccgaaccaaatccatcagggcctggagatttagttctagaaatactaaacatggcatccctattgctgagagtaaagggatttaagaggtatacctattgatcaagactgagtttaggtcccattgttatgcactattgctgaattgcaaaggtagtaggtttagctctgcccattatgctcctaaaatagtgaggaaatgttggacaacttcggggaaatttataatgactgcattttataatatggattagtaaagacaattagcattgattattaatatttttatagttatttgtgaatttatttaactatgggtcccattatcaaaagtgggtattagagttataatttatcaatttcggagattttattaaactctaggtgtattatttgagttatacttgaattatgttatttttgtaatttttcctcggcgacaacgaaaaatgcgatggatgaatattttaatcacatgggtgagtctagaaccttattattagtgggatatttatttgagaaaaaataaaataccgggtttgggtggggttatagtttttgaccattttacccctgaccttaaattgcctaagttaagcaaaaatgggtattttagtaatttggaaagtggggaattgggtggcagcctaaggagttaacacctagctattatttcagcaaagattaaattaatcaatctttattcatttaggaaaataagagaaaacaagaaaagacaaaaagtcaaagaacactatctttttcctttctctctcttcaaacccaacaagaaccaaggggaattgctgttgaattcttcatttcagcaagaatcaaggaccatgttcaaggtgtgagattgaattgtagcttgaggtaaccctaaccatccttatttttagaattcttgtgttgtaagcttgcttttggtgtatgatattatgttttggtggctgttaggtttaggaagttttgtaattcgttttctaagtttaaaattgagttaaaatgatgatttagctattggttttgggttgtggggttgtagatgaacaagtttgagtttgaaaannnaagcttggttcatccatggcatgttttgaatttgtgcaatttctgagttttgttgattggaatatattgtgtaagctcattataggtgttcaggaaagtttggtagcatttgggcatgttttgagcaggttatgaaatgtttggggaaacttggtgtaaactggttaaccggtttgccaagacctgtaaaactggttaacccgttttgacagattccttgaacaattcattttcctcaatttgtgtccatttcaatgccttgtttgggtgattccctgtttcctaagatattatagttccagttagtaataacagaaccttaagttgtaggtttgggtttcccggattagggtcttgacgttagatttacccggttatgttatgtgattaaggcattcatccagcatgagactttccgttcaagtcggccaactcacttaaatttagaaaagaggtaagaataatgtataatatgcgatatatataggcgagtgtatgtatgtgtgaaaatgtatatgcatgatggttatgattgctacactaccaatacttgtacagaaatggtatagagtgcattagtatagtgtatattgtttaaagaatacattacgttgttaccagcacaagtacatgaagtacagggtgtgtgtggtataataattagtggtactcaaggtacgaaacaaaccctaccaacactcatacatttttggtacgaagtgtatgtggtacagtggttgtaccctagtatggaacatttttactcatttattaagccttgtaaataggtgtatgggtgcctagatacaagtgggtattatatgatatgttatattcttttcttactgagtatgttgattcacagctctactttcatgtgtagttaaaggaaaggccatggctgaacaggagtgagcttaagctaggatgaggttgtacatgtcatggcagcgcgacctggagtgttctgtctcgggacatttggggttatcattttgtagtcgctgtgctatttgattaatgtattttggaatattttgtaaaaagtttagaaacgggatcccagcttttgtagataattacgtaaagtttataaagtttaatagtcaatactaaaagttttaatttgatacaattttcaagaaaattctttaattatcaaagatagca

SEQ ID NO: 25095 - DNA, 2592 bp, Cannabis sativa
atagccattgtatcagttgtttcagtaggattacccctccttgtgatcacaaccatcttcttgtgttttgaagagatacaaaacaacaattgtgttcttttgctctcaatgaaagcagcaaattgttgaccttgcttttagcaaaggacacttagtctttaaagtcattagaatgaatgaatttgaatagtaattaagtaaaataagaacatagatttgttatagaggttcgaccccgtgatagtggtaatagcctactccccttttacttgtattacttgagaagtgaagcaagaagctcttgatctctcttgaaagcttacagcgatttttacagtgtaagtgctctttttaattattgaattatggatccctccaatagtaaaaatggctccactatttataaggaattattacagtcattatgtttcccaatataaataaagaataaaaaggcaaactagttattttcctaaattacatcatttacgtgtggaaataccatgaagacaaagatttaattgacaaacaatggagaaaattatatttaaggctttctttcgcattcaccctaggcgacatatgcaaagtggctgtgaaattgacactgctagaatggtactatttaccctgcgcaacatttgtacattattcttcaaataagtagtatctaatgagtacttaaatctaggcggcatagtaaggaaggaatacgtcgtccaggcccaacaataatccacgtgtcactcagagaagcaccacatcactctgtgtggattttaggataacaataatatttacttattttttgtgccaaatttaacataatatttacatcttgtattgaagatggtcttatagcacatcattggagaaatattatattaaaaaatgctaaaataaaatattttattgaagacgatcttatagccattgtgttagaactccaaaattctctcttttcttcaatggaacactccatggtttctttgaatccaagagaggattatgacaaggtgatcccttatcacctcttctctttgtcattggcatggagtacttgactcgaattatgaaaaaagtggggtgcaaagatgatttttcctttcatgagagatgtgatgctttgaacctcaatcaccttagttttgcagatgatgttttgctcttttgtagaggtgactataaaatcatcattattttgctccaaggtttaaagcttttctcagccacctcaggtttacaacctaacaaaacaaaatctgtaacttattgcagcaatatggcagaacaagaggttgttagagtgttggaagcatcaggtttcacaaggcagcaggctccttttacataccttggtgttcccatatgcactaagaaaatctcgaagcaggaatgcaatattttgacagaaaaaatgactgcaagaactcgattatggagtaccagaaatatttcatttgctggaagagttgtgctcatcaactcggttctcacagcaatccactcttataagtgctagatccttaaactaccaaagaaggtaattcatgagattgaagctatatgtagggcctttctttggaaaggacaatatatgatgcagggaactggtttattggctcgggaaagtgtttgtcaatcaaggtcagaaggtcgttcatgcattaaaaaaattgctgagtggaattcagcggcactttttaaatatgtgtgtgctctagcaaacaaggaggacaatctttgggtcaaatggattcacaatgtgtatctcaaagaggaagattggtgggattacctagaacctagccatggaagttggtattggaagcaaattggggcacccaaaaatcaagtcaaaagactaactgatgcacatcaattttcccaaaccaggtatagaatcttagttggctctaatctgctttgtcccattcaaaacagggtgtattggtgctatgagatttgggaaagattcaacattcccaaacatagttttattctttggttagcaattcagaatcggcttaagaccaaggaaagattgcagaggtttgagcttgttaatgatgttgtctgcagcctttatttgcagcaggttgagtcaaatgagcatctatttttcagatgcccttattcctattactgagtgtagaaggtaaaggaatggctctcatggagagctcggaccactgatttgtcccagctgctaaagtggattcacaaagccaaaatcagcaagtttaaaaagagagtgatggcagctggtgttgctcatttggtgtactcagtttggtttgcaagaaatgaccaaatcttgaataaacatacagagaatagagatgtaattgtacaaagaattaaaaatagtgtcaagcatagagtagaatcgttttggccaaaaaagattggtcaacaagatagagattggtttcaaaagttgtaaaaagatgttcttggagtcttttgtcaaaaagattctctttcattgtaattgattgtaaatattttgtggattaataataaacttgctgatttatgaaaaaaaaatgctaaaatatagcactacatcacttatttagcactccaatg

SEQ ID NO: 25096 - DNA, 3769 bp, Cannabis sativa
ggtggacgcccaccgatattctacaggacgaagccggacacaaacattgttaacaatcgtaaggaataactgccacagagaaaaatgggtaacttcctctctctcaaatttgtttaaatatataaacttttatcgtagcttttcttgagaaaaagatataaaagatatttttttatagttagttattaaattagttttttttttttttttgatataaaaagtgcccttcttagggtctgtatcagttattggtttctaactacttttcatccctaactaccttcatcttgttcctcttttcaaatttccttgcttgctaaccgttccctccttcctctgttcgtgtttccttcccctctgtttgccactgtcgacttctcccctgcctatccttctggtgtctacatcattgcattcatggatcctttacttaaggatttaaatgctactctttccctcactgatgaggagaaatctacctttaccatccccgattacagtcctgatcccattccacataatccccacagtctcttagcctgagttttgactacacaacatctgtatagacctggttttgtggaacagatgtctggccattagcgcagacgttttcaagttgtaattactgattacaaaggtgaagatggcttgttccatgttaagttcggttgtgaaggaaacaaacatcgggtcctgaataaaaagccatggcattttcagaaccacctcattatccttttcgcgccagatgttctgcaaaatgtctcaatggaaaatctgatgttcacccccttttgggttcaagtttaccgcttacctttcttgagtaagtctaaagtgttggctgaagcgcttggtaacatcattggagagttcatggaagtgtatgatgattccacaaatgaaggatggggtcccttccttcgtatccgtgtcaaactctgtgtttctaagcctttgttgcagggccaaatgattaaacttcctcagattaaggatgaattctggatagattttcgatatgtaaggctccctgaattttgttttgaatgtggtcgcctaggccacccttttgagcgatgtctggcctttatggagcgtatggataatggaaatgatgatgacctcaatatgggccatggatgaaaggggccaaagtgcccaccaataattatgatcgttatagatcggatttccctaaaggcaatgcttggcctttacttactcggttggcacgtaccacactcacttcctctttgccagccttgtccttgagaagtcagccccaaccttcgactatttttgaaggggagtgttctaagcaaccacttattctacataattcaactctgccattgacttcatctcagccttccactcacggtaacagttctatatttacaccatccacttttgtccattcaaacactaattccttccataatcaccattcccttaacccctctagtcaccatagtagtgttactcttggcccaccctcttctctcagtaaccacttccccctacactacacggctcactccactcctcttacttctttttccactcaccctcagccaccaattaacccatctatcccctgttctgaagccatattcaattgcactcccagcattaactctaacgcctcctcacccacacttaccaacaatgccacttctaagcagccgataccctcccctgttactcccaagccaagtcaaaccatttcagacctttcacatatctacatacctacactttcacatcatacttttgctacatacccaccagatgttggccccctctctaataccaaacccgtgcaatcttctttacacccccattccactctagctcattccacttactcgcctgccattatgaccattgacaaagaaaaccagtccccaaacacaacctttaaaaggccaaatgaatctttatccatgagaaaattcttgaagcgatgtcgtaacacccctggatcatcatcttctcaattgtcaggaggaaatgatgttgagttactagtttctgaccttaaggattctagtctctcctttgacttgcaagcagaggttgctgagcagccccgccaatcaccatgaaaatcctcagctggaatgcacggggtttggggaacccgagtgcatttagacaactctgattgcttgtccaacaacaatctccccaagttttgtttctaatggaaactaaattttctgttcattcaatctctcgtgttcaatgctctctcaaattcaataatggcttagaatctcctcgatcgggtcttggtggtggaattatgcttttatggaaggatgatgttgatattgcactcatcaactttggcccaactttttttgattctaacttgacctttgaagggacccacagttttcacctctcttgtttttatggtgcaggagatgttaataacaggccagcctcttggactttgcttaaaaggcttgcggatgttgctccccttaggccatggctcgtcattggcgatttcaatgaaatactctccaataatgacaaatcggggggtgctcttcggaatgaaactcaaatggatgcctttagaaacactttggaccgctgctgcctttttgaaactccttatgatggtgatcatttcacttggtttaagtgccgacacaatgttgaaactattaaagaacgtttggattggtgctttgttaacaatcattgggaaaatatttttccgaagccacaactacaccatctagatttcttcaaatcagatcatcgtgccattgcagcaaccgtttgctcccaagatttttcttccagcaatgaaaaaaggaaaagccggttttgttttgaaaagctttggctgtccgatcctgaatgcagtgaaataatctcctctaattggcttccctcgcatggttcagacccgattactgctgtctgctctaatattaaggtgtgtgctgattctttacaagtttggcattcaaaaaagtttggtaaaatgaagaaacaaatcaagcactatcagacaaaagttgaaaatctgaacaacgttgttgcccgcactcccagccaaattaatgagactcaacaagctaaatctattcttgatgatcttcttgagcaagaagagatttattggcagcagcgttctagagtggaatggttagcatgtggggatcgtaatacaaaaatttttcatgcaaaggccaatgctcgtaagtccaacaataaaatcaaattccttctcaatgatatgggccaaaaagtgttctccaaggatgatattgcttcggtcattcaagattattttcatgatatcttcgcagcctcggatattgatgatattgctctagcatccactctggattgtatccctcctatggtttcagatgaacataattttaatctcaccaaaccttttacgggggctgaagtcaaagaggccttgcaaacaatgggttctgataggagtcccgggattgacggcatgtcggcgatgttttatcagtagaattggtccatagttggtgatctagttgttcgggctgttcttggtattcttaatgatggggctaatcctactgctatcaaccgaaccctcatcaccctcatcccgaaaatgaagaaacctcaacgaatcaaggattaccgcccaattagcttgtgcaacgtcatttcaaagcttgttaccaaaatgcttgtggctagattcaaggaagtcctcctactcgtcatttcggagacacaaagtgcc

SEQ ID NO: 25097 - DNA, 1605 bp, Cannabis sativa
attctcaccattggggacaatgttgaattttaagttgggggagaattaccatattttgtgtatattgccattattatatttgtattgttagttattcaaaaaaaaagtacttttgtgcctgatcaagctattcatgataatatgatggttgagtttgaacttttacactcgctttttaagaagaataatggtacaaggggtttatggcgcttaaattggatatgattaaggcatatgacagggtggagtggagatttttgaggaaaattatgggaaaatttgggttcgatagtcgttagaacaagttgattatgattgtgatacaacgctagagtatacattttttgtgaatgggaggccgagaggttgtgtggttctgtcaaaggggttgaggcaagggtgtccattatcagcatatttgtttcttttttgtgttgaagtgctttcaacgctgcttagacaagctgaattaaggggtgagttggtgggttttcagtgttctcggttagaacctagagtgtctcatttattctttgtagatggtagtttgatttttggaagagctaatggattagattccgctactattcgtagagttctttattgttatgagcatgtctctggacagcaagtcaatttggataaatctgcgactgcattcagcttgaatgttcagccacctaattacactagtgtattgggtatcttaggcttgcatttcatggtaactaatgaaaagtattttggattaccgacggttattaggaagaataagaagaggaactttaagaggatttgcaagaaggttcaaaagtgggtttaagggtggaagagaagtttctttttggcgggtgtatggtaatacttattaaatcaattttgcaagctattctgaattatttgatgagtattttctagttgcctattgctacttgtgataagttacgatcgattatattatagttctaatgggatacgaagagtgacacgaagaagattgcttgagtgaaatagaatacagtttgtcatcccaaatcgagaggattgaggttcaaggatttggagttatttaatcaagcaatggtggccaaacaagtgtggagattattacaggcaccagactcgttgtcaggtcgtgtatcaaaacataaatattttccaatcttgtctatttagaaggctacggataaaaatgggtctttccatctttagtcgagtttgatttggagcctagagcatttaagaaatgggcttagaaagatggttggggatggaagtaatattgtcacttttagagattcgtgatatcctaggccaagaacattttgttctatcacttcaaggccaatggtggatttgttggttaaggattttattgttgttgatggatcttagaacatacccgtattatcttaatttttcttacctttagatatagatgttattcttggtattcctttggcgggtggatgttgcatcgattgatggtgttggcattacaatacaaatgggtgttatgaggttaagagtggatattctctagctttagattatgtgaatgaggagaaagggagtttgtcattgaatttagaagcttggtggaat

SEQ ID NO: 25098 - DNA, 1481 bp, Cannabis sativa
tccgactagtgaatcagaaaatattagatttactgatcataaataatcatcagtttcagcatatgggtatttgtagtattggcttctaatctttgaaggatcagaaggcttagaccaaggatacttcattgatggatcacgtggaaactttctgaagttcaaaaatggtgcccaaagaatcatactgaaaaaaaaaaaccaaaaaaaatctcaatcataacatttatgaagtgaatactttaagtttagattaacctcaaatgtgttaagtttctacttacccaggaaagaagatgaaaacaaacatgaactgtaaataagtctccaagagttttcttttgtagaatcttaacctaagccagttcataattactggctatacagtaaaaacaacacaaaaatttgttatataattcattgaaagagaaagtgtttttaagttaaaataaattgacttactggcataactaggaagtagaaaaagccaacaactccaagttgtattagaacccatgaaagttcttgctcattattaactcctgttactgcaaaagcaggctgttcaacctgcaaaaataattctccataaccatgaatttatattacaaattgttatgtaacaaattgtgtctctgaacatcgaacatcgttacaaatttctccaaattattgactttcgttcaatattactaacagaacatataaagggtacaatttgatatatgaacaatcaacatattagtaaaattgtattggaccaaagtctttgaatcaatctatttcaataattcaaaagatttttaacgtcttaaaaagttcgaaagtataatttagtacatataaaagtttgacctgctaaaataattcccataaactatacatattacaaattgttatgtattaaattgtgtctctgaaagttgttaaaaatttcacaaacttattgagattgttggattcaaaatttccgtccaatatcactaacaaaatagtcagatgtcacaatttaatatatgtcaaattagtaaaattgaacagacaaaagtctttaaatccaactatctcaacttttcggataaattttttaacatcataaaaagttcataatttagtacctatcaaaattcaaaattcgtatcaaatatatattatatgattcgtggcttacagtggccaaaattgctgcaacttgtagaggcaaactagattttttgagctgaaaatactcaattggcttttgaataatgcttcttattctctgcaacaaaaagggtcaaacctttttctttttcttttcatctttacaattatatagaatcaatcacaaaaaagctgaaaaagaaagaaaagattgtaccttttgattgagatgattagttaaggatgaagagttgtgtttagaattaataaagagaggattttttctactctgagaagaagaggtgagtggaggcagagccttggggatatggaagctgaaa

SEQ ID NO: 25099 - DNA, 2423 bp, Cannabis sativa
ttacttacctaaacacacattgacattgacacaaaaatgagattgacattgacaaacaacaacaacaaacataattgtgttatgttttttgttgttcatacaaatctttctctctctctcactcaaaacatttttgtaaagttgtagcattattattattattattactattggcaaattcaatttcagttgttagttgttgcgttgcaagaggatcatgttttgtttatttataaatatcaaattttcatatacatatatagtaaccacatttctaggaagagcaacactcccactcccattcttttcttgtttgtatttggaataatttatttaattaggaatacaaaaacagagaaagtcaaaaaggaaataagaaaagaaggaaaagtaaagaaataaagggtggtttggttcggttgtctattattattattatatagttgatatttattaaagactaattagcagttaaattctcttatttttaaatttttatactctattttatttttttagtaatattctcttaagtttattttttttttataaatttaaagtgttactttaatatcaatattaaatactatctaaaaaacaaataaagaaagttaagtgtaaaaaattaaaatagatttggctgtaaataacccattattaaaagaattgaaatattgggttaggctgtaggcaggcatgtgttgtgggacatattacattttattattatgattattataagtataggatatataatataggggttattattattaattagggaatcctaatatgtaatgttttgttttttctttggccatagccacaatctccgcattttcttcggtctaatctcataattataataataataataattaataatagattaacaaatacttgcttttggattttgggtggattttcttgtctgattcctactactctaattaatatttaatttaattcattattaataatataaaactactaatatttcccatttcccaacttgtttttttatttttctttttttttttaatgcatcctcatcaatgtaaaatgtgacttccacgactcttaaaatcaaagcgtgtagagtagagttaagacttaaatagtagaagtaataattagaaaaaagctaaaaggtaccgatagtttttagtatatttttatgtgtcaatatcgctataaatttacttaagtatcaagtcttatatagtttaatatattaacttttaaggaatattattagccaattataaagcgatatgtttaaaggtgttaaacaccattgatgctcaatagcaatactctaacaattaggatatagaattgaaaatttatttagtggacaccataaatgatcattttgatagactatttatctgtttcgacgtttatattttttttagtttttatgatcacgtacggtataactatctaagactacttataaatttatagaaaattttgaataatttacaatgatgaaaataagatttaaacagttatttactacgcgtctaagaaaaaatgatagcgcatacaataaaaaaaatcttattttcggtattgtaaactatttagaattttctgaaatttacaggtggtcctaaataactaaacatacacgatcatgaaaaagagaaaataactaaaaggttttctttagggatgtttgcggtgcgagtggtggggttgtaacattttttcaaaccaaactgcatatgctgtttttgtaatttctcaaatcgcaatcgcaccgcgagatcttaaaactgccactgtgaaaatacaatgtggtgcagtgcgatttgaatggtttacactatcatcattatcaaacattatattgaaaaatttaaaaattaatctaataaaatttgaacaatacaatatatattattaaaattttaacatcataacatttattaatcatcaattcattatattgaagtgtctctaaaaaataatgtaatagacacatatattacatatatttaattttttatgaaaaaattaaaaattatatgtaaaaattaacaaatttgtaatacatagtgcggtgtgattgtaattattaaatttaaaattgcaaattgtaccacattgtagagtttggtaaacatgcaaactataactccaccgcaaaaaattttaaatcatatttttatacagtataatatgatattaaccgtttatttaatgtaagcgatttaataaacacttctaattttgaaaatctatcaaaaactctttttcagagggtgttatgtagacttagtatttatcaaaaaaaaaaataaataaaaatataatacattatacaaaattccgtagttttggaaatttgaggtataattatcccaaagaaaatgagctccaagtacaaatggtgggctatctagaaacttcaa

SEQ ID NO: 25100 - DNA, 1341 bp, Cannabis sativa
tgccaatttcttgtcatgccaaaaagcccgatcctaatgtacaactttacacttgacatccaaatgtacattgtattttaaaatacaatataattactgtagtctgtacagtgtaattactaccctaataattgtactttatagatagtaattacatagttgcttccaaacgcactcttatgatgcattttggaaagccaagaaagaattggaattaggtataattgaagataattatataactttgtgtatttttactattgtatttccttttatatcattgatttaattttttattcttttagttatatttttatataaataaagtttcactccattgcaataaattactaaaaaaaatctaataatctacttcttttctttttcttattttttaatatattcataataattttataatatttatttattaaatattatttttattaacaaaaaatattttttaaattatacattcattgtaaaaaaaagtatgtatactttatttaattctgtaatgcatcaaacatgtatagtactaatataattcagttcaaccatttgaggctagctcaagtggccatatggagtgcgtatgtattggaggtcctgggttcgagtcccaaattatgctgatgtaatatataaacgcttaaataaaaaaaaaatataattcagttcacttcaattcaattcaagagattcagtataccaaagggacttatgtatttgtgctcttttcttttcttctttcggtaaggttgtgctcctaaatctttgatacatttttcatttaaaaaaaaaaaaaaaaaatcattgaatatcattcataatctataccattgaaacgataattgatcctaaaaaaactagttgttactcaaaaatagtaagtgaaaacaaattgtcaaaaaatatataaataaaaattgtcgcgattaagtaaattatattaaaaaattataatttttatcactaaatacttttagcacaattattttttagtgaacacattaatgataacgatttgttcttacaataaaaggaaagggaaatatacaaatggagctggatccaagctcatggactcaagatcaagcttcatctgattttgccacaaactcaactgttttcttgcttattgatctaaatatatattaatttaagtatatgttacgataatgataatgattatttaacagcaactctaataaaaggttccatgtatattacagttctctttaaaaggccaaaatataaggcaatgtaatatatcaaatgttaataatggattagtagaaggcacataaatataaaatgacaataaactataacttcatt

SEQ ID NO: 25101 - DNA, 2180 bp, Cannabis sativa
  modified_base (2135)..(2135): a, c, t, g, unknown or other
acaaatttcataacactaacaacacaattttgtaataaaaatggtacctttattccagaagaaaactcataacaaacttcagaatcatcctatataagagtgaaagaaaattctcattaaggaaacattacaatataacaacaaaaattcaatcttttttttccttaaaaaacaaaacctttgtataaaaatatcaactttaacaaaaaaaaaatacctgaaaaaagttattattttgagtagatctgaaggaattccattcctcattagcttgaatccattggtattttccattcaaagcagtttgaccaataattctacattgacacatttaatttatttataagaaaaatgtataattaattaattgaataattaaaaaaaaaaaagtttaggatcatacccttctccaagcatatggatttttagaagcatattttcaatgactgcaccaacttggtcctcaaagtaagcatcttcaagggacaacaacctaagacaattcaaaagaacataaattattcatagaattagctaaattaatattgacaatatatgttattttcttaataaagcttgtttttttataatgttaattaactgaaatttcacaaaactttacaaaaatgcagattaagaaaagaaaatcaacattaacttttcttctctttctctcttaataagaaaatgtttttaagagaacacaaatctcaaatgtgactgattttttttttttttttaaagttggagaattgatgaacaaaagaacaaaaggaatatgttgtaaaagaagaaaagacaaaataaacattaaaaaaaaaaaacacttacatgggatttctttggtcaaaacaccaaaaaacaccataagaccaaccattactaacacaaagattcttgagtgttcttctaagtactgaactgttctcagcttcacccatttttcaccaactatgaactatgaaattaaaaattaattaaaaaaaataataataacaaaactacaaagctcactactccaaacccataaaacgacaccgtttaagccaaacccaaccaaactaagagaactgataatttgataaagtctcttacccacaaaccaaaatgacacaaactcaaaacccaactctctttttttgttttgattaataaaatatgaaactttcttctcaaaaccccaaaaaaaaaaagaaacccagaagaagaagaagaagaaagtttaagtctttggctttaatggagttaaaaacagaaggtgacagttgaaagaatctgaatgaagaacaaaagctgagttttttatttataaaaactcagagtgtttgtaagaaaaagaaaaattaggaacagaaaaaaagtggtcggtgagagaaagtgatataactatgtaatgtattaaaaccatgtttataaattatatatatatacttacaaaaaacaggtttttttatttatttttttattttttggaaaatgaaaaaaaaaatcccataaatgtaaatgatttgtcttcaaaaacccacaaaatctaaaagaaaaaaaaaaaacaaaattgtgataagactccgaagttggaggggaacactaagatcttaagcatttactatgttaatatctttgtctttggacttgcaaggccaatggtccccatttttttttttggaggggacaactttcggtttggtttaccggtaatagccggtaattatagttggttttttttttttttggtggtaagtgaaatttgagaaagtaaaattagtgtattggaaatttataatgatttaatgtgaaaaatatatagttggtgatttggaactttaatagtgtgatattttgtggatttgtgttaatttgtgatgaagatttagatggatattaaagttagagaaaatctagggttatttttccttctacaaacaaaataataataaaaaaatctaggggattgatttacatatatagatatagataaatgaaaaatatgttgtgttatatagtttgtttagtaaatggtaatggaaattggaatagagaaatcataatttgaattatgttgtttatataaattactaattggtaataaaaaaatgaaaacttacaaaaatattggaatttgggttaacttttanaaaaatactgtcacatggaaattttttcaaaaatattgtgttttt

SEQ ID NO: 25102 - DNA, 4501 bp, Cannabis sativa
agagagatatggatatgaattcagttgatgaagaattggaaaaccctaattccaacaccatggaatcatcagaacatgatgatcaaaactccaatattggtgatcaacatcttcacctcatgaacccacaacaacaaccaccactaccaccaccagctacttcaggttcaggttcgggttcggggtcaggttcgagtaggtacgagaaccaaaaaagaagggattgcaacactttcggacagtacctaaggaaccaccggccgccgctatctttaagccggtgcagcggagctcacgttctcgaattcctccgttacttggatcaattcggtaagacaaaagtccacactaatctctgtccctttttcgggcacccgaatcccccaggtccatgcccctgcccgctgaggcaggcatggggcagcctagatgccctgatagggcgtcttagggcagcttttgaggagcatgggggaaaacccgaggcgaaccctttcggggctcgggcagttaggctttacttgcgtgaagttagggattctcaatctaaggcaagaggagttagttatgagaagaagaagaaacggaaaaggccacctcaccaaaatgctgccactactactactgctcagctaataatctcaaccaatgaaacgatgtcgtttggtggtactgatgataataataataataatattattattaatgataatgatgataatattagtgctgctcattctgtttctaccgatgatcataatattattgagtaacacataattattattatattattatcattatcatgtagtaattttggatttaattataaactctctctcattttcttattttatatttgttttaacattaagttttgattatatatgttatgttttatatatataataagtataatatatgaaatttaaatattttacaattcaacctcttaaaatagatttactgatttattttttatccgttttggtatgtgggagaaatttttattacaattttttgatggtcttaggatattttgtaaaattttaaaaaattaacacatttgaaaagtctcatgcatgtttaacagattatttaaattcagctcaattctctgatgctaaacaaatatatatgagatatattattatatagagcattgtttaagaccatagagatatggtgcagtgtgagtgattagggaggaactgatattgaattgaatgcacatagtagtgataaactgaactgaactgaagtgatcaatacatatatatatacataatgtatttatgtatgtatctaaatagttttagatatagagaaagagagaggggaggagagattgaaaagtcttactttttgatgacaagtgatagattttgcagatcatgttgtgtgtcttttattttatatataattattcttttttctcgttatttgttctataaattcttagtggggttctagtgttggcacatcattcagatatatcattattcattactacatataatgttaaaacttcttttttttaaaaaaaaaaattactatatatatattgagcctgttgtcagatttgtctctgcattattattattgtacttacatatttatttatattatatatagtgaatcatgaatcaatgtatgtttgtatatttttggctattattcctatactaatatttatatttttggttacatatagtgtgcatatatataatatatattttatatatggacattaagtgtatgtatgtaagctgtgaagtactacaacaaataaatttatggccacaatatgttttaactatatataagtttaatttgtttataaatgtacttaatttgtatatactaagttcgatatgatatactttggctttctaattaactattagattaattaaatcttgattgaatgtatactttctgcaagtatatatagctcgattatacttgatacaatatgtaatactagttgagattgttgtaaagctacagaaatcccaactagtactactcccgtacaaattaatcatgttagctagggaatagacaattttaaattgaatgtaaagatttcactaactatgtataaatatatatatatatatatatatattgagtatattttagttaattttttaagacctgatcattaatcctgagctactatcatttggtagctcatactacttggtacaacatgtgatacgtactagttgggattgttgcaaagctacaacaataatctctacactactcccatacaaccaacttcgggaataaatgtaaagattatattaatttatatattattttgttggatgattatatctctaatagtgttaactatatcttcagaagatcgaagctagcacacaataatttattgcccatatagttaagttattatacatatattttattttgataatataaacgcacatttggaatacatgattatgtataattatatgtgtatatagtatatatatagcagcttgctgttaagtattagtacgtacttgatcaaatttctgtagaggttatgggattattgtgaaaatagtatgatggaattgggtgtatactcgtttaatttggttaatatgtatatcatcatcagtaattaatttagtcatgataatatgatatttatatattatatttttggaaaaattacaagtaaaggtgcataattaaactaacaaactttaaataattaaacaattaataacaagattaacaaaatcacgaacaataatcaaaaaacaacgataaacaaggatataaggaaaaactagaaaacaaataaggcagaaaataaagaaatcaatacaaaaatatatattggttcaagtctaatatatcgatgtaatttatgactctattccagtttctagttctcttatgagttctctcaaagtatttcaactctcatactctaacccaattttttttttttcatttacagaaaattcttcttataaaactcaaactcaatctctcttttctctgtacctctatctctctacctctcaatctttttctctctatatctttctctcaatatcaacatgatccatttattatttgaaaagagatcaaaattctaaaattggtggttgcaagaattgaagttgttaagttaactagttagaaataactaactttaaccaactctcctttgagcaatgtctccacgtcagtgtaagtaagagtgcatcctggagcaagtataaggacttccgaaaatacagaccaaggcactcgctgaatgacattgccagataggaaagagccaactagaattgactatctggaactaccttccaagatgaacagctagtcattcgtaattcctttctagaagaaaacatactttcctaaaaattcgtctaagaagaacaaaaaatgccttttaagaacagtttttgcgagtcaaacaattttctaaaaataatattttagaaacctttttatttgaagaaattatatcacaatattaattataagattaaggttggacatttccttatgtatgtagatctttgtctatagctagctagttcattattaattagcattataatttgtcgatccatccattgttgcaatcaaattaattaattaattaattagattgcatatattggaatgatcattagaaaatttcaatgatatcctaattaagatactatatatataatatataattggcccacacacacatatacacatacactataataattaacaccttaatcacattcatttaatttgtatatattatgttacgtacgtgcaatacataagttcttatgttattaattactgtaattttattttaattaagaaaattataaaaactattacaattaatatgtaatcagatccattgctaattaagaaacgcgatttcccaaggaaaataaggtaataaatcattttatataattggccgacacgatcgccatttttctcaatgaaatatgaataatattgtttttcatcactttcatttttaaaagaccaattataatttaatgatctatatctcacaaaatataacattgatgattttcaatataaatataaataagtaatgcaaatataaaatatagttcactttgtaaaaataaaatctactcttatagtgtaataaaagtaatccaaaaatttagatcacaatatatacatagtataaaatatacatcacaataaatattatgttttatatttttattattatgttatttttaatattttattattaaattttagttaatatattctttatactaaatgatttgtattattattattattattatatttaattagttttgcatatataataatgaaagtaattaaattaattcaaattaattattatttgcatatgttatatataattaactagatgattaactatagcttgatggcatggcaaatcgctattgatgtattttaatatcaagttttatga

SEQ ID NO: 25103 - DNA, 5103 bp, Cannabis sativa
aaaaacctgaggtatcaggtgttacaggctggtgcttgtcttcttgaatgatggaataggcactcttcacagtgtagtgtcccaagttttcattcttccaataccaaatatccaactctgtagcttgaatggggatgctgagaattaagttaatatctctctcattgaaaatgtcatgaagtatatccatatcccattgatcttgctatgtagtcattagttgggatacctttttgtcaacaagagagtcactaatagtgtgcacataagggtctgaagcatcggacaaccatgggtcattgagaatacttactgatgcaccagatcctacttgaattgcagcaccttttttaattaacagttgtgcttccataatgcttctccacacaaagcttgggttcccacctatctcagctgaaagaaaagagccattggggtaatacttggctttaaacactcggttgacaagagattgaggttgtatcatcaacctccatccttgttttcccaagggagacacattaaaatcatagagattacgaaagcctaaccctcctttcagttttggcttacacatacgatcccaactcatccaatggatatttttatccttttttggaagaagaactccaccagtatttgcacatagcacgctccatttccttgcttgtttcaattggtagcaaaaagacactcattgcatagttaggagggcttggactatagttttcagcaatatctctttacatgcctttgatagtagttttccatcccaagactgaatacgcttctgcactttctccttcaagaaccccagaattgctgaccttttcctacctattatgtttgggaggcctaagtaagtaccattatcatcagcctcatgaatacccatatcaccacaaatggcgtctctagtatgaacatcagtatagcggctaaaaaaagattgatgacttgtcattgtttatcttttgaccagaagcttgctcaaacacattcagcaaggatagaacattggtagcttctctctcattggctctccaaaaaaatatagatgtcatctacaaagaacatgtgagagacaactagatccccacgaacaatttgaatgcctcttaactgctgtctatgctcataatgctttagtaatgccgagaagccttctatgcaaataatgaacagataagaagacaatggatcgccttgacgtaatcctctcccagaaataatagagccaaataaacggccagcatgagcaatctggtatttagctgaagtgacacatttcataaggagagaagtggtatgattatcaaaccccattttgatgagaatagcctgtaaatagccccattccactctatcgtatgctttactcatatcaagtttgagggccataacaccatttcttcctgcattttttctcttcatgtaatgtattatctcaaaagcaaccgtaatgttatcggtaatcaaacggttaaatatgaacgcactttgagtttcagaaataacctgattaagaaccgacttaattctattggcaagcaccttagagatgattttataaagtacattacccaaagagatgggctgaatttcagtcatcgaagtaggctgtttcttcttgggtacaaagacaatattagtgtcaggcaattgatctagaaaagttccattctgaaaaaaatctctaaccaactgaaccacatcatgtcgcacaacatcccagaatttttgatagaatcccgaactcatgccgtcagtccccgcggacttgttagggtgcatctggaacaaggcttttttgacttcacactcctcaacatgtgccaatattaacgagtattgtagtggggtaatagttgttggaatacaatctatcacctaattccaatttgtaacaaagggggtaaaaagttgttgaaaatagccaaccattacatcttgaagaccattatcccaactaaccatgatgcctggatcatcacgaagagagttaatttggttgttgtgttttcttgttttggtagcagcatgaaagtatttagagttgtgatcaccttcctttagccataattgctttgatctctgtctccaaaatatctccttctgagtaagcatctcagcaagcctttcattttcctcttaatacctctttgtcgaatttgcatcacgctggccttttaaaagcttaattatttttttacactgagaaatccttgacttaaagttgccagtaatctctcttccccaatcagctaacactacaaaacacttggttatttttgctgcaaatggtaaatcgtgatacagtagccatacgtcttcaactaacttcctacacataggctctcggagccaggcattttcgaatttgaagctggaagtcgatggttgttaaagttgtataacaggggcaaggagaatcggacaatggtttgaggtagaaacttcaagattggtgagctttgcattatgaaacttatctagccttggagtgacaagagctcgatcaagcttgatctcaacccaattttcagtaccttttcctctctcccaagtgaacttgtaaccttccatctccatgtcaatgagatcacagctagccaacacattttggaaaccttcaatgagccaatttggatacggtcttcccccttttttatcactttggcaagttacattgttcatgtctcctatgagacaccacggaagattgattgtagttgcaagatcactggtgagcttccaagtgagcttccgtttagaccgatttggttccccatagagtcctatgagacgaaattgaggccattcggaggtagatataatcatatcaatatggtttgtgctgaaagtttttacttccacctcctccttatttctccaaagaacagcaagcccaccactatgtccctgacttcccccagtgaaagaaccctaaaaaccaatagcaattttcaatttatccaccttttctttttgacaaagtgtttcacaaaaaaaataaagttgggtttcttttggataataatatcctttaggaattgaacggtccacgtggttccaagcccacgacaattccagcttaaaatactcataattcttggcgggtccgtgattcggagccctccccattcgagtttttttgcccaatgttatcaataggatccatgttacccacttcttcctcatttgatccaaggcccacttcagtttcaacacacatggcaacaatctggcccaagtcattttcagtcctttttttagactcaacaataagcattcctttttttggaagtggctgattgttagccaattcatcaatcacatgttgtagtgagttattaagttgactattcccaccatcaatgttagtgtagaggctatcagtaatttctaaagagtgtgaatcactataaatttgtaattgtgaggctattgtgagatatggaatgagtaaatagaattttggttcaattggagtttgacactgactcaaagagtgcattttagataatagtcctcttccagaagaagggttggtagcctctcttataactcttagcatctcttaatgtccattgttggaagaaaagtgtaagaaggagaaaggagaatattgacaagattgctcacattctctctatttcaattgctgaagaacaagtccaactactttctggataaatccaaccaatttccatcaggtatatcttctctcaaattgaatgacagactcttatacaagattatcccattagtctttaagataaatcctttattttaatgcaattgcaacacactgtgaagccttgccattttagattatgaagaattcaatgtgcaaggacctactttcttccctaactcaaacacagtccacattgttttgtttgtacatttgctatagattccttgaagtttttctaagctcccagataagatttattaaaattccttggagaatattttagctacaaattctaaagtttaccatttgatttgatgaaaacactttcaagtcattttagcttctttatataatagtctgcacataaattgcctgctcagcttagatggatgtcaatacacatttaagtacagaattaagtatagctatagtgctatagaaaaaaagagcttgctgataatagcattagagatggagattctctttctcattgctttatgaaaaacagaaaacatcacagttagttttgttttgtttcagaagaaaccatgatgcaacacacaactacaagaagagaagtcttaaacattttaatgtaatatttttcatgtattattaataagagaaaagaaggattaaattttgacagcaacagcataacttctatacaagaatgagtacttcaccgatcgaaatactgttgcctccaatccaaacggacgtatagagaacgatcaccagcaaaactgatgaaaagatgattacttagacattcttaatgacacccttgcttggtaattgtgatgataaaataactgtagctctgtttaaattaaaccttaagcttttcgtgcagtctatgcaatagagttgaaaagtaatgatgatgggaaaaggaatgtgttatgttttttgtactaaattttgcaataggttttcctatataaaagtaactttgctattttatacttacaaacttgaagacttgactaccagacaacataataattttacttacaattccaattcttcctcataatcggtatgaaaaggctacctgaggtttgctttagaactcagtcagtccacttcggcagtggctctactgtttatgtttatgataatctcaatttcactaaagttcggacaatatgtaaagttaggaaacacaacaaataacaacaaggtgtgattttggtattctagaacaaaaatttaatgatcaacgactatcatataacatttgaaatataataaatccataatcaaaatttaagattaacagtagtaccactaccaaaaaaaaaaaaagagaccccaaaactaaattcaagttctttcataaaaaaataagttgctaaaaatacatgattgattaggcctcaactctctcaggtgcctca

SEQ ID NO: 25104 - DNA, 1837 bp, Cannabis sativa
taacctctttgcccatcttgcgagcctggcagaacccacatatccaatcttcttctggaacctccttcaatggcggcttcagacatttcaaatggaacccacctaaacaatcatcacactcgatcatcactgccctccccgacttaaagcacaccctgcactcctccacttcagggtcgtcatcgtctgaactcgcatcctctctcctcctgacatacacatcatcccccacctcaaattcacccccatcatacacaaccttcttgtaataaactcgtttattcgataatgccccacccttcttccttccaaatttcttatcttttgaatgcgtagctctagtaatcaccgttcttccattcctcactttcctctttcttgattccggctgctctggcgatgccggagataacaaaacttcttccacatgagttggatttttcccctctttgcgagtacgtttctcgctctttttctcagagttcagggcttttttcacatctggggtttcgggaactacaacgtttcgattcctcttccctctaatggaatcttcaggataatcaagggacttccgaattgtctttccatcggcggctccctccccatttctcaaatttcttggagttttcttcgctgaactatggatgggcctctcatctatatcaatacccttcagtggagtttgaatttcagaatcgaagttgagagaagtccggcgagtcgagcgtcgaagaccgggagtggaagttgccggagttgaaggagtgagcgtggacttggaattgaaacaaggagagttggtggatctcctcggggaatggagggcggttgttctgggagccttggccatggatttagggatagatcagcggagaagctgtttagggttagagcagacatggcaagttgatttgtcttgaaggagacacgaatttggcgggaaatgtttccctcctaattttattattattaatattttatttttgtaacaattaattatttgtaattattatatcctataattattgaagaaattatttttattttattttttaaagatattaaaaatttacacatcatataaaaatacaatattttattttatctctcttgcacattatttttggcactcttacttataaaaacactccaatgtatagcactctttaaaaatactataattatgatctcctacattattacttaatatatatcttaattttttagttaaaataactttttaacttcaaatttttatcaaaaaaaataaataaatagcatcaatgccacaacatagcatccatgcaaatctttagaatgggatcattttctctctaatggtataacatctcaatattttgccacataatatgtccacctgaccaagcatcctttaaaattttacgagatgctcttagtgaaacattaaattgatacgagtttagaaggtacaagtatgattaggtacaaaaaaagaaataattacacaaggtactattttttgtaaaaaaaaaatatacatttctatatttatagattttttttatatattttttacggtttgtcataaaaacagcacaaaacaacaagaaaattacataaaaataaaatgaaaatagcatctaaatgttgacggtgagaacttgtcaactaagggtcagtttggcacaattgtgttgtgggaaaaagcagttgttgctgtgctgtgagaaaaagcagctgcagcagacctgtagaaaaaggctgagctaagtgtttggtaaattataaatttcaaagtattgtgagttgttaagatctattataatgttaatgataatgttataatctagtt

SEQ ID NO: 25105 - DNA, 1029 bp, Cannabis sativa
aaaaaaaaaaaaaaaaacatcaacattattaaatatcagttaaaattctgatattgttgaaagatggaatggattctaaacttttaggtttgagaaatactgcagcaaattagtatgatattcagacaagtatctcaattcaatataatgcctttacatacttgaattatgtaaacctctagtagaaaatttaacttggaacactacacaatcctcattcatttacaaacttgaaatcatgatgcctcgcctaaaaaacaagctgcgaaaagctaaggcggcctcggaaactactcttcatcagatgaacaagtgtttgaattctccattggatagttgacaaagccgattgtagttttgtgtgtctgtcaacagagcagaaaaacaaaaacaaaatcgtcttttgagaatctaaacaaagtagtcgaaataataacactttcacacagttgtagaccaaaatttcacagtccaactacttactaaccaataaagtactaagtataacataagaagttaaattatcaagtcatctaatcatttaaagaaaaatattaaactgattttggtactgcaacattcacacacacacacacactcttccatttctaagaggcaaagcataattaagaactagcaaagatagtctagcccaatgcatcaacagtccatagcagagactcttaaacttttcataacagagtaatatttcgaaagagcttgaacactagatggtagaaaactaggaaaccatcccaaccactgactacactaacgagcgatattcgcttccctttgggtaatggcaatcctaagcactagtgagaatgaatggagtcttgacaggtttccatatcgaacatcggcctagaaaactcgagtttgatccagtccctcaataggtctaagattagaacaaggacacttgaactcctcaaaacatagagcgacatttatgacacccgaactctaaaaagatggacggcaaacaaccagaaaaacgtcccaacggcaaccactacaccaggg

SEQ ID NO: 25106 - DNA, 6296 bp, Cannabis sativa
tggattggattattggttaagttagtgttgtttaccctttgccattggctgttggatcttttggtggacacccaacccaaccttatataatatatataactttatgaaaagatgcttagctagcttcggtttgtttttacaatgagacaagaagtgctcctattcacccttaaatctatgacatgaaaaagttgttgtataggttagcctgagccaacacatatgaagacacgaaaacatacatataaattcgatatctatgacagttgagattttttggctgtacttaattgtttcttttcgctgccataatttctctgtattggcaattcatgtctgctatgatgctccacactactacaatgtcctctcgtatctttcaagggttattaggccaattcagatatggaagtgttaataagtggggctaaatgagagtcataaaatcatatttcatagagagctaaattaatttattcttacgtatattattgaaaatagttatacattgctaatgtgtggaaaactaatgtcatatataaaaaaaatatgagttacttctttcgatgaaaatttatgcaacttgattctaaattataatattgtattagagaaattaaaaaatttatgttatctccgcttttgaccttcataccccttttgacctgtttcaaaaaattcacaaatttctcaattcgatcttgtgggatcttttcaaatatcacgtttggccatgtggtcttttaaaagtcgttcattatacttatactttccagtgagggtgtattagaaataatgtcacattcgacactgtggcttcttaaaggtcgttcgttatacctacactttctagtgagagtgtattagaaatagtcctatattgtaaatttgtggaaagatggtgccatatataagaaggatacgttactattctcatagccaattaattttaagatgaaaccctatgcacattcacatactataaattttctatttttttttttatatattaaaactttaagtaaaaggtaatttgtaagtagcatgtttccattagagttggacctaggaaaacatctactacatctatatacttgagaacctttatctaagaatatacttggaaccaaacaaattatattctaattaagatgttatataactaaatagaattgcattagaaaaaaaaaattaaaacaaaatatcagtgtaataacgataacaataaacagtcttttatactatatcataataaaatatttttgagtaaatatagtatttatacatgtattataatttgaaagaaaattattaattttacataaataaatttataaattatatatattttattaagatataattattcttatatgaggtatactttttcaatacgtgactttgaaaatgtataactaattataatttagtggttattcttatttatataactgacccaaattgaggcttaatttttagatttttttcatgtatatacaaaaaaagcaactatattgccaaaatacagttggtcagccctttaaatatttatacatcccacaaactaaatattaataataccttttcttctaaaccttcagccgtacaaagtaaaaaaaaactcacctacgcaagcttcgatcgatcaacccagcaagccaaccgaaacgaaaccaaaccagggagagaaccaccattaattccggtgatttcacttgagaagaagaccaaaatcaatccaaacacatgttgtttcgtattgatgaaaaaaaaagtgcagaaaaattggttcgaaactaaaattcaacctaaaattatgatttaattcgtagaaaattaatcttcctaatatcaattttcagattcataaaatgtagacctgtctgaaatagatctggagttcctgatcaatctaaatcaggtataaacaaaaaaaaaatgtatcaatacactagctaatgtttctcccgttgcattaacgttgttttctagatttctattggtggatttattcatatcaaatcacgaataacaaagaaaatttgaattcatctagagccacgtacatagaaacattgttctagtttttaagtttctgcgtagttgcattgttgttgcattaacattttactacactttgaaactagacatatcgatgattacaaactaataatgatacaatggtttttatgatatttgcaggtatttcatatcgaaaatccaacataaagctctttaaaaaaattataacatagatagttttattaatatattcatttggttattataaagttagtttacagaattctaacagttgtttcttcacataatattattaaggtacaattgattgttgatcagtgtaaaaaaaacactgacaaatattctcatgacgatggccattcaaattttttgtttctagttatatttaagtttattagttgaataatagttgtgatactacaatactattattttttttttaaaaaaaaaacagggctcgaaattagcaatacatgactcgtacaaagaaaactcgattgtggtaagtattgtttatattatatagggcattattagttattttaaagtttaatattagttgcctcacagcaaatataattgtcgcattacagtttcatgacagttatctcataattgacttacaatgcttaaattttcaaattgtgaggaaaaatacgcaaatttgtttctcatattttgcaatggacagtttgatcaagaaaccaattgtgtaaattacgaagctactgaaatacatctcaatcgattgtaaatatgaagaattagtacacaagctgaaataggtgctggaatgcaactaagaaaatactcagctgcaactgaaataccaagtgaaagaagaataccaaccattgaagataaatgatgatccaagcctattcttctacatacaactaaaattaaaagaaccttacttcacaaggtatccattgtgtgaacatggtcaacaacacaacaacaactaacaacacctccttctttgcaatgagcaactcattagttatacgagttccaaaatttttcttattacattgactattctgttgaatcttcaaaagttttttatttctaaaatagagcaatttttaatgcccaagataagtgttaccatgaggactcgaactctgaagaacaaccaaatgaggaaccttatgcaaaatattctagccaactacaccacatactcggatttacaaatgaatcagtcatttaaataataaaaaataatcaatatttttgtatatatatataaaacttataatccttaaagatatttataaatataagaaatatgatttttgcctcctaaaaaaactagtaataagaaaaattaggacaaaacgataaaaaaactaaaagaaacattcagactctcatcaacttggtccttttatttttaaactttagggagggaaatattctcagcaacattaaacttcgacttcttcttaacatggcgacaatcacttttttgggtaggcagaacaaagtctaaatcatcattttcaaacaatggattgtttacctttagatttgtcgacaagagatttaccacacatcagagtgtaataaatcaaagggtgcaacagaataagtagtacttttattgaaaggtaaagcagaaattttgtaagtttacattcactacaatcaaaaatatcatgaggttgcaaattttttaaggttcttttaaaagctagaatttttaaacgagaatctgaaacatgaccaaggtgagagtgcgacaaataaaagttagaagacgaaggagacaaataaaaagaagacaaatcaacattgggagctgcatatactagtaatctcagttcatccaaaatatataatccccctcgcctacggccggtccaaatcagcttctaagactgtggatcttacacatgacatgaagtagaagaaaaagataccgaataatcagaatcacacaattgactaacatatgcaagattcaatgaataattaagaatatgataaacattagaaagtaacaaatttgaactgaaaatagaaccaataccagctaatggtatgggagtaccatctgcagtcatcacaagcataaatgacgtaggactcaaagaaataaaaaaatgtagaatgcgaagacatatggtgtgaaacaccagagtccaaaatccttgtaaaaggtgacatacctgatgtaccggtgggtgtttgacctaccaaagtagagacagacatgacattaggttgagtagcaaggaacttttgaaactgttctgataaagcaacaatatcgtaagagccaggtgaaggaacagttgcagcagtactaaattgtggaggtcgaatttagttgttacactgtggttggttacccatatgaggaggcttggactgatatatctgttgttgtagagcacgatccacaagcttaggacattgagctttacaatgacccttctgtttacgaaagcttcacatatcaatatcaacctttgtgcaaggtttgttctcttgtggaggaaacattacagtaggaggaattgccaaaataaaagaattgggcattgagagaatgtatttccctgactgagacttgagacgaatttcatctgctaacaattcactgactactaaatcaaccgaaggaagcagagaacgatgtaatatatatagaaccacgaagttcctcaaaatcactacgaagagccattaaaaattgaaccaatctttattcctctctacgagcaatatactatgcaaaagcatgtagctttgctgattcagttagtgtcaattgatcccaaagatatgtcattacagaatagaactcttgaatgctcatatctttctattcaatagctctaatatcagtttccaactaaaacttttttgcgaaattagactgtatacagtctcgcaagatggtcacaaaattcttttgctttcacatactttgctaactgggtacccataaattgttcgaccgagttatttatctaggtgagaatttttgaattatctacttcccaattttctaacagatctgcattaccatctgctagtttcctctttgttccagaaatataaccccacatcttttttcatttcaatttttttttcataatataattccaatacgaataattttttccatctaatctcatactgatcgcttgaagagaatcatcttttattggtagctactgtaaaaaaaaaagaacaaattgtaaaaatttctaaatacaaagctgataaaaattcaaaattatactgcaaaatcaatacccaaaaatgcaatgtgaatcaagtaaaaactcgaaaaaatcaatctgcaaaagttgtaattacgcttaagaaatttactctcataaacattatttttatactatgataattatttgtgaagagaagaataaccaataaagaataaaaaaaatagagaaaaattagaatttcgttcaattataaaatcaaaagtaaaataatatatctaataagaaaactttatataaataactaacataaaatattaaaataaacaaaaaaaattaatattaatcctaaataattatttaacaaaaactagtcaaataagttcccttataaaattgtagggtcttaactttattctattccacaccttttgtgggggttgaagagtcatatatcgaacctttacctttccaatttatgtttcagttttcacaataataataataataataataattgtttgtttttttaccacaaactttttattattcctgcgatatttccaaagtttatctatttttcttttaatattcttttttggcaatttcgaccaaggcaaagctataaaatggtcaccaaatttcctttttcttgtctgtttttcttcttatgaaaaaaaaccctttggttgacatgtgctattgaactttaattaattttttttctacatatatatatatataatataaaaaatgtgatgcattgtatgttaaattatatcaacccacagaatctttaaatagatcttaagatcacttgatgacagtgacacagtgcacgctcctcggaagaggacaaaagatattagtacttaaaagtagattaacacttcaattttgaggccttaattatataataaaaaacacactcattcatttgtggacaaactcaataatctattattattattattattattattattattattagtcacaacacaacataataacatatacgttaagttatctaactcattgtttatatataaa

SEQ ID NO: 25107 - DNA, 4375 bp, Cannabis sativa
aaactcatgacaattcttatctgtatgtagccatgtctactatatgagcggggatgcatggaaggaaggaggaatcgatgcaactggtaagcaatccttttgtgactgacttgtactgtttagaggtgttgattgatttgttaagtaccttagtcagttaaaactaaagcttatttgttgtgtgaggcattcttctgcagagaaaagtgcgaccaaagttatcccttcttactattgatgaatatttatttatttttatgttaaatttgttgcgtttttctttttgggctaagttctaacttctgttcatggatttccttctcatatgtaggagccttaatggtgttaactctgaaagttatatcatgtgcaataaactacaatgatgggatgaaaaaagaggaagagttgagtgagactcagaagaaaaaccgattgattaagttaccttcaatcattgaatattttggttactgcctttgttgtggcagccactttgctggtccagtttatgaaatgaaggattaccttgattggacagagagaaaaggggtatgattttgtgatgttcttattctcacattttgtgttctttgtttaaatcattaagccatcctagttagcttatctctgaggaaataattttgtagatttggagcccatcagaaaaaggattgtcaccatctccttatggggcaactcttcgagctctactccaagctgcattttgtatgggtctgtatttgtacctggttccccagtttcctctgtcccgttttacagatccattataccaagaatggggattctggaaacgtttgggctaccaatacatgtctgggtttacagcacgatggaaatattattttatctggtcgctttcagaagcgtccatcattatttctggcctaggatttagtggctggaccgaatcttcaccaccaaagccgaaatgggatcgtgctaagaatgttgatattctaggtgttgagttagcaaagagttcagttcagttgcctcttgtgtggaatatacaagtcagcacctggcttcgtcattgtaagtttccctttgttgaatcttattggttgtggattgatttgtatatctaagattttgatgctattgatgtttaattagtcaacaaaatcttgtgaaattctatctaccacttgatccaacttccatgcattagttactgctaatatttgtaaccttttttttttaacttgtgatttatgagtgaagctgcagatgactctttctgttgtgtagcattaacttgtgcatttttcttgtgttagatgtttatgagagactcgttcagaagggaaagaaaccgggtttctttcagttgctcgcaacacagactgttagcgccgtatggcacgtgagtatttatgttacttaagaatttgtaaaatactggtctagtttttactctttccccacaattatcatgttatatttatgaatgtgttttatgagcatcaccatcttttgtctggattattaaaatagccgttgctggctgttcaattcatctctagttactatttattaatgaaaaatagttaatgtttccataactgccaagcctgtcacctttaatggtgttaaagctcaactattttaatcacacctttgttatttatttatttttcctcagggattgtatcctggctatattatattctttgttcagtccgcattgatgattgctggttcaagaggtatttacaaagcctgcctttttctgcttagtgctttcctcaaatgacttaactctttttttttctgttgcttcttttgcaaccagtcatttacagatggcagcaagctataccgccgaagatgtccctgtttaagaacatacttgtactctttaactttgcttacacccttttggtcctcaactactcttgtgttggtttcatggtgtgtcttctcactttgtcatttcataactatacatatatatatgtctatacataatatttataggaggcttctatgttgggaatatgaaatttgatctactagtagaaactttttctattttctgtacatggataaattttaattttcaattttttatgggcaatgtacattatagggatctctcacaagttggaaaatttcggataatttatggtgtcgaaattagagtgaattctgatgtacattgttgtataaaaaagttgggaatacaatttatttttgtaccaaaaccagaaagaccagtaaataagtcctatcgtataagccctcgttatatattccatatatttacataaaacttaaatttggcagttaacaatataatgtttatttacatgaacagcttatgtacttttaaagtttctaatagatgtgctattctattttcttaaacaggtattaagcctccatgaaactcttgcttcgtacggaagtgtgtactatgtgggaaccattattcccatagcactgatcttacttagttatgtaatcaaaccagctaaggctgccagaccaaagtctcggaaagatgaatgaatgagaatgagaggtcgaaaatccttgtttcttcccttggcagtgtttggaaatgagaataggagaaacaaacaaccactcctctacaagttttttcttttttctttcttttttaacttatgcactaccttttttcgtttttggatctcaaaactgttaaaagttacctgcatatctgatttgaaatggcattaatttacatccaatcaatgcccacctacttactgcttctgtagttatttcttgtttttggaagtttggttgtagattcatcatatcccaccaaagcgtgaagccaaaaaagatggaggttcgattattagtcccttgagtgaattttgatatagctaaagttaattaaaggacttgactatataaacttttgtaagttcaagtattatgattatttaagaacaaaacaaaagttaatcactttattctctctttgactaagtaatcaaaatttgcttacttttttctactgatatagccttactcaaaatttaaacttcgaagatattgtacttttgatgctctttttttttttattttattttttattatttaagtgtgatactcctaaaaatagtattgtaaaaatactaaaatttaatcttcttggaaacactccattttaaaacttgtttgcagattgcatagtatgattttgctaacacactacatattttctctcctcctaattatgctctcttttctctccttttgagagtggattttatggcctttttggccatggaagataccgaaaccctataaatattggagctttcgtactgaacataaggtgttcatgatgattttgtcaaataacaagatatcaacaagaatctctgaaagaacaagaatatatagatatgaaatagcggtatccattgaggcaatggcgtagatgattgaaaacttggaggaattgcaaaagaaagaagggcagtgggggattgctttcacaagatccttcaagaatagcttggggagttgttttatagagtgcttcaccgacacgaagggagctttcctgaagatatctgtcttgaagaataataagataaagatggtgattatactaaaagaagaaagagctaaggggtagttggacttcagaactgtcttaatggggtgacaacaaaaagaagtgtagaaaggagttggtcaaaaaccacaatcatgggtcaatgttgccaagagctcaatgcaattagatatataacaacaggttgggagagtcaatatcccaaaaaatggtagaggggaaaagagagttcatccagtgtgttgctagaagagagtcaaataaactaggttattgggattttttttaccaaaggcaaattcgaatgtcaggccaaggaacttgtttatgcgaaagagaatggaacagaagaatgttcacgaatatctataatgaaacattgtgacagggtttggaacatggttgtgattatgtttagagacaatagcaagagatttcttgaagcgctattttttacaatctctcaagggatattggaagaaaattggtggttagccaaatgtacgatgattgtacaataatttggtgcaggattgaggaagagatggaaagattgttgatgctaaaaagcatggtgatttcaggcacatggatattgtagtttccttcattcggtggtcttcaaaagaacaaagcaaggatttgaaaattgattgtagaggttcctagattggtattgaagggttgcctttacacttatggaacatgaagaccatcaggaagattggtgccatgtgtggtggcctgttagacgttgagaagagatgaaaagtagaaaagatagag

SEQ ID NO: 25108 - DNA, 2122 bp, Cannabis sativa
gaaaatttgaaagatacatttatcattatttttattagttttgacttaatatttattcaagccctcactcaactaaatttctagcttcgtcactggcttttagtataattaaatattgagtctcatatcttaagaaaataatttttaggaatattgctaaccaatcttgtagcgccatttatagaagatgttgaacaccattggtatctaataataatgcttaaaattatatagtgtgtgtgtttattaggcccactttcattattatacacaatatcaaactatattttcattgttgaagtatggttcctagaaaaagacttttacaactacgacttatataaatgcatatatagtcaaaagtttatggacacgcaaaaactaattcatataaaaaaacaaaacatatcatataaatataaaaagctagctataacaaattgaaagaagagtactataaaatacacaaattacaaattttcctttggaatactcctacaaattcatattgataaacaaaattaagtacaagagtgagattataacacaaactaaatggttggaaaaagatcaacaaagcatgttcttagtcaatgaaatttcactcaaacacacagtactgaaaaagagtatcgatcatgtcatttaaattcatgacattgtacaatatattaatacctcaaccaactaaactacaaatatttattgtttataatatacttaattttacttaaataaaagcctaattgaactttttattttttattttggccccaaaaaagtgtgggccctaagtacgggcctaacctgtctatgtttaggactggccctgattaagcccgcgtagccttgtggaggtgtctgcgatagatacagatagatttgaacaaaattaaggtaatattgatgctgccatctttgagcgagagtgatagaaaatttggttttgggtgtgttgctatagaaggtatggccctgggcataggtggactagactcgtgcttagagcacacctagctcagggatccaattttttttccacttttaaaaatatatattttttgctaattttgaaaaataacatattttttcaaaataagaatccaaaaatattttttttcctgcggctcattaaattttagggtcggttcgctaggaatcatatgggttctgattctgagattttagctgtctgttttgaagggacgccagaaatttcgcttgcagaattgagattaggatcaaagaagttttgagttagataaagcaatatagttggtccaacgtgaatgtagttagagtatgacagccttgtgtatgttcaagcaatttaaagttcttgtatttctcaatttggtttgttagttaatcgattgttgttaaatgctttccaacctttttgttaaactctttgctaatgttattgctcattatataacaaaggcataacgttataactcaagacgtctatgggtgaatgaggtttccctttgagtttctttgaatggttcaaaagggttggaaaaggaccatttttaactaactcactatctaaccctagccaatttctccttttgctatataaaaattatatgacaatattcctattaatctttaattcttgtaatatatatggaagcacaatgagatgatgaaacaatatatgtatttatactgtgatgacgtatgcagtgatgcatgtatcatgcatattggtacctctctctaaaccctagttattaataaaaggtaagaggtggccctttatgactgctatttactaaaatatataaacgtgtgtataattgtactgtacatataataaagtgatgaagttagttatttgttttttttttttatggttcccatacaagttgaccttcttctttttctaaattccaattgaatcttgtttactagatctgtccaatttggtcaacgcgtaaactgactcctaattactacttttcatgagttaaagtcacattttggtagagaaatgaggggtaccagtggtgtttagcatcctcttatgtgtcaagatcgttattggtccaattaaatatcgggtcttatataatttaatatagggtaaatgccattttggaccttgtgttttgca

SEQ ID NO: 25109 - DNA, 3027 bp, Cannabis sativa
  modified_base (934)..(936): a, c, t, g, unknown or other
  modified_base (1131)..(1131): a, c, t, g, unknown or other
ggggcgggtatggggtgaatttaagaagcgggtatgggggtgggggagcaatcctcgcacccccgccccgtttacatccctactcatgagttaaatacaacaaaaatgggagtaaactattaccaaataatggggctgaacctctataacatatcgtattcttacttttgcttaatattaattacattctcttcgaatcttattgattccttattgcttttaagactcagtattgttggctaaaagcgaggtcaatattttggtactttcaattttaaataagatttattatttacaataaataataattaattaattctccttaatctcttatttatcttggattaaataattattattttccacttaaataataagattctttctcataatactatttaacaataatgttatatataactaattaatatagttttatcaaataaaactaaatagttaaattatattttaattattcatttcataacataattatacaaaattattattttgctcttaagaattatttctcttaaaaattaattctttctcaattcaccttagaaattatatcttcccctatacattgttgtatagagataatctagagaccgtgaacctatattccaaagctccaataaacacttaattactattgagtctcatcaataaaatattatagcttaataattctattattactctactttaaatatagaattacaatctttgacaatatagaattatatttacagaatttttactagtagtccattgatattattgaggatcatggggttccatatctcaaaactaattggtaatgagtggagtagcccatgttcctatatatggctcaatacttttacatttaattcatgtgggacaatgttctccaatatcctcccttaagatggtggctatttttgctcannnatcttgaatcaccttatcacaagccatgccatttgctcgcttatttttgttcggatagcgtctttgcaccatctggatctcgtgcagctggcttgttagaaatcatcacctcctctaaacttctagaaatttctagttattacatatttgttagttaatttaagacaaaacccattgtaattgccaaagatttgnagaaaagtctagataaatgtaagaaatgactagaaaataattttttagaaatttttagaaacaatagtcactaaatatttctagttttttgggacaagcccaatgctagaattctctagcaaattgaagtggcttcatcaaccaaccatgaggcactataaatagacccttagtctcatggatgtgggtggagaaaaacaagtgaagtattagtgtgtgctaagttatctatacacaagtgtgtgtgtgttcttaataagtgtctaaatataaagtgtccggaaagtgtgagttatacacaagtgtgtagtaaaggtgtctagtgataaaataaaagagtaatagtgtttggtgtattgtggtctaataaaaagtgttcaattcttggtgtaattacttttacaataataaagtaattacgttttcacgtgttgtggtgtccaacatggctaaccatctggataggtgtgaatcgaaagtccactaaggatatagctctgataccatgttgagaatcatggggttctatctcaaaactaattggtaatgagtggagtagctcatgttcctatatatgactcaatacttttacacttaatctatatgggacaatattctccaataggtataatcattacaagtaacttgtcctccaattattaattcataattagagttggtcaaaaatatcgttttacctttataattatatctcttgaatttcttatacactattaattaaatatgaacaatttatctataacttatagatttaaatctaacaattaatactatatatcatgtttctaactgttcatgttattaaattctcaaaataaaagtagtaagaattattcctctccaaaattttcacaagtgaatcgaatacaaacatgagtttatgaatagtactaatattaatagcaatgataaaaacttgacttttctttctaaaaatatatacataaaaaattgatttgtgtggttggaaagttgtcgttagtactagaaattagagaatgaacaaatccatacttttgtgtggtggacaaagctaattaatttcgtatgctattacatcatcatcatttaccttcaaaaatgcactgaatattatccaattttttattattatattttgttaagcttcaatacaattatttcaccactgtgttaacttaaatataataatttatcaaaaaaaaaaaaaaaaaacaaaaactcaacaataataagattaggtcacctgaaccattttttttatggagagtgattctgagatagtgatcaagaacttaaagggtgtcaaatctatttggaaaattgagaactacacaagaaaatgcaagcttctctatacttttatgactagttgtaattttttttttattactaaaacctctaattttacggcctataatatgaccaaatgaacttttgccaacaatgtttccggtacgatagaggttcgaatattatcttttgtaataattatgaggtccgactatttttttctattatataaacgcttttattaaaaaaaatataaaaaaaaaaaaaattaaggtcctttacccagcaaaaagaaaaaagaaaaagtaaaggtccctttttaattaaaaagctcagataattttagtgcgtctaatcttggctatatagtatattattgcagcttctaatcaaacacagctaaagattgaaaacctaaactaaacagtaacaaaataagattatggcagaaatagttaagctttatggtcttagggcaagccgtttcagtaacagaataaacatagctctgcaactcaaaggtgttgaatacaaatactatgaagaagatctgaagaacaagagtgcttccctcatcaaatacaacccaattcacaaaaaagt

SEQ ID NO: 25110 - DNA, 3335 bp, Cannabis sativa
atgagaaactattcttgataattcttttcgtttaacatggtatcagagctagcatgtttctcattcctctttgaaatcaattgatgcttaatcgttcctttctttcttcttcgttgatcatccatggagtcatctccaactctttcctctgcaaccagccagaacagaagtacagctcctggtggctcatcgttcaaccccgttgttttctcacataaactctccaccaagctcgatcatgacaattatctcctttggagaccacaagtgatttctgccattagaggccataaacttcagcaatacatttccgatactttcactcctcctcctcaatttctttctgaacaagaccgaatctctgaaaatatcaaccctgccttcttggactgggatcaacaagatcaactcctgtattcctggctattgtcttccatgactgaaccaatcctaaccagagttgtcaactgtgaaacctctgcaagattgtggtctgttctgtccacatactttgcatctcaaacagaggcgaaaatcgatcaatttaccacagaacttcagaatctcaagaaaggtgctcatactctcaatgagtatcttctcaaggtacgttccctaatcgataaactcaactctgttgggcacaaaacttcatcaaaagaacacattgctgctatttttcgtggtttgccttctccagattacgatacattcgtcatctctgtcaactcaagatctgaacccctcgatgttactgcacttgaagctcttcttttggctcaagaacatcgaatcgaacgcaagaacaaagaactcgactctgcctccattaatcttgcaaactcaaatttcagatctcgaagcaactcaagtcaatcaggaagtaaccattggaacccttatgccaataatcgcccaagcagcaactcatcaaataatcagccttacaggccaccaataccaggaggaagaggcaacaacttcaactcttttggatcgacaggttacccaaataatcaaaaccgtggagctaatcaaaataacaacaagattatttgtcagatctgttctcgaactggtcactatgcgtctaaatgctaccaaaggttcaatccttcttttcctggtcttggttcacaaaatcaagggaatccctcagctatgctagccactgcagacacagtttgtgacgattcctggtaccccgactctggtgcaacacaccactgcacttccaatgaagacaaccttgcacaaaagaatgaatgtcacaccagtgaacaagtgtatatgggcaatggtaatggtctgcctatacagaacattggtacaacccaattcttggcttcagataaatctaccttgctcactctaaataatttgttgcatgttcctcaaattaccaagaatttaattagtgtgtctcaattttctgctgacaatggtgtttatttttaatttcaccctaacttttgctttgttaaggatcagaagacacagaaggtgctgctgcagggttcacttgaagctggattgtatgtgtttccctcactaaatctgccatgtatacctgacagaaaccaaccctgcaacctacatatccctttgaatgcttcctgcaacaatatgcagatcataccaaatcctcattcttgtcacactgttcaagcagctacaacatcaaacaatgactcattgttccaattatggcactctaggctcgggcatcccgcagccaagactgtcaaaaatgtattgaacagttgtaacattcccaatatcaataaaaatttttctgatttctgctcagcttgttgcttaggtaaaattcacaaattccctttcccaaattccactactatctatacccaacctctacaattgatccacacagatctgtggggaccttctcccatgatttcctccaatggatactattattatgttcattttactgatgccttttctcgattcacttgggtctatttactcaaaaacaagtctgatgccattcagactttcatcaattttaagacacaagttgaaaaagaattcggcttaccaattaaaaatttacaatctgactggggtggggaatttcaggctttcacctcttatctcattgaacatggcatccatcatcgtctttcatgccccaccactcatgaacagaatggtgtggctgaaagaaaacacaggcatctcatagaaaccgccttaactcttcttgctcatgcctctctcccactaaaattttgggatgaagctgttagagcatcagccttccttataaatcggcttccatcttctgtcttaaagggagatactcccttacacaaattacacaatatggaacccgattatagcctcctaagagtctttggttgctcttgttttcctaatatccgcccatacaatcgacataagctcagtttcagatccgaggaatgcactttccttgggtacagcattaaacataaaggctataaatgcctctcacctagtggtcgaatatacatctcacgagatgttatattcaacgaatacagctttcccttctctacccattctcacagcaaacaatcaacaccctctatccctcatctcagctctcctaatatacctgtccctgtcatctcaactactcaacccactgccagccaaccacaaactacaaatgaccccccatctgtacctacacagtcacccatacctcatcatagtcctgcatctccacatacaccaccagcaatctcccctgtgattccagcagcagcacctcagcctcctggcaacactcatcacatggtcacaagagcaaaagcaggggtctataaacccaaagtgtatatcagctctaacactccattgaccctacaagaagcaatgaaagatcctaagtggaatggagctatgaatgtggagattgtggcacttaaaaagaatggcacttacacaattgttcctctccctcctggacgaaaagcaatagggtgcaaatgggtatataagatcaaagaaaatgcagatgggagtgtatctaaacttaaagcaaggctggtagcaaaaggctttcatcaagaatatggttttgatttttcagaaaccttcagccccgtagtaaaacccactaccatacgtatcattatcaccattgctctctacaaccattgggacattaaacaacttgatgtgaataatgcctttttgaatggtgacttggtagaagaggtctacatgcaacaacccccgggattcgaagaacaaggtcccaatctagtatgcaaactccacaaagccatctatggcttaaagcaagcaccacgggcttggtt

SEQ ID NO: 25111 - DNA, 2197 bp, Cannabis sativa
tagggttgtaaatattctcaaaataattataagtagagacaaaataggtaccaaatatattaaaacaatagaaattgcaaggagagagagaagggacacacgaaagaggcatacatttgtgtgtaatagaaattgcacacaacgctcctcatatcatatagagtaatgattgatacacgttttacacacaaattgtgcaaatttactaaacacctattgaaagttacataattccacttggaaaagattatattgttgaaagtttatcaatatgttgtgtacagctaacatgtaatgaagtgggtctagcatcacccataacaaatgttattgtataccacacaattttatcttaaatgagatcatgcaacttttcagggatgactaattatacttcgtgagtctcaagtattactcacacatataacgtattaattagacctaatgtactatattttttggataaataaggtttgatttaaatgtactatactttttgaatacatacaataattagaaatcacagtatctaacaccacatgagataacatattatgtctagttgaatttaaaaccgaattccagtaattataattttacaagtaatgttgagcataatcaccatcaactacaaacaagatggcatcttatatggttcagcctttaaaaaacactcctttattttttagcatctcttaaattataaataagacttaaatccgattttaaatccaaccactcataagatacaatcacaggcattattaggcactttaagatatgcattaatcttcatgttatagagtactataacaaagaagttgagctattgtttattttgacaatttgttgaaaaatatttattccttttgtttgtaataagaaaaactaaaaatcaaagaacagcgtagtgaacaaagggaaagacacattcagaaaagaaaagaaaaagatcaaagagaaagtgagaaagaggaaggaagcagagaggtacctgacttcagggttagtgcatatgtttctcacgagttgcataccacagataccaacagctactcccaccgccgcgaacagtggatacacctaatcaaatccccaaactcaaccatcattaaattatacattctaaattaatcccccaaaaaaatcataatatctttatttgtttgaataaaattaaaaataaatgaccattcgatttacaaaaacataaacaagtgaattatagatctaaaagtcggagactaagagaccatcgtcagatccagaagcagtgaatcaatgtatataatactcatattcttaagattaatctagtattatatattgtttgttaatctagataaagaaagtagtacctcaggtcttaaccatctgttgacggtggaggaagccattccggtaaatgtaagaagagatcggcgagagaagaaattaagaaatcgagaggcttttcctatggttctgtatttatagtgggaagaagaaaaagagaaacaaaggtgtgaaaaagtgtgtttgtgtttacacctaataagtcgtgtttggcagcgtagattttgagagatttttaactctatatatgcgttgtaaagtcaaataaaacaagactcccaacaaacatgccgctaatctatgctcagctgtactacccaataaaatttcatctttttttagaaaaataataataaataaataaaaatccttgctttcaaaattcaaagtacggcctttttttgcgttgtttgtaatcatacgcaataaaataataaaggatgtcaatattatggtagtatttaataaaaacaaatttaaataacaaactggtgtcgtggtgtagttggttatcacgtcagtctaacacactgaaggtctccggttcgaacccgggcgacgccattgtttctttttttttttaagagaacaaattttgattggatttcttcttttttttgtttgggcattttacataaatgtatacattttcttaattaattacaaaatatgtgcaaaaaaaattaattgttacaatgtacacatttaaaaacatttttacataaaatcatacaaattattaatgtaattatattagatgtattaatgtgaaattgttaatgattaccataattagatttttatcttttttataattatttttatggctaatttgtattatattaatgagtaagctttcaaa

SEQ ID NO: 25112 - DNA, 3093 bp, Cannabis sativa
  modified_base (961)..(990): a, c, t, g, unknown or other
  modified_base (1109)..(1111): a, c, t, g, unknown or other
  modified_base (1401)..(1405): a, c, t, g, unknown or other
  modified_base (1552)..(1553): a, c, t, g, unknown or other
tctcaagtgtattagaggttctactgtattataaatgatatagcatatagcataatatatatatatatatgaaattaataacaaacctataagaataagaatatatacatacacatacaatatatagatgttaaataaaaataaaaagaaaaaaaaaaggtttttaaaattatttcaatcagattaatatatatatatataaatatatttagtgtatcgtgatcttaaaacaatattcaagaactttaacaaaatatttatcttggggcttgggcagagacttgtgctcataacgtgataaaataatataaaatatataagaacaaaagaagaagaagatgaagagagaaagcgaaactgaattagaatttatcaattgtttattctaatggggtgaatccctatttatttattaatttagtgatttggacatccataaataatatttaatatcaccattaaatttattaatgtataatttattaatatttttctttctgttacaatgagtaattatattttttaataataataataataatggtaataattataaaaattgaaaagatactttctactaataataataatgttgatagttaaaaaaatgaagagacaccatcatttaattataattaaaattataatttaattaattattgttattaataaatataaatatgcattttttaaaataataatgaaagtttagaaaatgaaaggacattatgaattaattataattattgattaataattattattgttataagtaaatattatatatatatattttaaaacactaaaaattagagaaaataaaatttaagaaggagaagatgcgacattactctcttaagtttttcctttatatatagatatagatagatagatagtcaaagatcctttgtagatgatctacattgagtatggataaatttaccgttctaccctttaatgnnnnnnnnnnnnnnnnnnnnnnnnnnnnnntaaatgatatttcagtaaattaatgtaagtactaaaatgagatctcaatcatttatctctattaaactaagctcgaaggaaattaccgtttcccttctaaatatttatagaagctatannntccatatctatgattagcgctctcactcaattgaactaccatgtttccaagatgtaagtattgggttggtcgatctttaacgaacaactcaaagaacataaataacacaattgagatcgaatctaaccatattaagattaagatctgttgaccaaagatcaactaggtaatattgacttagatagatataacgataagtttatgatatcttatccaatgtcaatatcggtccgatccgatgtatactctatatatctgatactagcatactttgccaatgccctgaaaannnnntaacacttatccaaggtgtaagcaaactttattactaattatcatatcagtgtaaatctagtgtactcacaaatcatgggatataaacttttgaaacatataatcatgattatattccactttattgacaacactataatcatgaannactatatgttctagatttaatagaatttatacattaaacatataatcgtgaaagcaatcatgtgagccatgcaacataaattgatttctgatcttttattaattagtaaatctggttatattaaaataaattttatttagggaataaaatcccaacatatataatataatgaatgtgtatttttttgggtagataaggtatgggtgtaattatttggtgggttggagcgtgttgaatgaatatttttgtttgagttattttatttaactggtttttgtgtgtgagtttttatcttagttgctttatgaaattcatcgttttgattcctaagaaattcaatgcaactactctaaaagattttaggccaattagtctttgttcgacaatttacaaaatagtggctaagatgctttctaatagacttaagcttgtccttggaagtcttatctccccttctcagagtactttcctgtctgagcgtgtcatatttgataatatctatattgctcaagagattgttcatgccataaatcatagaaagcaaggaaagctaggttgggtaggtcttaagcttgacattgagaaagctttcgaccgtgtagaatgggactttcttacggccattcatcatcgattaaaatttcccactaagtttatcaacttaatccgtcagtgtatttcctttgttactgttcgtttcagaattaatggtcaaatatttgatcaaatttttccttctcgtggcattagacagggagatcatttatcaccctatctttttctgttgtgctctgaaggccttactgcagccctccgcatccaagagctaagaggctctttcagaggcatttctattgctcgcacgacccctgcaatttcccatctactttttgccaatgacactcttcttttcaccactgcttctcttgcttcttgtaatgcccttaaagaggcccttaccatttataatcctgctattagtcaaagagtgaattacgctaagtcttccattcttttttccccaaacactcccccctctgtttctacatatttttttaagaccttaggattggagtcaaagccttttattagcaaatatctaggggttcctcaatgctttggtagataaaaaaaatccagctatgattttctcctccagtgggttagttcccagctctctgtttggagtgaaaaactgttttccagggccggtaaagaggtgctcttaaaagctgttatccaagccattccatcttatactatgtcctgcttcaaaccccctgtttcgatttgtcataaaattaaaattttaatggcttagttttggtggggatcgatgggaaaatgatctaaaattcattggtaaacctaacgtaccctttgtactttaaaattttttggtggtctgggttttaggtctctgttttctcataaccaagccatgattgctatgaaggcatggcgtgttttttctaacccaattctcttcttgccactattcttaaagccaaatacttcaaacacactggttttctcgagg

SEQ ID NO: 25113 - DNA, 1806 bp, Cannabis sativa
atgtgtattttttttagaggggtatatatgtgtgagtatgtaaatgtatctatatttatgtgtgtgagtatgtataggaatatatatttatttgtgtgtttatgtatatatgtgttaatgtgattgtatattattataattgttttttataaattaaatatcaatatttgtaatattgtaaaaaaattattttttttaatataaaaaccttgaggggcgaccattagggacgacatgtcgcccctaaaagtcaaaaaattgatttcttaaacgtttttttaggggcgactttaggggtattaggggcgacaatgtcgcccctaactagaggcgactttttgtcgcccctaatagtacttttaggagcgaatttttagagacgactttataggggcgactttgaatagttttaaaagtcgcccctaatacttatatttgttgtagtggtatgctcaccaattacgtacatacttaaattttctctaaatttaactctaaaaaaaatataaaaatcattaattatatgattgtttttttactataatatacgctttatataacatatacgtactacggtaaataaattaaattatttaatttaggaagaaatttaatagtatattctctatctgttaaatatatagttaaagcttggtattatttaaatatagcaaaaaaaaaatatataaacaaaaaataaaattaccaaacataatgtgagtatgataatagtatactataagtgatgtggtcataggtatcatttaaaaatttcacattttttcatatgtatagaggaggtaactaattcctttcatatcaaagaataaaaataaaataacttgttaattgaaagtttcttgattgaagaaataatttggtttattaattagactattatttaccttaaaaaatactaacaaaaaaaaaatattaaaaaccaaaattaaaaaaccaacatgttataaaatattttgaaaaaatatttgaaaggctcatgtgcgggaagcacacgtagaccccaattaatatatatatatacatatagaataatacttcaatagaagtattgaaaatgactttatataggtaattttttttaataagtgttattattttattttatgtccatatttaattctatgtccttatttatttatttataattatttttcaaaatactcgtatccacaaaaaaaaatattttttggtggatatgatttgagatgagagatatgtacaaaaaaatctttgcattgttctttgatgatttcgtcattagagaatttttaagtctcaacctctattagtgaccaagaaatagagtaatttttattgaaaagaaaaatgaatatcaagtgtttattacattgcaaagagaggagaggaatagatatatatatatatatatataggcatggagaaactaactatctaaactaatttaactaacctaactgacttaactaacaaagttttaatagcccccttcaagattgagtgtataaattttttacactcatcttggatacaatataatgaaattgattagggaataaaggtttagtaaattaagatgtcggctaagttggacttagatgggacatggttagtcttaatggtgccattattgatcttctcccttatgagatggaaatctatttcaacatgtttggtacgctcgtgatagattcgattctttgcaatgtgaagagcagcattgttgtcacaaaacagggtagatggcagtcgcatattgatgttgaattatgagatgattgagtggagccaagtagttcacaggag

SEQ ID NO: 25114 - DNA, 3646 bp, Cannabis sativa
  modified_base (1077)..(1080): a, c, t, g, unknown or other
  modified_base (1106)..(1112): a, c, t, g, unknown or other
tttatagtgtctcactaatattacactatgtttagtaaaagagagaggtagttggagggatagaagagagatcggaggagataacaattcctcttgtttggcaagagagattggaggagtgaagagatagttaaatgaaaagcaaatccttccaaatctccaatttagaatccttccactaatgaaaggatatataatctaaattacaattatactctcttaatatattataaaaaaatatttataaagacaatataatactttcataaatgaatattctcctttcaccactctattatttctattaaacaacttaaaatgattgttatttctcttcccctctcctattttacactacatcctttatcaactttcaatcttctctattttccatcctaccaaatatagttttagtgtgacactataaactatactaaatattttttattagtttttaatgtttaaataatatatttataagttaagttttttttatatacataaaatttgtgtttatttgtaatttaataaaataatataataaaaaatattatattaattgaaatagaataatgtacacaaagttttggtattgtgattgaaatataaaaaaaaaaattatgttagaatctatcattttttatattgatttaaaactaattttaatatttattattgtattatttgtatatagttttggaacaaagatcaattaattccttttctctttataatacactgccaagtggaatgttatagtcaacgactactcactcaaggagacaaggacacaaaaattgtgattcatttcatgattgattttatatattagaaaaaaaaattggaaatgctaaaaagagtaaggaaactaacaaaaatattggaatttggcaattaactactaattatataatattactaaccatcacaaactactatcaatttacatgatatttttttttttattattattaaaagactaattaggatttttgttcctgaactttgacatgtactaaattatgcccttgaacttttaaagtcattgaaaatgcctctgaactattgagattattnnnnttaaggacttttttctaattttagtnnnnnnntctaacatggatgaaagttcagaaccataatttagtacatgtcaaagttcgaaaggcatgatttgatagatatcaaagtttagagaacatgatttagtacataaacgattattgaaatagtttggtacatgatattatcttaaattaataataaaaataattatgaattaaataaaagtaatcattaaaataaaatataatataatttaagtaatgaatacttccgttttctctagaaaagaaaatggagtccaaacgtttgttccctttgggaagaaaaaagaaacgttagagacgacctgagactgagataagtgaattgattcggtgtttatataattttaatattaatattattatcttttgtcgtcttaaaaaaatattatttagcaaaataataataataataatattttaaactgttatatataaaaataaaagtcatgaattgaaaaatgaaaaatattatttattatattttttttattattaaaataaataaataaaagagaaagttaaggctttaaatctgtaaaaaccgccacttagctagcttggtttctcactggtcaatcttcagctctctgagctaacttccatggcgtccgcaggttcttctctctttccggttaacttttcttctatcgtttgctctggaaccaagtcatttcctggaagttcaagtaataattccattccgatttcggttccggtttccttttcgactcaccgattgtctgtgtctaccactgaagaccaatcatcggaggcgaagacgaaaatcttagagaagagaaatctcaagaattcggtagaggaggaagaatcagctcatacgacgtcgttttcacgcgaggaaggattttggtctcatgctgagttgaacgaggttgatcagataaaggaacggcgaacgagtgtaaaggattactttgagcaggccaaggattggatcaggtcagactgtggaccgcctcgttggttctcgcccttggagtgcgggtcccgcttgaatgattctcctctgcttctctttttgcctggttagtctctaattactattttttatatattttttaaatttattattattacttctcattgctttctaagattcttagacctttttggcaatttgattatgggaatttttagaactttatttgattacggctgactttttgtctttcaatcaatgattatgaatttatggttttggtttttattaggagtaaagaagacaatcatagttggtagatagaaatccagtgtgaaatgaccatttgaccttgtactgaattgagcttttattatgatctatgttttgtacggaattgaattgtgtaggaattgatggcgtcgggcttggacttgtaaagcatcatgaaaagctcggcaagtaagtaccatcttcatatagtacatcatttactaccaaaccattacagttaacttcattaatccagctactaatgctgtttattttctaatttttattgatttctaattgtgcttgaagaatatttgacatatggtgcttgcatattcccgttgaggatcgcacatcttttgtgggttcgtcttctttccctttcatttgatcagtgtgtatctatacatgttaagtgtcggataaaatgacatgtgattttgtatgatataaaaaataatatatatctagttatcaaccttctatgttgctatggctactcctacttacttaaaatacttctcaactgtaagctaaagaaaatgtattcctgtgaaatctaacctttcccctaatttccatgatcagagctggtgaagttggtcgagagaacaataaggcctgaacatgatcgttcgccaaataggccgatatatcttgttggagagaatattggggcatgccttgcactatctgtggctgcccttaaccctgacattgacctcgttctgattttagccaatcccggtaagttgttaccacccttcttcttacgaatatttaggcatcattggctgcatagagaaaaagtgtaagtttaattaaatttgcaaatgcgttgggtgagacactgggaaatttttttaaggtttataaatatatctttaatagtaaagagactacaagcttgctaagctatcccgtaacaaaaatgaactggtgctcaaacaatgtgcttgctactacacaaattgcagctctgaacaagataaggcaaaaatgctagttaatttgaacaccctagttactctgaaactatagttacatatcagcttcataattattggtgtcccattgatgaattttatgttcttgtcagctacatctttcagcaagtcgcaaattcaattcctaacacctttattggaagtcatgcccgagtccctccaactaagcctaccgtacatgttaagtttagttacaggtttgctttcctagttcctcaattttaaagtttatctatgctggatatcgtttaaagtgctgtgattgactgaattcatatttgtgttgtactgcatgtaggtgatcctttaaacatgat

SEQ ID NO: 25115 - DNA, 5623 bp, Cannabis sativa
aaaaataaaaatagttataaaacatgtttttatttttattttgtgattaaaaaattaaaaaaataaaaatgttaccaatgctattaaaagttataaaaaaatttaaaataccaaaaataaataagaaagtaaaaaaatgccagttttggccgctagtgtaaaaaaatcccaatgaaaccctaatttaaggtttctaaaagctaaaacccttacagttgcaggcggagtggagtggtttcatagctttacagtgagaaggtgatagtgagagaggggctgttatgcccaaaaccctaagtggtgccaatacgctgagccccgctcttctcgctttaaggcctcgccaggttgctctcactgcgttagacatgaagcaagataagcctaatgcctctctcgataaaaagactctgctccttcaatcagtcgcatgctttctcgaccacaacggcttctccaaaaccctcaagaagttttgctctgaggccaaaatccaggtgggtactttcacatttagcttggaggcatatggtagagcctcgttgcattttaaaacagtgttcattgatttattataatttatacccgtgagtcctttatgaagaatcaaatgtttacacctggtctataatattcattttaagattataaaattgagaatttatgctgtagtttgctcccactacgtatgaagtttgagttggttagtgtaatccaaagtttaatcagtgtaatctttaattccttaaacgaaaaattaattctcaacttttctttttttttagtttgatagaatttacttagctctggtattggtagatattggcttgattctgtaataggagaactgttaattgagacgaaggatggacctatattaattattgtgaagttttttcacagaaaaaaaattattgtgaagtttttctgtattgagtaagtgggaatttgcaagcacattatgaagttaagatgtatcttggtgagatttagaggaaatgttccttgtataaatatacacacaccttgataagagttactttcctcatttttttgttttttgttttttaatgttttctgaatcatgtagaattctttgtagtgcttagtataggttttcccattatggatcctaaagtcaagatgtccatgttcttgtttgcaatgcagatagatgcttcaaagagctcattgttggacttggaagaagtgttcaacaagtattttgacatctggtaggatgagtcctcttttctcttgtgttttaccaagtccagaaaggtttaagatgatctgactgacatttttatgttgaaaccaaataacatattttacatcgcctaaattgggtatacaaaaagattactctcctacttgaaatcccaaatactcagttggaaaggcgctaaactcttttatttaaaccaactgcatgttaaatcttctttgtacatgtgaagtgcttgcatttcaattgcagattaagttttttgtgacttctgttcatttatttttgggggactaagctgaaacatttataattcgggtgctatcaggtttcattgtgaaaaaacagcatttaaattgtccacttgggtttcgtttttcagatcactgcttcgactttattttatttattaatttatttgtttatttatttttgataggcaactaactaaacattgttaaattagcccagctgggtttgaacacaagacctcttacacacaacacacagccaaccacatgaactagactcaagtgcccatcaccgcttatctttatatgttgatggcatttttaattgtagagtatttctgtgggcacctacaatgcccaattctaccattaggcggaccgtggaagctgatttgccaagatgctttgctttttatgttttttttcccattcctaattacagttagctgttgctcataatagtaaaactaacttaaactagattgagcccaaaccttttactcacaacaccctcctaatcacttgagctttcctttgtttgttttccaatgttgggactctctaataaatctcttaataatgatccttataatacaccacatgtatgtagtttcacttagccaatcaaccaaattttcataccactcactacatatcttttcattggccatgggcatggctcacgagctttttttctgttatgtttctttcttcttcttgcagtaatgatgtcaagacagatttgaaggaccagaaagtacaaggtatgctagcaagagaaaaccacttgcaataaacacaatgtttttagcatcttgctgcatttgttgaatgtttttcttacctgtttttcatagatgcaaggtataatccctgaatatagatgaacaattaaaagtagattactaatatgcttacatcagccagcaccataacaacagtatattggagaaaataggggtaaattgtatggtagtaagattccataatgagagaaaatgaaatgaagaaaacactagcatgaaaggagggaagagagagcttaatggttcaacttatattatgagcttggatcaaagagcctaaatcgtaaatgcaattttcttttcttttattttttatagaaaaaaagaaattgaaagagatggtggaggaaaatgggggcaagagagaaaaagacttctgtatgatgcctaggcttagatagtattgttagggtagattctgtttgacttgttgaaaggacaggtttgcagcctgtgtaagagttggttaatcatggggattgggagtctggaaggtattatatcattctgagctcactgctacttcagagaacctggaattctatgcttctgattgcgattattcaacttttcttccaataataatactgactacttagttctttcctacttcagttttctatgttctatctatttgttacctgtgctgtatcaaattgattctgaaccactccaatatatgcatcatgaagttgaggctaactgctttacagtttatgccatgactttctgaagcaaaatagctgaattacacattgcttcttttcaaagtaatatgattagatgtagcattgttggatccatgcacatggagcatttgtgcatcatagaaagatatatatgtgcatgcatagagagataattgcattaatactttttaaccatttttcagtaatgtgtttttttgctgatagttgtttttcttattccagaggtaaaagtggtgaatttgctgcctgaggagcctgaaaataatgagaaaaagaaaaagaggtctagttctgaaacagaatcattgcctagtgcaactgaagaacaagtcaaagaatcttctttggaagacaaagaagtcacttgttctaggaaagagaagaaatccaaggacaagaaaaagaataagctgtccactgctgaatctcttactaatgacaatgattcccatactgtaaactcttctgcgttgaatgctcatgacacctcagtgaaagagaaaagtgccaagtctaaaactaagaagaaaaagaaggatgatttggctttggaaagttcgggtgtgaattcaaaggataaaaatttgcctagcacagatgccaatgcagatgttactggcaaggatgataaaggttctaagaaaaggaaaagattggtttctgaagataatgatttgaagccagaagataaaatagaggttgatgaatcaaaacgcagaaagactaaggatgtggaggactctaaagggagcaaggagcttaatggacatgaaaatgggaacattgatgaaagtgctgagaagccttccatgcagaaaaccaaaaagaaacaacttaatggctcagctgaggtatagtcttacagtaatgttcttaatatatgtttggaacaacattcttgaagatcctatttatagacacaagcaacccttgcatgttgaaatttcaattatttgtcatgttattgttgtttgcaactttgtattattgctcatgtttataatgtttgtttcagttatatacatatatgtatgtatatatggaattgtattagatactatatcgatagtcttttctacatatagtttttccacttttcttttctggtgctgagttttgagtagtcatacattattagattcacaacttagtttcccatgaaaatcttttatgtagtattcttcttccaaaattaaattatgaaatgtaacctgtggctgggtataattatttcaaccacaataaaaagttcatgttgacatttataatttgtgatggtttgctttgatgagctggccttcagtatttcaaaagttgcgttgattcagtcatgcagctggagattgacaaatcttctttctttttatttcatggcagccaaaaactgttaatgcatttcaaagagtaaaagtagaggaagtggtttttactgatgagaggctcaaggacaactcttactgggcaaaggtaatatacacaccaagtatttgtgctatgctttggtcagttttaagcttgtattctctgttgtgcatataagtttttcattttttcatgattcactcattgcaggatggtgcggatagtggttatggtgccaaggcacaagaagttcttgggcaagttagggggaggtatgttttattatgtggccactgtaggctgtctaaattcttttatcatttgttgttttccatcgaggttggggagaatggaaatttgatgctaagcaaatacagcctagagtaaatcacaaatggatttttctatagctacttttgtaggacttcatttgtctgattttttccttctttctgtaccgtttgaaaggtcatgtttacaacacttgctacgagttttagatatttttatggggtacctattagaggttcatctttcagtttaaggttttaagacttcattcagacactacaaagattcaaatttcgaaagaaactacgtgaaaaaggataatttaatgttgagggtgactggaagaagtcaacaacttatcaaatgatttgtggctagtagtgataatatttgaagtctgtagtctaatactcgtctttttaaattctcttcagggatttccgacatgaaaaaaccaaaaagaagcgtggaagttacagcggtgggcagattgatctttactcacattcagttaagttcaattattcagacgaagaatgaccaccaacttttccaaacctacacagattcatcatttttgctctctttagcgtgtaccaattccaattaattataacgttccgtgttaaaacaaaattttgaattcttctatccaatagtttaaagttattccttaaaacatcatttcactgtttgatttgatcccaatatgcgaagtcttttgtttcatcaccaatttagtttcttttattttaatacgttaacgagtttcgagcattaacaatatccaggaaccaagtaattacagtagtagacttctttcaagtttcattaatggatatatcatttctctgtgagtattccttaagtacccatttacattcctatgatttcaaaaatgccaaagtacaaatatatacattttgtttattaaatacgtactttcgcatgtttactatacagtaatcaggatcg

SEQ ID NO: 25116 - DNA, 1028 bp, Cannabis sativa
ttctgattatttttgcaggtggagttggcttatttcaaccacggaggcatcctgccatatgtgataaggaacctgattaatcagcagtaaggaatgaggacgatcacaaaaagaagaaaataaagggtgccatttttaaaataatgggggggaaagtcccatttcggattatttttctttcttccgtttgacattttgtagggtgtgcaggcatgagagagtctgtcaacaagggagaaatttgtttttgttgctatatatttcttttcctcttgtccatgattgcttgtttgttctcaagcattttttttcgtatattttaatttataacttgtggcagttcgcaaggtcaacacacgatcaatcattgtaataattttatgccacaatgcttagtacatacatacatggacgctgataaatatcattgtttgccttgataaaagaatacaaacttaaaagatttcaaacataagtagattaatttttatttatgatcaggggacatcaaatcaatactctaattttatcagcttggataattttcaatattcatcggagctggttctttgtatgtattcacgaagaagatagagaagagataagaaagaataataataatacgtggctaaaaacaggtgacaggaataaagcatgggaatgtataaatagaagaagagatttttgaaagaaaataaaattatagacaaagactcttacctcaatcaattggaggtgaaataatagaaaacttttcctttcttaggatatctttttcttttttttttctctagcaactagctgcaagttccacctttgattttccgactagggcttcgctgaccctcgtgctttggtgtggctatggttgggtatgagtgtttgtgtttgtgcacttttctcgggttgctatgatttttttctcttcattttttgtttcaaccgtttgtaggctttcttcgaacgggttatatgactctatcgaagattcgatgatctttttaaggttttgtgcttccaatcggggg

SEQ ID NO: 25117 - DNA, 2869 bp, Cannabis sativa
  modified_base (2722)..(2724): a, c, t, g, unknown or other
  modified_base (2770)..(2772): a, c, t, g, unknown or other
  modified_base (2798)..(2800): a, c, t, g, unknown or other
taataataatgttccttttaccacaattagggaaaagcgaatataagctttgaaatacaatgtccatatcagaattataaaacgttagaattggtggtagaagaaaaccagtagtgaaattgcgggaggcgaaagccgaggggcgggtcaagtagttgaggaaggtagatgaagcagtacggattctccatgaagccatttaaattgatcccaaaatctctgcaactctgcttctagggttctaacgctgcaaaaaggaaagcacaatgatgtcttgaacaaaagaggtgaaacacaatcatagtccaataattaataaatcaatccacaacatttactatataatataacatatattgccacaaagaaaaacaaaaaggttttcagagcagcaaaagaaataaagtatttcacaacattggagctaacacaattaatagacatatcattgagccatccacaaaaatgtacttgttttcctagtctagttccttagtaaaagaaaattacagctatggaaaaagatagaataaaacaagaatggagggtacacggccatctaaaacaaacaaagcaaataataagaaagggaaataacattacacgattcctaggaacaaaagaagagcataacaacaaaacaatgtgattccacaaaaagaaaaggcaagaaagtccagaatcatacatacaataaactaaacaaagcacacaggcatatatccacatttatgttctatcgcatgttggaaaaccaaagcatttcattttctcaaagaaaccaactacacttggttccgaaaggaatggtataaaacactgaaaaactctactaaacccaatcaaatttatgtaacaaataagtttatgggaacatcaagtttaatttaaaagaatccaaaactcagatgaaaaaggttcaaaaaaaaaaagtcgggacttaacgtaccaaattactaaagcaattgagcatataataaaatcagaaactccctaaacaagtctcttcacaaaaaaatggtgtaaacatgacacatgttttaaatcgaatgaaaattcaactatacatagtgtaaaagtccaacaagaaaatgataaacaaaagccatttcgatgatgaattgaacccgcgtaactgatttaataaaatgcagagagagggagagaaagatctgaaaaaagagagaattatattgctcaatatataaatttcagatcagtgttacccattgaatctatttcaccaaaaactactacaaccatcttcagatattagctcagcctactaaagaaaatgactttatctataccaaaaaaacaaagaaacccatgaaaatgaaaagaaaaaaaattgattacatccaacaagtacgcatattagaatacatccaattttgtaggatccacaataactatttgagacttgtgaattaattcccttccattacaaatttggcagagtttcaaaaacacagattcttattattatcattgtattttttataagatggtaattaatttcaaatggattctacttgaacataaacaagaaatgtttttttagatgtataagaacttcttcatgctaaaaagctgataaaagacttctaggagttatagtacctaagtagcaagaacaaggtttactttagatgtaggattgttcttacacgtcaatcaaataaataagcattactaagagaattagagagacacaaaacatgacattcttatatttaatttatgatttagcagtactttttgatttaccgaagttataaaaaaccgaacaaaagaaattcattgttataaaatcaataaataaaaaaaaagtatagccacaaattaatatctcaaaaccctaaaggagaagacccaaatcaaaactcagtctcaaacattcatccccaataattatgttatccttattgatattaagaggccattcctccgtgaatagaaaaatgattgctgtatacttattccaaaatgcgtaggcatgatgaatttctatatacattcaaacacatgaaacaaggattgcatcatgaatccataaaaaagcaacagagagcattgtgatagtggttgttgtatcatatgaagaggccaaagccaaaagatacgaagatggaaatggagggcattaccaaaagccgttgaagaaaagcaatcgtcgaccatgaagaggagagaacggcgtcggacttgaggagatggtcctgcgcagagagagaggccaccaccgtgaggcaaaactggatgagttgtttaggagttggagtttagggctttcattctcactctccaactctcccctccttaacccatttttatttatttatttttttgtttatttgttcttttagggggtttcttcaattatttttggaaattttgcccttaaatactaaaatacattttttttaatgggattaaaaatttgttatctgtagttaaaatatttttgttattttaagttttaaggagccctttggtatgcaagtgttattttatgggaatagtaatattatgatcacaaattacttggaatagaatgtgacaacttttttttacaataatattttttttgtgtaaaattctaatgagtgattctacattgaaccttcttaaaaggagtgtaattatgaactctctacttgtttcggtatctatctaatttttttttcatattcatatactttataattatttaacatannntatactttataattatttaacataatctataaaattttaaaaaatnnnataatctataaaattttaaaaaattnnnaataatttataatataaaaaacaatatttaaagagtctattttaaacgtatatttattaattagtgact

SEQ ID NO: 25118 - DNA, 1396 bp, Cannabis sativa
aaaacatatcttgactaagtaattgagggttcagcctaggattttcgacactaaataatttcatgcttaaagaagtaatgagataggtcaaaagtacacactatttttgcacactatggtatttaagtgggattgatcttcacattttttaattgtgtggtttaatagcacatcgtagtatgcaaaagaaaagtgaagtgtgtaacttgagactgtacctaacattactttttttgaacatgaaattatatctaatgttgtagctcctataccgaaccctaatgttgagttttcggatatgtttatactcaacattaattaaatacatataatgttgagttttcgaagtacaattgaagtaattaattaatcgtgtatttagagaacataattttaaatacaataattagtttatataatatatttttgttgaaaacattaattgatattatgtactagatattttattagatttaaatttggggtcttgcttttattttgaattggtgttttttatagagattttggtaaaaatagttgagtttgcacctagcctatttttaatatttttttaagtaaattacatgatttacatcatatttactaactaaagaggccaagtactttttttttcttttctaaatagtgcgaagtgaacgaaataaagaggccattttgtgtagaaccctttatttttatcactaggctgcccttggtgttggtgtgcttgactacagaattactcaatagaactagccgtgatttctttaaaatgtcaatgttctattttcacaaatcatgtcaatcactccattttttggtttattatattagtattattttttaatttttttttatagaacttggttgtattcggggccgactgaagctatgggtgagtagggcttatatttgaatcctcttagcaaagaggtgtccattgttttttaatatccatttccgattttaaaatttctttaaccattttcacgtatatgacaaattaatcttcttttgctttcttcatgttaattctttagcttgatggaaaagcttgtaaaactaattaactaattaattcttaactgctgaagttcgttgatgcctacatatagccgtactgtggatgcctatactgtgataagaaatataataatttttatgttgcatatttttacttaattattttattttgctaatttttagttttaattttagtgtattggaaacttcaataactttttaccaaacaaaagtcaaattattgtattttggccaaggaaaccctcaaacttgttaagatgtctctagttgtagttgctgcatgtagagaataaaactatgatttaatggtagtgctcaaaatatttcacattaaggtcctctaaacctatga

SEQ ID NO: 25119 - DNA, 2038 bp, Cannabis sativa
atgttcttatatatgactcaattctctaccatttattctatgtgggacaatatccacaacaaatagccatatcacttgcgggcaagtgatcttatccgatctgcacctacttatacagacactctgatacggttcaagattgatgagtaaaaaattgtcccacatagaataaatggtagagaattgaaccatatataagaacatgggctactccactcatcatcaattggttttgagatggaaccccatgattctcaacaattattgcacattggtatatatcttctgttttcatgtaaatatattttcctttacgagagtacatgcacatactctttgccaaatacatataatcatcttccaaggttatgagattattttgtcatgtttttatttgtgagttcatcatcaattattcatctatcaaaaatatcaattagaattttaagatatacataaaaaaactcaaaataaaataaatattaggtaatgtttgaaatattttctttcaacttaaggcccagctcatactaatatacaaaaagaaaattggatatttttctctttgttttgttgtctttcattttcatgtaaaaataattttctttacgagtatggttactattcttcctgagttataagattatttattagattttcattcgtaagtttatcaattattcgtctataaaaatattagttatatatttgggacataatttttagtttattttaattttatatatttttaaattgtaattcttttaaaatttgagaatgatttaatatttaatattttaaattatttagactaatgaaaacatgtcacgttcacacaatagcaatgctaattgacatttaacgttgataaattggcgcctcaaatttgaaagtagaagtaataaagttaagggagtattttcatagaaaaaaatttaagaagagattaagtgtataaaattataaacaagagcgggaatttaattgcaaattactccaaatctaaataataaatgataaagtgaacataatattgttagagttgatgccctaaaaagttctaatagacatttgattttatataagagttgactaatttgaaatatgtttgaaggtttaaatataattaataataatttatatataaatatacaattttttatttcatacatgagactatgatattgtaatggtataagagaattgagatcatatgttatgaataaaacagtcagtaataaattaaaatttagaatctttaatcaatgtgttctagtatggtaattgatagccgtcactcgacatacgagaaattttgattcagattgctgatgtggcttgacatcttagtaaaggtgttgtatataaaaaaaaagattatgtatgacatgaccaataagcaattactctcgttatcaaactagttgtatactataaagactaaattatatcataattgatgctcaattagtagatcaacctaaatcttgagaaatcatgaaatcttgttcatgttattaaaatttttaattcactcgttaaaatctctcagatacgagatttacaacttctgctttgggattctaataatgtggatgattgagaatttgatttacaatgtgaaaggcttaatttttctaacagatcaaatattggttccctttaagtgttaattctaagactaaaaaattgtgcacaaatctatttagattaacttttattagtaaatgaatgatactaaatgataaaaaagtaatgagaatggtaaaatagtaatttgaccaattatagttacgaacaaatacaagaaaagtgaattattaatattgattatatcaattgatagtgtaaataactcaataatataattttaattactaagaaagcaattatatatatttatatatttttgctggaagtaaaattttatatttatagtaacataataataaaatttataaatatgattatttaattgatgagactcaataaataatctaatggctaaatagtaatttttcccactgaactttgacat

SEQ ID NO: 25120 - DNA, 2283 bp, Cannabis sativa
aaaaaaaaaaaaaaactccaaagataaaacaatacgaagatttacaagttgtttatcattttatatatttgaataatatcgataactaatctatatactatagtcacataacattggacgtccaaacaaacataaattagaaatactcgtaaaaatctaaataacaaacttgttacaagtcattttgatataagtcctcatttctttaataaagaatttatagctctgctttttgaaggcacaaaacacaagtctagtttgccttaatgaagaaccaactacatcatttctcaatcttttttctctaattcctcatttctttttagccaatgattttagaggagtgctaaggagtgagagttgtcactaaattatgaagagagtttaaaagagagtctctttagcatttgtaatacattcgcttcacttaagtagtctcatatttacacagtatacacgggtatatatgcacacttcttaggaaaacttctagaaagtcacttatgatctaaggttaattgaggccaagcacatttaactttgaagttcttaagtgatggataggttgagcatgcaatttagaaaaccaaaaaaaccattcagactgacctgccgaacactgttggaaccgaaatcggcgaaactgaaaattgaaaaaaccactaacagttaaaactgccattgaatgtcaatttttttttttgaataataaaccgaccattatacatatatattaatttattaagttgtttttgctttatgtattgtagttattgataatatataataaaaatatattattattttattaatattaaagttaaaagaataagaaaatttggtttttgaacaattaatttatatggttggagttgtagaatgtagaataatgtgcttatagaacaaattggatcagatttttaaaaaaaaaaagagtattgaggttcaaaacagtcagttttaagaaagttctggattgggcggtcagtttttgaattgcaccaatcaagaccaaaaactaaattatagatttttatatagaaaaaaatcaaccacaccgactgatgctcatccctagtgatgggctatcgaaaagaatatgcatcatattgtcataggtagtactcataaatctatttaagatctcttcaaggctttaactgtgtaatctcatacttacacagtatcaaaattatcgtacttgatctttttcaaacaatatgaaattgctcaacatacccaatctttctcgttattaatttgtcacaacactcctctcctcttaattttgattttatatgctcttgagtttattttccttctattatctctattattgcaaaaaaaaaaaaaaaaaataccattcaccttttaaaagtggtccggtgatgtacctcttatctgtttcggtatttgagagaattttttagtctatttgtttatggttgtctatgttgtagttatttaaaacatcttgaaaaattttgagagattcaaaaaatttaacacagagaaaatatgattcaaacagtctgttgcaacttgcacgtttttttattttatacgcatgtgaaagacagtttgagttctatttctagcgtgttaaatttttataaatttctcaaaattttatcgagtatcctatttgattaaacaaaaaaattagactccttctaagaagtgcattacaaaatttttcaaaaaaaatacattttgaaaatttaataaagttttttttttttttttttgatgcagaaaatttaataaagttagtcaagtaaatattggaggaggcatttgctattatgagccgcgtgggtgctccgtaaggaatttctgtgttttttttttttggaaagaaagaaagaattttgagttagaagttagaagagtgagagaagtcaattaataagaagaataaattttgggcagcttgggctgcacgtactctcagtttgggcagtttgggcagaagttgacgtggatccatctacttagtcttatagtggaccactttcccattaatagaataaatggcaactcaaaattttaacttaatcacccttcctaatcaaacttatttttctaaaaaaaaaataaataaatcaaacttattttttttttttttttgtgtttttttaataattctcttttgttctaatattttcttcttttgaaaactcaaaattttatagattaacctaaataataataataataataataaaaaatttgcttcacaaagacctttgtaaacttttcaccaaaaataaaataaaaatt

SEQ ID NO: 25121 - DNA, 5414 bp, Cannabis sativa
  modified_base (1424)..(1434): a, c, t, g, unknown or other
acaatatactcgtccacctcagatgggatccctgaattagagttgggagccagagtgtctactctcctgggcttcttagcaaccttagtctccaccatttttcctttgcgcatcctgtccaagggaggaagaatctcgccttcttcttcctctactccctattcctcgttgattaaaacgacttggtccaggggaatgctggaagaagacctcccgggagtcaccaccaagtctcgtgcctaaggcgggactggtttgggagtgtaggtctgggcaagagcatccaggagctcatccattggcttcgctgcttaaagacatggacaaataaaggcgttagaacattatcgagaagtcatgcatgcaagaacaaaagaataaaactaatcctaccctgacgatctaattctgccctagtaaaagcatgtattaaaaggctggtgtcaacgaattcaaggcaactatgatcagacaccatcgtatggtagaaattgtaatcgattcgcattgttcaaatccaacgggtgagataaatgggtgccagggcagttgaaaatgtttgagtacttttctgacactcgggttaaatgtgacgatttctcaatggacgggaagcgaatcgttgcctgcaaaaggaaataaatattaatgatgaccatcataaatgcagcccacgcgcttacggcatgtgccgctatatcaaacgagacatcaagcaagcctcacttactcttcactaaatgaggcttgtggcgtaaatattgcctttgttttttttccacaaatacgtggacacggataagggtgacacgtgggtctgaaagaaccatcactcacgaaaatcaactaagtcttagacaaaaaaggaacacctcagggaaggtgcctcctggaggagagcataagacacatctctgccctccgagaggctaaggccatgagaaggcatgttcgggaggtaaagagattacttgaacaatcactttgcatttaatgctgcatggggaagacgtattagaacttccataaaagacgtagcagatggtgtaaaccccctttttctggtgattacacaacaatcaatgagtctagtgacggatactttatgaggaatcacatcagtcaagaggggataaaagattatatccacctaactcctaagataccttcggtgtaggtcatgtatttcctattttgtatctgtcaggaatatgcgcccctatgaggcaaacacagaaagaaaagttatccattcctacggatccgcctagaaaaacactataaataccccacaaacaaattgaaaaggggtcgatcgattttattgaaggaatccaagagagaaaataggagagaaatccaccaagaacattctctgtaataaatactctcattaatacaaaagactcgtggactaaggctcnnnnnnnnnnnaaccacgtaaaaatctcctgcattaaactttctacaactcttctcatatattatttaattggttgccgaaaacctcgatcaacaaaatttaatatccttaattatttaacaaaaattaaaatatcaacactatatacaccatttttatttttaacaaattttaatcaatgtgtatctataatgtgtaccaaataattttaattatgttgtaaatttttgaagaaacttataaaaaaaactatatggtgtatcgatttttttcaataagtaaatctcttcaaaattataataaaaaaaactatgataatttttatattattaaaagaaacattatattaaaaatattaattaaatttcaaaattaacaatacgaaatatttttatgattatataaataaaaataacataatattgatgcgtgttgtaagtcacaataaatttactaatattttaattctaataccttatttcagtataattgtaagtaagggtcgatcccacgaggcctaggtttattcaattactcaaaaattagtgataaaagttagaaaaggggattttaatgtttagaataaaatatcatatgtaaaaataaaaacaaattgaaagtgagactacgatatgagataactagtttattgacctcacttttagtcaatgacagtgagtcaattaataagcgattaagagtgttaattatgtaataaatgtaatttcctattttatactttgtaggcaaaaggaaaaccttccctcatgcattacgaccctataaataatgacttagcctcactgtgaaagggatcgaaagaattacttcagagaaagatctaagagaattactcagagattcattgtaagagcttttagggagaaaaacactttgttctttctctcaagttaataccactcaaggggagtaggctattaccacactcacggggctgaacctctttaaattctggtgttttttattactttaggaaattagaataggttgtcatatttctctaattcaatcccacgatcgtagggattgtcttcatgtttggacttcacaagatcattctgaagtaattaactcctaataagtagttcggcaagccagatttatacctgccaggatgatctatctttcatcctgctcaggtaatgaaaatgttatgcaggttcacatacaatatggagcctgttcgagacattcaattttgcccagatacaagaaatgtaggaaacgtgtcacctaagtattctgccttgtcattgtgtaaaaaattggataacatttgccgcccaagtctgcgcaggacctcgcacgtggacttcactcggtctaaattcttgtccgaacgggtggcacgtggtcgtggtgttgattgataacttgatgtgactctgacaaagagtctctttagtttcggctcattaatgctgattgataattttaccttaaaccatgcctcaaaatttacacgtgatgacaattattctacaaataatcgagtgcataacgtatacttttggggggaatttgagacatttaaaatttgaaattattactctttttttatctgcttataaatagggttgaaaatcctaattgatcacttttagccatttttactcttaaagaatgagagcaaaaatcttttttctttcaattccttcaaagaatcctcagaaaataccagccagcgtcgttcgacaaatcaaaagctttgaatccgtgagtaagttcttcatttccttcgttttatacatttgcaatgtttaattttcttagtttttaattgggaaacttgatttttttgaacttgttctaggagaaccatagaaattttaggtttaagaattcgaaatcttgattatgcttaatcgcgttgcttgatcataactgcattttaatttcaaccccacgacactcattttcacttacccatttggggtttagtgagaatcagacgttaattcaaattttgagcttttgggttgcaaacttcattattatgcaaaatttctatttttgatcttacaatcaaacctggtccgtataatttaacaagttttcatttgttatcccgaccaaattctcatcttgtacgaggaccatcctcgcctttatgctagtctgtcctcatccaatgacagcctttccaattctagcttcaaagatttggagataagcagtgaacaaacaccttttccagaacccgaggtgcaacaccacttttatcccggccatatcgagggtcaaggttacagacacttcattttggagcttagaaaggggttcagatgctatcttctgtccaattggacatacattgttcatccgaataccgctgataccttgcccgtaggctgtccaaatcttgctgctgcaggtaaacccgtcgctacatttgttgtgaccattgataaacataccaacaaggttccgtccaggcttaggatgatggcgcgcaccaagaaaattgtgcggaagtcttcattatccaacccacaaattgcctgtcatgccactttaaacactgagcaggcccgacctgatactgaagaggaagatactgctggggacgttgaagtctaagagatggaggaccaaggcgaggtcagtcctgctaattcttctgaggctgaagatgaggaaggtgcaactcggaagctactgtttggtggcttcaacaaagagggacaacctgtgtttgaggccgggaaggtcttagaggccggtgaagactatgtcactgaggaatatgtcgaatgcttccttccctctcccaactagttggcgactagtctaagtgaaggttactgcgcttggttaggcgctcacaccaagcagggtgcaatgtcatcctttctttcttactttaggaggatcataggctactaccaccttagcccgaccaagtttactcctaagggcatcaaatacttatctgccctattcatcctttatgcctcacaaggatggggtgatccgtccccacatgacaccagatggctctttgatttgaagtcaagtcccaagcaaagcagatcggggtacttctatttttcgtagatcgaggagaagtggttgacgggcaccacgaataccgaggtgagtaaaatagggaacttcgtggatgagtattactttttccaaggaatggacaccgttcacacccacttgcagcaggtgccatcatactgccgccctccattcacattggggctcctggccattgaggccaattttgttaagtataaaatttacccaaaagatttcgtgccaagggccgtgaagaaggccaagaaggcaaggtctggtgttaggctatttttagcctaagtttcgggtcacattaataagaattttctcaaatattctcgcctttttggagcggttttacgcttgattttccttgttttaggttctcggtgcattggagttcaaaatcagtcaattggggaaaagacgggacaatctggtgaaaaatcggttgaagctgccaaaattggatcagcagtcgcgaccagcacaaggcctagtcgcgaccctttttttctggttgcgactatggtcacaacttgaggattttggtagataccctattttttgagttttgcttgtggtcgcgactagccattaagtgggtcgcgaccaagcacaaaaaatgagctctttaacctaattctgatatttttccaattggaggcacaaccttaattcctatataaaggactcgactcagattgccaaaggcatcagaaatcggcccgaaaagtgaatgaaggaggagaggaagcgatcttgaagacccggagcgaaatcaccatctagtttctttctttcactctttattttcctttatgtctatttttgttttagatttaatcttggatgtttattttattttatgaatgaatttctcatttagggaggatgatgaatattgtttaaagttttgcctagttaatgttaattgccattc

SEQ ID NO: 25122 - DNA, 2300 bp, Cannabis sativa
  modified_base (568)..(569): a, c, t, g, unknown or other
ttattatcatcaaatctaaggttgatattatttcggaattttttaaaatagtacaaatagaactttaaacttaatttgtaatattttttttagtacgatcaacttgaaaaaatttctaacataaacaaatgaagaaaatataatcagttttgtcataacacttctaaattgagttattattaagttttattttgataaaaatcaattcaaagtactatttttgaaaaatataatatctaatttgttatttgacaaaataaaaggttcaatcactaacttttgcaatatatgtagtttaaaatagtattggaaaattttataatgtacccctataaaaatagtgtattgatacatctttacctgttttagtatttgaaataatttttagtcaattttttttttatgatcatgtaaattatagttatttaatacattttgtaaagttttaaaaaattcgaaaaagtttaacacgccaaaaactgcgttcaaatagtgtgttgcatgcgtgactattttattttatacccgtgtaaaatagacatgtttaaatattattttctatattgtnnattattctgaatttttcaaaattttatatgatatcttaaatagctataatgtacatgaatatagaaaaattagactaaaaaattcttctagatgccgaaacaattagagagtgtatcaatacgtttattttaagatggtgcgttgtagaatcacccaataataattaccttttaatttattatcaaaaaaaattatatatacgatatatattgtgagtgattggtaatacaaacaaaaatagttgcaaactcaaagcaaatgataatggagctaaaaaatctcaaaatgataaagcatagaatgagtttgttttacacacttataaatttttaagataatcatctacaaagtttaatttaattataatatatatgtgcaatatattatttgaattttatttttagcaagttaaattattctaaaattttaaataattcaaagaaaaatcttatagaagagaaaagcaagatttgcaggaaaaattaaaacgggaaatggctattccaacattgatgcaaaaacaaaagttatttgaacaagactccatactaaaggtttttgaacaagactctaaactaataaaagttttttcattttgaacaaaatattaatgtcgcgtttgatttaaaggaataattattttgtattttatttcaaaaagaaaataaacattccactaaaataataaaaaattgatttaattaaaaaaatattataatactttaaaatacaaataaataaataaataaataaaaaatattttatttacatttcattctatttcattatatcttcaactaaaacttaacctaaaaaattaattacaattatgcgtttatcaattgctaatatatacaatgtgagaatgggaacaataaattacaattcgttttgggaatcaaattaactaaaaacgaacacattaatttactaacgattaagaattcatatggtgggaaatgttaataatgattcttaacttttattttagaataaaatgagaggagtccccactataagaagtttagtttacatggaattagctgaacagaaacttaattattggggaataaagttaattatggagataaaaatagaacaattaatgtccaatgacatctcaattatggaaccaaaatttcaaactccaccaattgctttgtctaatttaacttattgtacaaattgtttcataaattcttttcataattacaaataagtaaggactattattattgaatcacattattataattatatacaatttgcatgagtgaatccagttattttatttattttttaatatgaaaaaaagtggactagaacgtaatattatgtgtatatagtaaaaaaaaaaaaagtgaatagcggtataaatatttaaagttttaaatttataagcggtataaatttaatatttatttttaattgcaaaagtactcaatatttataaaactgtaatttttttcttcaattttgtcactattcaaaatttattaagaaattatttaaaagtaacttatactaaatgtttttatttagactcaataatttagaatttagactttataagtgtcttatttaagacaataataaaatttatactgaagaaattaaaaaagaaattataattttacaaacactaaatatattaaagggaaaataccattttggaccttctgttttgcaaaagttaccaattggaccatgtgttttgttaaatgacaaaa

SEQ ID NO: 25123 - DNA, 4281 bp, Cannabis sativa
ccgttagctagtgtctaggatgacacgtgtcactatctaaattgtagtaattttgagtagttttgttgctaaaaaacaatcattggatacctacctcttacaaatataaaactttgagtaattatgctgcaaatatctcattagtaaaccatgtcttggccattgtatgaatttttttccctattcattgaaacagcttgttggatccgaggtagtctcagtctcagctttaacatcttatgtagacaagactttgcctccaccagataacataacctctcttttgtaagttatagctgtgcaaattcaaagatttgtttttttttccctgttttggtatgaaacaacttaagctaaaggtgaaaaattcgatttctttgacttagccaattggcgaacgggtgttctggagtttttgtaatgatcgtctcctctagctcgcccaaggtatatgtcgttacgtttactataacattcttttagtttgaaagttgtatgtaattaattttatttatagatttacgattaattattggtttgctctgaataatcccccttgctgattattgctcttatgtaatcataaaaggctaatttttttcttttggggaaattttagaccaagcttctgataaattttgattttcgactagaacagcactaactcgtcaatagatttcttgttgaaagtagccttgatcccattgataacgagtgagcccaaataattcaattagagtaattcgatatctgttattattatgatattcagttttctaaattcccattaaatattagaaatgtattcagaatttgatctattcaatgaaataataagataaagacataacaaaacgtttcttttgagtatgaatacaattgtctctgtagtaattttaattttttttttgtagattatctggagagttgttggcttgaaagggacattacaagtcgagcgcggaaagcatgacggtcaacatggctacctggtaacttgaaaacctaacaaagcttatgaatgagctttagattagaatatgttcaagaatgggagttgccatttgggcttagcagcaaaaagtttagttctttttatcaaaaattgtataaagtttacatcttttgatattttcgatgttgtttcaggttacactttatagtactgatggacaaagcaaaagcacattctacaaattcagtggagtgactgatgaattcaaaagtttcatatatgacatatcccaagccagcataaaggtaattaattcaaaaattgtataaagttttcatctttgattaaaaattgttgtgattggatcacacctccaacaagaacaagaaaatcaactaaacaagaattcaatttccaaatcaataatcaaaaatagcaaagaaagaatatcaccagaaattgtgtagactaatctatgaaacaatgtgtttggtgatcaaaactattggagcaaagaatgaactttattgatgaacatgaagtaatgaagtcaaaactattggcaatacttgttttcctatggcatgaagtcatgggttcgaacatgggtggctctctctgggaagaagtatttaataaatctgccttaaatgtgaacttttggtgtcggcccattcccaaccctctacttcaggaaaggcattcaccactagttgttcggtgcggttttggtgacacgccccatcataagtaggggagaccacacgaatctcgacgaacattctagagcggggttggagctctcttggtaacacccagagaggagagctacattggtagccccctcctctcctattattccatcaaagaaaaaaaaaaacactagaatacagattcatctcacacgagcgaagtcatttcaagaatgaacaatccctttaacaaccctccaagaacacacactctgttttcagctatgaataggtggaagtagactacttatagtagctggttttagttgaataactaacagatttagttagttagttgctgaggtgttaaagtccttttctattagtatcttaattacaacaaaattgaacacttttctggttagttttgttatgccatctttcacttacatgagatctttcttctgtcatttgaaggggaatgaccacaaaaccgagcctcgtatgtctttcgaggaaggtgccagagacgttgccgttctagaagcaatgcttgaatccggcgcaaagcaaggtgcaccagttcaagtaaaaaagttttgaacttgattgatgattaactcttctttaaaaatatgattgaaattcatgatacattggtatcttgatacccctattttttccctttaacatcaagatatgaaatgaaataaaaagaagagatttgtagaactagtgcttatttgaataaagtttacttatttgttgttgtcattatcaaaacaacttttttttagcaaagtattcacttatttatatcactttatgtctccaaaccagacaacaatgaagactactaattaaggtactaggttttaagcaaatactaacaaaactttagtcctcatatcgatttcggtattcagaagagttatttggtctcatttttattttcataatcgtatgcgttgtagttatttagaaacacatgtaaatttttagaaaaaataattatgcatacagtaaaatatttatattttattttcgatattgtaaattatttaaaaaattttaaaaaattaacgggcagccctaaataccttcaacgtacaaattcaagaaaaaaaaagatcagactaaaaaactcttttgaataccgaaataaatagagagtctgccgaaacactttattaaagtgtgtactataaacttacctctatatttcaattcccaatgttgccaaaatagtgaaaatgtacaatgaaaaaagaaaagaaaaaacagattagagatatcaatatttgttgaagagaagagtagttaaagtgaagagctttatgggggtttggtgtgtgaatattcttcaactttgaaaatctttttacctaaataacaagatattgcagaagatggggtctaattgatcatcttcacttcatatgcatgtgagcattaaaaccatttgatcttaaaggccaaaaatctcattcaaggtagtggagcaggatcttacacatgctgcaatccaacttgtatatacatacatatatatatatatatatagcatttaaactcttccaaatcaaagcctatctttttctgttgtagcactgtacacagatcatagttatgataatgaaaatgacatcacttttcacagccagaaatccactctgctaagggtagtttgtttcattttcattctttttttatatcaagaaaataactcattcttaagctattatgaccaatgttgaaaaagtaatatttttttaagaaaaaatatatatatatatttgtaaaatgagatttcagacttttctagtgaggttagatagtttaaacaattgagtaaaactattatttattttagggtatgaaaagaataggtgttcctcatttagttatcatatataatatgatgctattaattagctatactttcaagctatgagtgaataaaatgacatgagagttaaaaggtttaattatgtttattaaataaatatgatttttggctttcgaactattatcactatttcatcatgtctcttcaaatttttaattttgccctaaatccaaactattattattactaaattgtgtttctcaaattttaaacagttttacgagttgtgaaattttttgtaaatatgattagatagtggttatagttcaaaagtaaaaagtatatttatttatttatttatttatttttgtgtttgtatatgtttaaatataaagcccaccaacctaaccaaacatcaatagttttctcattattttgctcaacgcttgggaaagcaacagttggcctaagtttttgtaatttttcttaccaaaaaccaaaccatgaatgatatctataaacataaatataataaagttattgtttcccattttggtcccatatcaaaacacccttttctctcatgcatgggaaaaactaaagtacttgctcacaaaataaaataaaatgaattcagtcaattctaaagttaaatttttctttttctttttaacaaaaaatatatatatatagaaaaaaaaaccttaaccacttaaggctagctcaagtggtcataggaggatgcgtgtgtgttgaaagtattgggttcgagtcccaaattatgc

SEQ ID NO: 25124 - DNA, 3404 bp, Cannabis sativa
ttatctaaccaaatctattttaaaattttaagagagaattgatgatgaagagagacaatgagatcttgaatagctttgttgttgctgccagtaactaatatgttatcgacatatacttacactaaggtagtatgtgtagatgtatgttggatgaagagtgaatgatccgacttagatggattaaacccaagttgtaagagacaatggtgaagtttatcaaaccaagcacggggtgcttgttttaatccatatagagctttatgcaatttgcacactagattaggagttgtggttatctcaaaaccggggggttgtagcatgtagacttcttcattcaatgtgccattaagaaaggcattgttgatgtcaagttgcttaattgaccaggcatttgatatagcaatggtaaggacaattcgaattgtcacgggtttgacaactgggctgaaggtctcagtaaagtcgaaccccggttgttggtgaaagcccttggctacaagatggtctttgaatctgttgtgtgttccatcagagttttctttttccctaaaaacccatgtgcagcctattggagtccttccttctggtaatgggacaagagtataagttccatttcttgttaatgctagcatctcatcggtcatagcttgattccattgttcatgttgcaaagcctctttgaaacttcgtggaatctttgtagtgaaatagactttgggtttgtggattccagactttccccttgtttgcattgcatgagagttctttggagtgactggatctgttacagcagatgctgattctggtgcagcaacatatgctggttctggtgcaggaacagtagctgtttctggtgcagcaacagtggtagattcatgaacaagagcaggagctgattcagtatgaggagaactgagagtaactggtattgaagcactgctgttgtgagtctgtgaaggagcagaattgatcaaacttgtgtcctgaaatggctcagcaggaggtgaggcggatacaacttgttcctgtgttgggacatcattacttgccacattgggcacagaattattagtatgtgcaggaagattatgcatgcaagaattgctaaaggtgcttgtgagaggaataagagcagatgtagcaaattcagcataagaatatgaatcagtggacaacttgggaattgttgtaaagggaaatgatgtttcatcaaagatgacatcacgggaaatgtataatctgccagatgtgtctaagcacttgtaccctaggaatgtgcatggagaagaccgaaattgtagtttgtgtttgttatagggtcttatgttaggaaaacacttgcagccaaatgttttgagggtagtgtaatcaggtgagatgttgtataatttttctatgggagacttgtgttacagggtagatgtaggtaatctgttagacaaataaacaaaggttcgaaaagcttcatcccaatatttgagaggcataaaagcatgtggaaaaagagtgagaccattctcaacaacatgtctatgcttcctctcaactaatccattttgctcatggattgtgggacacgagtgtctatgagtgatgccaaactgtttaaggtgatcagtaaataacctaaattctcctccccaatcgatttgaaggcattttatctttttaccaagttgtaattcagcttcggttttgaattgcaagaaggtttttaaagcctcaaatttgtttttaagcatgtagatccaagtgaatctagagtaggcatcaatgaaatggatataatatttgtatctatttatagaggtggttttggcaggtccccataaatcagcaactactaactgtagtggttcactatagacagtaagagatgattgagggaatgacagcttgtgaattttgcctaaacaacatgatgagcaatcagaaaaaggtcttttattattgatagtgatattacaagattggagaacagatttaactatcttttctaatggatggccaagtctattgtgccatagatcatactcagatatggttgatctatttcagtgagtacaagtggaggaatctaactctttattagaagacacagtggttgtgaaggcacatggggcagtggctggggcagaggcttgcacatgaaattgagatggcttaaaaatatagaggccattctggtgtatcccagtgagaaggatggcttgtgtttcctgatccttaacaaaacatttgttagcatgaaactcaaaaaacacattattgtcatgagcaaatttggaaacactaagcaaattctttgtaatttcaggaacatgtaaaagattgtttaaaacaagaggatgagaattatgtgtatgaataaaagatttgccaatgtgtttaatggacagacctaaaccatctccaacatagagttgatctgctccttcatactcagtgcttatgttcaggttttgcacattgggagtgcaatgattcgatgctccagagtccggataccaattactgtcatcaagagtagttgtggcagctatgttggcttgagcattgggagggttggtagggggaaaaactcctgtgaagctcttgtcaaacctgtagaaacaatcaagaacagtatgcccgagcttgtgacatagctggcactgaactcgatttgaggaagtagtgaatctgccccctctgctgtaaccagacatgccacgaccattagtattgagataaggagatgaattaggatagttacctccattagtggttccccgatttggaaagcctcgaccgtttcctcgtgttaaaccagaaggtgttgggggaattcgatttgtgtttgagaatctgttggtgcgattttgaccattttggtaggctatattggcttcagcatattgatctatatcagtagttgtgagattgacacttagatcattttcttgatcaaaatcagtctttttaatttgagactcagaggcaagtaagagagcttcaatttcggctactgagtattcttcgattcttgtattagtcgatatgatgaaagtgtcatactcggggggcaggcctttaaaaatagcagcaatgtgatctcttgagctcaagacttctccaactgaagcaaggagatccacatgctgcttcacttttagtagataatcatttaatgacagagatccttttctaagcttcagcaatttcgtcctgaactcaaggatcttagatgagacttgcagagtaaaatgtttctcaagagcgctccagatttgtcttgctgtgttgcacccaaccatgtgtgtgaggaggctctctgtcattgaagaaagaagccaagaaaccagaagctgatcttgaacctcccattcaagaaaagctggattgaagttgttcgaggcttgatc

SEQ ID NO: 25125 - DNA, 4106 bp, Cannabis sativa
tttctacaatgttaacaattaaccaaaaagattgtttattatttgaatatttatttatttattattactatgtgaaagaaatatcacttttagctaacgtattgcaaactgcactgtaacggttataattttacaacatatttttacaagttagcgcaactcatatttgcgctatcataacaagttgtgtaaaaaaaagtgacttttttcagtgtaatagtataatgccctgacaaaaattacttttaccaacacatcttgcgactgcgatagtataaaaaccataattttacataaataattttattttttttttttattttacaatcttttgaaagagagtatatatatgaatgatgagtacttaactatttgagactttcatttattttcactttattacaaaagaccccactaaaccctatatttggactaatttctccaagtactcactcaataagaccccactctctctctaaactctctctcatcttgtcagtagggcacaaatgacaaaaatggccatgtgacattatacatataaatatatatatatatatctaactcttcttcttcatcatctttcttctaaaaccctcttgaggtgatcatatctatatataaatatatctatatagactcaatatatatctcatgacattctctctagatccatttgattaaatatataaatatatttataactttggtacatatgatcttagctctctccatgcctagaggcaatctctattgcttttttcctagtacaagtaattttttttaagtactttgggagagttgggtaagaaagtatatatagtacttgtttttgtgatttgttggtgtgtgagaagtgtatatatatgcatatatgtatataaatttgactttaccaaactaacattacttaatatatcatgtaaaagttttcattccttttcatttagtctagattcgaccaaagaagttgggcatgtaatgtagttcacttactatactccattttggtgttgtattttttatgtttagggttattggacttgtcacttttccaatgccaaaccctaaaatttttggaaatattgtatatgtgaaatccttatataataatattcttaattatatatagtattaatattgtaattagcatgcacttacaattagaaaagtgctaatcttgtgcttagtgataactttcttgttttttttttttttgaaaagtcattttactataaatcaatgataaattgttaaggagtactcaaaaatcgcggacaagtatctgtctaacatcttacaaaactagtattcccaaatcacataattatttgtagaagaattattgtgtttagtgataacttattagtcataggataatttatggatatagatgtgtctaaattaatatgtgacagttagtatagtttcgtgatctataagggggaaatgttaggtaagttctgcaatttcacattatttgaagaagatcaagtgtgataattttgaaactgtataggtatgagactatacagttaaagataacttaaatggattaattgatactgcctatatcaacaaaagaactccacatttaagcttgcttgacctaggatatacaagattggtgacctcctgcaaaattttcccataaaatgtgcgagtgaggacaaagcacgctgaaaatacttgtctgtagggccagtttttacttcaaaaagcagtcagaattatgtactcgtgtataagagtcattagtctgtgagggaaagcctattaatgaaagcttgaaacgggggagtaacaaaatattactttatagttaaaagcaacttttgtgttttactaatatataaaggacttttgatataagaagtattgttttgagaccgaaaaataacttttatattgtgattaaaagattgttataaaagacttaatgatttttttttttttatctcgtactaaaattaggcatagaattattagagttagttcagttcaattatttaaatgtaaggtgcagaaattcttatatgctatatattgtttcatttcatagttattgctttgcatatatattgtaagaattaagtagaatgtcaagaattgtgatatataaatatatatttatatatatatacacgtcagaggtcaaaactgttaatttatggctcacaacaacaaaatcaaccccatatcttactaagaattaggaccacacatgtgaccaattaagtggggcaatagctagttatacacttctcttacttcatcacatttctaatttaattatataaacatatatatataaatatatgttaatatatgtgtgtataaattagtagtagcatacaaaagattatcatttgtaagtaggtatagtaagacactttggtaaaaaaagataccccatacatatacattaatatgttccttttcttgacattcctcctcattcactgaaatgagtatatgacatattaatttttatttttttaaaagaaattttaaatgtagtactagtttattttcttgactcttaagaacatttaatcattatcaattaataaaaataaaatcacacgaagaaattataaagttaattacaattattagaaatgaattccaaccaactactctttaggtccccaagaatcagggtaataactccactaatcaaaaatgtgattattcaaaggtttgctgatatgaacattgctctacttgctaagttattttggatggttttgaaggatgaggataagatatgggttcgagtgtttagagataaatactattaatatagctctacttggatggtggaaaggaagggaactgactctcggtgttggaagagtatgcttgaagctagaaagatgtgcatggatagagtgggtattctgattgctgatagggatagtgagatgtgggatagaccttggatcccacatagacatgttgatgatttgaaagaaaatttaaagtttaaaagcaatcatgctttctggaaggttaaagatttgttcgtcgggaattctcgagtatagaatgaagggctggtttgagactgctttaatgacaagattgcgaatgacatcctgaggattaaacctctagctgaaggttctgatattctgttttggaaggcagctaaatctggtattttctcggtaaaaagtgcttattggataagccaacaaaataggtttaaagtgtcttgtgagaaatgggtgaaattatggaaactggagctccaccgtcgtttaaaactattctgctggaaagtaatttctgacattttacctactaaggctcgtcttggatttggcacaggtgatcaactgttgtgcaagttctgtaatatggaggttgaatcttctttttatcttttctgccaatgttcagtcactcgtggtatctagttcagaagtcaatggggtcttaggattgattgttcaaactggtccaacctcaaggattttggctcctagtggattgggctaattgattgcgagctagtcacgtttactgctcgtgtgtgtgatacaatttgaaagtggaggaatgagatgatcttcaaggaccaagtgtgtgatctggatgcaatctttcttgattgtgtcagaaggttcagagagttttttagcaacctctgctggtttgagcaagaggaaacaactacttcgggaaggatggttcatctgcaacatgaggatggagatatgtggtactgtagggttgatgcatctgtagtgatggaagatgcagggtttgctgcagtgcacctgaatgaggcagagttggcagactcttaggtggcggtggactttggccctattttgggtgtgttggaaggggagttaaatggcattgctctcgctttacaggtggctatggacaaagggtacaatcaagttagaatcgagacagattctatggctgctgtgcatgcttttgaagcttgtgcggtctgagaatttggttgctgatgctctagcgtgttgggctagagtggcaaaggtcaaaagtaatggtgtgttaagggaagtggccccctctttggctactagtttggtttagtttcctttcaataaaatatccta
